United States Patent Application Publication US 2023/0026259 A1 - sequence listing, part 33

SEQ ID NO: 118053 - DNA, 1356 bp, Homo sapiens
  Payload ID: 3100
  Gene Symbol: C11orf54
  Gene Name: chromosome 11 open reading frame 54
  ENST ID: ENST00000526335
  CDS Start-End: 910-1356
gatactaatctctgtgtatgtgcacttatttgttacaaagtatacttggcatatattttattttttagttgcaatgatagaaaagcatatatttaaatatcaaattataattggatagattatcagaattgaacattaaatctatttaccaagaaagtatgtttatttgtaaatgaaaataaaaatttgaatttcaaaggctaatcattccataaaagtttccatttctattcgtaatttaaattttattttgaaaaagtgatagtctaaggaactcatttaatttttggcctaaatgtgaaatatagaataaaaaacacacatatctattacagaaatacttgagatcctatatgtactatacaaatcctatatgtactgttatctacaaccatttgaacacttatccataaacccctaataagtaccttttgcttcaagacctatattccttagacccaccattagaaaattggatgttcactccagctatatgatatttaaaaaaaaaatgaatcagctgggagcagtggctcacacttgtaatcccagcattttgggaggcagaggatggcttgaggccaggaattcaagaccagcctgggcaacatagtaacaccttgtttctattaaaaaattagttttaaattttaaattacaataaaataaagtgtaagtattaaaaggccacttgtctatttctcacttggaatattaaatgctggaagctgtgtttgcctgtttatgaagatagaaacctaaatgcccttttgttctgtttatatgtttgaatgctcaatgttcatttccagaacagaaactgttcatacttggtgcgctgtggactcttgtgataattaaccaagagtagctctatttgtccaacctcacacctaaagaagaaagaaaatggcttgtgctgagttttcttttcatgtaccaagtcttgaagagcttgctggagttatgcagaaggggttaaaagataactttgctgatgtccaggtctctgtagttgattgccctgatttgactaaggaaccctttacctttcctgtaaaaggcatctgtgggaaaactagaattgcagaagttggaggtgtgccttacttattgcctcttgtaaaccaaaaaaaagtttatgatctgaataaaattgcaaaagaaatcaagctgcctggagcctttattcttggagcaggagcaggtccatttcagactctcgggttcaattctgagtttatgccagttattcagacagaaagtgaacacaagcctcctgtaaatggaagttactttgcccatgtgaaccctgcagatggagggtgcctactggagaaatacagtgagaaatgt

SEQ ID NO: 118054 - DNA, 1258 bp, Homo sapiens
  Payload ID: 3100
  Gene Symbol: C11orf54
  Gene Name: chromosome 11 open reading frame 54
  ENST ID: ENST00000527363
  CDS Start-End: 745-1258
aaaattagccgggcatgatggcacatgcctgtaatcccagctactggggaggatgagacaggagaatttcttgaacctgggaggcggaggttgcagtgagccgagatcatgccattgcactccagcctgggtgacacagcgagactccgtctcaaaaatttgggaccgttaataaacagttatatatatttgggagattagattacatgtattaaatcaagaacaataaaagctggtatttgataaagtactaaagtaaatataacatcctaaatgtttgcaatagaatgattatagaggatatgttgttggaaagtaccagaactagaaacccagtttctaagcaacctgtgaatctttggaaaattagaaaaaaaaatttggaagaatatttcaaatggctgaagatcaccgttccacttgctaaataggcatgttaagggcagaggccactcagattaatgaagtgttctattaacagttttaacgagaactcctgcagtactcttagaaacacccttaagagtcttgtctgtgttccctgttgtgattggcttggagtaggatacctgtctacctcatattacttatatttttccctgtcttcattttatctccctctggttgcatacttcatcactgaacacttaagaaactgttcatacttggtgcgctgtggactcttgtgataattaaccaagagtagctctatttgtccaacctcacacctaaagaagaaagaaaatggcttgtgctgagttttcttttcatgtaccaagtcttgaagagcttgctggagttatgcagaaggggttaaaagataactttgctgatgtccaggtctctgtagttgattgccctgatttgactaaggaaccctttacctttcctgtaaaaggcatctgtgggaaaactagaattgcagaagttggaggtgtgccttacttattgcctcttgtaaaccaaaaaaaagtttatgatctgaataaaattgcaaaagaaatcaagctgcctggagcctttattcttggagcaggagcaggtccatttcagactctcgggttcaattctgagtttatgccagttattcagacagaaagtgaacacaagcctcctgtaaatggaagttactttgcccatgtgaaccctgcagatggagggtgcctactggagaaatacagtgagaaatgtcatgattttcagtgtgcattactggctaatctttttgccagtgaaggccaacctggcaaggtgattg

SEQ ID NO: 118055 - DNA, 2442 bp, Homo sapiens
  Payload ID: 3100
  Gene Symbol: C11orf54
  Gene Name: chromosome 11 open reading frame 54
  Uniprot ID: Q9H0W9
  ENST ID: ENST00000540113
  CDS Start-End: 138-1028
gggggcgccatttttctcgccgcgcagggaggactgactaacgtgggcggagctctagctcgcgtattctgaggaggcggggttggcctaggcgaagatccggactctgggtgttttgctaccgtgaccgtttagttatgcagaaggggttaaaagataactttgctgatgtccaggtctctgtagttgattgccctgatttgactaaggaaccctttacctttcctgtaaaaggcatctgtgggaaaactagaattgcagaagttggaggtgtgccttacttattgcctcttgtaaaccaaaaaaaagtttatgatctgaataaaattgcaaaagaaatcaagctgcctggagcctttattcttggagcaggagcaggtccatttcagactctcgggttcaattctgagtttatgccagttattcagacagaaagtgaacacaagcctcctgtaaatggaagttactttgcccatgtgaaccctgcagatggagggtgcctactggagaaatacagtgagaaatgtcatgattttcagtgtgcattactggctaatctttttgccagtgaaggccaacctggcaaggtaattgaggtgaaagccaaaagaagaactggaccacttaactttgtgacttgtatgagagagaccctggaaaaacattatggaaataagcctataggaatgggaggtactttcataattcagaagggaaaagtgaagtctcacattatgcctgcagaattttcttcctgccccttgaactctgatgaagaagtgaataaatggttgcatttttatgaaatgaaagctcctttggtttgtctaccagtttttgtctccagagacccagggtttgatttgcgactggagcacactcatttttttagtcgtcatggagaaggtggacactaccattatgacactactccagatatagtggaatatcttggatacttcttacctgcagagtttctctatcgcattgatcaaccaaaagagacgcattcaattgggcgagattaaatcagctgatacttatttagaaaaagaaataattaaggttaattaattgattgacttattaattaatactgatataaaaccaatagaaatgatcccacaggccaggcacaatggctcatgcctataatcccagcactttgggaggctgaggcaggaagcacactggagcccaggagtttgagaccagcttgggcaacatagcaagaccctgtctatttttttaaaaaagtaaaaaatagaaattatctcactacttaaatcccatttttttcacttcatatgaaagaacatattgatagtatattctatattatttcatagatctgtctgaaagagattgggaacaaaaatatctaattgagatattctttaattttttacatagcagctttattttttttattctgtagtatcagcgaaatcagtcatgtttataccttgaatataaatatcaggaatcatgcaattatttctactatgtatttagtagtatcttatatttgtataacattattacattttgcaaattagtatcacaactgctaagtagatgtttctgagtattagaaaaatcagtgttattacctgcaggatattaaaaaacatttgaaaaagagaaaaagaaaaatcagtgtttagaaatgttgatagttattgaatctttgaattgaattttaaaaatccattctagtaatcagagtatactttttttatagaacaaggtggcaggtggggagccctttacccttctggtgaagttaaaccatagaagtttacaatttgcctttcacaaacattagcagtccgggcatggtggctgaagcctgtgatcccagcatgttgggaggccgagtgggaggattgcctgagcctaggagtttaaaccagcctgggcaccatggtgagaccccatctctattatttaaaatgtttcttaaataaaaaaaacacaaacattagcaactagttggctagccataattcctcccttgtttcgattgccagttagaagcaatttttatttcactggttatttgcaagagaaggggtaaaaaaacagcatcagagtgcaacactgaagtgagcttactttaatttgtaagtgaagctgttgctgaacatgaccactatcgttgctgaaatataaaattatactcactgattgtaatggttgaaattttcctgaataatcattagccaaagatcaactctctaatggtgctaatggcaatctagctaatgtgcaaatttaggaagtcttcagtactaagtacataattttcaaataatattttttaattgtctactttggatgttagctatgtcttgtgagtataaattccaattttaagcactattttgatgcaaaaaaatgaataaaaaatttaatttatgatatgtttgtaatatctta

SEQ ID NO: 118056 - DNA, 2417 bp, Homo sapiens
  Payload ID: 3100
  Gene Symbol: C11orf54
  Gene Name: chromosome 11 open reading frame 54
  ENST ID: ENST00000617482
  CDS Start-End: 233-1003
gggggcgccatttttctcgccgcgcagggaggactgactaacgtgggcggagctctagctcgcgtattctgaggaggcggggttggcctaggcgaagatccggactctgggtgttttgctaccgtgaccgtttagaacagaaactgttcatacttggtgcgctgtggactcttgtgataattaaccaagagtagctctatttgtccaacctcacacctaaagaagaaagaaaatggcttgtgctgagttttcttttcatgtaccaagtcttgaagagcttgctggagttatgcagaaggggttaaaagataactttgctgatgtccaggtctctgtagttgattgccctgatttgactaaggaaccctttacctttcctgtaaaaggcatctgtgggaaaactagaattgcagaagttggaggtgtgccttacttattgcctcttgtaaaccaaaaaaaagtttatgatctgaataaaattgcaaaagaaatcaagctgcctggagcctttattcttggagcaggagcaggtccatttcagactctcgggttcaattctgaggtaattgaggtgaaagccaaaagaagaactggaccacttaactttgtgacttgtatgagagagaccctggaaaaacattatggaaataagcctataggaatgggaggtactttcataattcagaagggaaaagtgaagtctcacattatgcctgcagaattttcttcctgccccttgaactctgatgaagaagtgaataaatggttgcatttttatgaaatgaaagctcctttggtttgtctaccagtttttgtctccagagacccagggtttgatttgcgactggagcacactcatttttttagtcgtcatggagaaggtggacactaccattatgacactactccagatatagtggaatatcttggatacttcttacctgcagagtttctctatcgcattgatcaaccaaaagagacgcattcaattgggcgagattaaatcagctgatacttatttagaaaaagaaataattaaggttaattaattgattgacttattaattaatactgatataaaaccaatagaaatgatcccacaggccaggcacaatggctcatgcctataatcccagcactttgggaggctgaggcaggaagcacactggagcccaggagtttgagaccagcttgggcaacatagcaagaccctgtctatttttttaaaaaagtaaaaaatagaaattatctcactacttaaatcccatttttttcacttcatatgaaagaacatattgatagtatattctatattatttcatagatctgtctgaaagagattgggaacaaaaatatctaattgagatattctttaattttttacatagcagctttattttttttattctgtagtatcagcgaaatcagtcatgtttataccttgaatataaatatcaggaatcatgcaattatttctactatgtatttagtagtatcttatatttgtataacattattacattttgcaaattagtatcacaactgctaagtagatgtttctgagtattagaaaaatcagtgttattacctgcaggatattaaaaaacatttgaaaaagagaaaaagaaaaatcagtgtttagaaatgttgatagttattgaatctttgaattgaattttaaaaatccattctagtaatcagagtatactttttttatagaacaaggtggcaggtggggagccctttacccttctggtgaagttaaaccatagaagtttacaatttgcctttcacaaacattagcagtccgggcatggtggctgaagcctgtgatcccagcatgttgggaggccgagtgggaggattgcctgagcctaggagtttaaaccagcctgggcaccatggtgagaccccatctctattatttaaaatgtttcttaaataaaaaaaacacaaacattagcaactagttggctagccataattcctcccttgtttcgattgccagttagaagcaatttttatttcactggttatttgcaagagaaggggtaaaaaaacagcatcagagtgcaacactgaagtgagcttactttaatttgtaagtgaagctgttgctgaacatgaccactatcgttgctgaaatataaaattatactcactgattgtaatggttgaaattttcctgaataatcattagccaaagatcaactctctaatggtgctaatggcaatctagctaatgtgcaaatttaggaagtcttcagtactaagtacataattttcaaataatattttttaattgtctactttggatgttagctatgtcttgtgagtataaattccaattttaagcactattttgatgcaaaaaaatgaataaaaaatttaatttatgatatgtttgtaatatctta

SEQ ID NO: 118057 - DNA, 3693 bp, Homo sapiens
  Payload ID: 3101
  Gene Symbol: C11orf57
  Gene Name: chromosome 11 open reading frame 57
  Uniprot ID: Q6ZUT1
  ENST ID: ENST00000280352
  CDS Start-End: 637-1515
aagtctcctcctttttctcccaaaccacttcttcccccctaccccccgccacgcgaggctgcggcgcacggtatgggtgtgtttgtgtgtatttgtgtggggagggcgtttggagggaaggttaccgggagctccgaggccgctggggaacagggatcccggtgacaaagatggggatatttcctctgtcttccacttggaaacctcaacccccgcttcaggctccctagatactttctggggcccaaccgaaggccgtagccatccaaagcgttcccagcctttctggggagtgaaacttacccccggggttcgtcctagaggagcgtgagcggggaatgcccaggtcaaccgggctgtccgaattccgccccggctcagcctccggcctcagtccgggagagagatctgcctgtcggtctgggctgggggaaacgcggcagtggcctgggccacaggtgagggcagagtaaccagtgggaaggctgcgttttcacgaaggactcgggtgaagctgcagagctgcctttgagccctgactccttggcttcctgggtcggaggagatcttgtaatggagtggttcttcgtctcactagcaagatgcctgatttcctcaggatcaagggattgaagaatgtcccggattccactggggaaggtcctcctgaggaatgtcatccggcacacagatgctcacaataagattcaggaggaatcagatatgtggaaaataagagaactggaaaaacagatggaagatgcttaccgggggaccaaaaggaaaatgctacccagcagttcaagccggatgcgcagtgatggttttgatgaagaaagtcaaagatactattggaggccaaagaatgaaatttctgggacactggaagatgattttcttaaggctaaatcctggaataaaaagttctatgattatgaagcaaacatgccagacagatggggtcacagtggttataaagagttataccctgaagaatttgaaacagacagtgatcagcaagatattaccaacgggaagaaaacatctccccaggtaaagtcatctacccatgaatcccgcaaacacaagaagtcaaagaaatcccacaaaaaaaagcagaaaaaaaggtcacacaaaaaacagaagaaaagcaaaaaggaagccacagatataacagcagattcctcgagtgagttctcagaagaaactggggcttctggtacaaggaaagggaaacaaccacataaacgcaagaaaaaatccaggaaaaagtctctcaaaaaacctgctttattcttagaggcagaaagtaacacttcacattcagatgattcagcatccagcagttctgaggaaagtgaggaaagagacactaagaaaaccaaaaggaaaaagagagagaaaaaagcccatacctctgtagccaacaatgaaatacaggagaggacaaacaaacgcacaaattggaaagtagctacagatgaaaggtctgctgagagctcagaggatgactaaatgggaaacacttttgttttccacatgactgtggatatttacagttcttactccttgtggttttgccagtgactcttgttcagcacggggcctgaggtcagagctgtcttgtgccatctgtatgttctgacagacgtcttgtcttctattttggcgttaagcttgatccccttttcttgttaaaagggaatctggtattttgttatgaaggtttcttgaagagattatttttttttgcaattaattacgtttagtgtagagtgcatatacagcaaattaaaggacccagaaagctggatccaatagtgacctgggtacaccaatcggaatattgaatttggggaagtcaagggctgggatcaagaggtggattggaactaatgccatgtaggatggtatgacaaggcaacactgtattgctctctgtttatatagcaggtgtcacaactaacttgtctttagccttggtgctttgatccttctatattttgaccccacaggtgtggtccggtttacttaatcaggacatgggcctaagaacaaaccttttcccttcatgataacatccatagacaacttattagaagggactagagtttttgcaaatttccctgctggatggggcctatagctatacttagtatatgcctaaacatggtaattggatagtaaatggttttctagttccattgctgtatatttgcctaaatggacttgtgttcaaattatttcttcaattgtcatagataatcctgtaccaaatggggaagaattaggaaataatcatgttgtctaatggtactctggattcagggcagcaactgccatttaaatgttgtcttgttcatttctaaatctgttcatgaagtttaggttttccctgaaactaagttgaattatttccaaaatgaaacaggcttctcagggacatatccacttcttcccagtctgcctttggattaaagcaccaagcagagaccacattaattccctttgctatactgtgatccttagtatgttaattcttaagaaaccaacatatcactgaaagaaggctggcagaacgcaagtgcattttttcactgtgggaagaaagatcaagtgacgtattattttttcctggttgtcacttaatgggctgagtaaaaagcttgaaaactcagactttcggtcttggttctgccactcattggttatgaggaggcccagagcaggtaagttcaccttcctggccttactttcctgatgtgtaatacggaattacttcacagtagcatgacagtataagacaccagcagtagatacaactatgatgacattccatgagttggtatttttagttctaactgctaaatttgttctctttacgggacagatttctaataaagtgcttggtcttaaaatacatggttggacagaggtgccctatcccttaactatgagcaggtgctaccttttgggatatttattttaaattttaatactttggtactcaattgtcagtgttccatggtgtgtatttttatttttgggattagtgggggtctaaagggagaagaatagtctctaattactacctcttaacctaaagcaattattttgttcctggagcaagttaaatctttgttggaaggagctttggccatatattttttagcatgcattgtttctgtgccctgaaagtacctgaaaggttttaagcacagactcaggaaaatgtgccagtagaacaggccatctccaggaaattggctctatttgggtcctgaccttcccttcctcccaagttagcaggcttgttctttcgcaaggaatacacatcttgcctttttttttttttttttgccatgttttccttttcttggtcatgtataagcaataaagctgttttttgttcttcatctttcttaaccccaaattttcttctatgccttaggcttcgatggttcttccaacccccttaatatggcttagggtggtttttcaaaacctacaatcccccatttgcactactggccatggaacatttatttctagtgttcctgccaatcagagatctctatattaaattctaaaatgggattaaaagaagagttggagaattcacacttattgagtaactgatgtcatacaacctggaatttctgaattccaaataaataaatttcactctttgaa

SEQ ID NO: 118058 - DNA, 3669 bp, Homo sapiens
  Payload ID: 3101
  Gene Symbol: C11orf57
  Gene Name: chromosome 11 open reading frame 57
  Uniprot ID: Q6ZUT1
  ENST ID: ENST00000393047
  CDS Start-End: 610-1491
cttcttcccccctaccccccgccacgcgaggctgcggcgcacggtatgggtgtgtttgtgtgtatttgtgtggggagggcgtttggagggaaggttaccgggagctccgaggccgctggggaacagggatcccggtgacaaagatggggatatttcctctgtcttccacttggaaacctcaacccccgcttcaggctccctagatactttctggggcccaaccgaaggccgtagccatccaaagcgttcccagcctttctggggagtgaaacttacccccggggttcgtcctagaggagcgtgagcggggaatgcccaggtcaaccgggctgtccgaattccgccccggctcagcctccggcctcagtccgggagagagatctgcctgtcggtctgggctgggggaaacgcggcagtggcctgggccacaggtgagggcagagtaaccagtgggaaggctgcgttttcacgaaggactcgggtgaagctgcagagctgcctttgagccctgactccttggcttcctgggtcggaggagatcttgtaatggagtggttcttcgtctcactagcaagatgcctgatttcctcaggatcaagggattgaagaatgtcccggattccactggggaaggtcctcctgaggaatgtcatccggcacacagatgctcacaataagattcaggaggaatcagatatgtggaaaataagagaactggaaaaacagatggaagatgcttaccgggggaccaaaaggaaaatgctacccagcagttcaagccggatgcgcagtgatggttttgatgaagaaagtcaaagatactattggaggccaaagaatgaaatttctgggacactggaagatgattttcttaaggctaaatcctggaataaaaagttctatgattatgaagcaaacatgccagacagatggggtcacagtggttataaagagttataccctgaagaatttgaaacagacagtagtgatcagcaagatattaccaacgggaagaaaacatctccccaggtaaagtcatctacccatgaatcccgcaaacacaagaagtcaaagaaatcccacaaaaaaaagcagaaaaaaaggtcacacaaaaaacagaagaaaagcaaaaaggaagccacagatataacagcagattcctcgagtgagttctcagaagaaactggggcttctggtacaaggaaagggaaacaaccacataaacgcaagaaaaaatccaggaaaaagtctctcaaaaaacctgctttattcttagaggcagaaagtaacacttcacattcagatgattcagcatccagcagttctgaggaaagtgaggaaagagacactaagaaaaccaaaaggaaaaagagagagaaaaaagcccatacctctgtagccaacaatgaaatacaggagaggacaaacaaacgcacaaattggaaagtagctacagatgaaaggtctgctgagagctcagaggatgactaaatgggaaacacttttgttttccacatgactgtggatatttacagttcttactccttgtggttttgccagtgactcttgttcagcacggggcctgaggtcagagctgtcttgtgccatctgtatgttctgacagacgtcttgtcttctattttggcgttaagcttgatccccttttcttgttaaaagggaatctggtattttgttatgaaggtttcttgaagagattatttttttttgcaattaattacgtttagtgtagagtgcatatacagcaaattaaaggacccagaaagctggatccaatagtgacctgggtacaccaatcggaatattgaatttggggaagtcaagggctgggatcaagaggtggattggaactaatgccatgtaggatggtatgacaaggcaacactgtattgctctctgtttatatagcaggtgtcacaactaacttgtctttagccttggtgctttgatccttctatattttgaccccacaggtgtggtccggtttacttaatcaggacatgggcctaagaacaaaccttttcccttcatgataacatccatagacaacttattagaagggactagagtttttgcaaatttccctgctggatggggcctatagctatacttagtatatgcctaaacatggtaattggatagtaaatggttttctagttccattgctgtatatttgcctaaatggacttgtgttcaaattatttcttcaattgtcatagataatcctgtaccaaatggggaagaattaggaaataatcatgttgtctaatggtactctggattcagggcagcaactgccatttaaatgttgtcttgttcatttctaaatctgttcatgaagtttaggttttccctgaaactaagttgaattatttccaaaatgaaacaggcttctcagggacatatccacttcttcccagtctgcctttggattaaagcaccaagcagagaccacattaattccctttgctatactgtgatccttagtatgttaattcttaagaaaccaacatatcactgaaagaaggctggcagaacgcaagtgcattttttcactgtgggaagaaagatcaagtgacgtattattttttcctggttgtcacttaatgggctgagtaaaaagcttgaaaactcagactttcggtcttggttctgccactcattggttatgaggaggcccagagcaggtaagttcaccttcctggccttactttcctgatgtgtaatacggaattacttcacagtagcatgacagtataagacaccagcagtagatacaactatgatgacattccatgagttggtatttttagttctaactgctaaatttgttctctttacgggacagatttctaataaagtgcttggtcttaaaatacatggttggacagaggtgccctatcccttaactatgagcaggtgctaccttttgggatatttattttaaattttaatactttggtactcaattgtcagtgttccatggtgtgtatttttatttttgggattagtgggggtctaaagggagaagaatagtctctaattactacctcttaacctaaagcaattattttgttcctggagcaagttaaatctttgttggaaggagctttggccatatattttttagcatgcattgtttctgtgccctgaaagtacctgaaaggttttaagcacagactcaggaaaatgtgccagtagaacaggccatctccaggaaattggctctatttgggtcctgaccttcccttcctcccaagttagcaggcttgttctttcgcaaggaatacacatcttgcctttttttttttttttttgccatgttttccttttcttggtcatgtataagcaataaagctgttttttgttcttcatctttcttaaccccaaattttcttctatgccttaggcttcgatggttcttccaacccccttaatatggcttagggtggtttttcaaaacctacaatcccccatttgcactactggccatggaacatttatttctagtgttcctgccaatcagagatctctatattaaattctaaaatgggattaaaagaagagttggagaattcacacttattgagtaactgatgtcatacaacctggaatttctgaattccaaataaataaatttcactctttgaa

SEQ ID NO: 118059 - DNA, 2322 bp, Homo sapiens
  Payload ID: 3101
  Gene Symbol: C11orf57
  Gene Name: chromosome 11 open reading frame 57
  Uniprot ID: Q6ZUT1
  ENST ID: ENST00000420986
  CDS Start-End: 282-1160
atatctagttccggaatgtcccccttctggtgccaggcttgcttttcagttgggcctgacccacttctcttccaggaaagcgcccgccttccttctgcacccgtcaacctctggagtgtcctgaaaaccctcccttgtgggagtctctgggctgcctgttggtgggacgatttctcaggagcacgacttccggcctgaaaaggaagtctcctcctttttctcccaaaccacttcttcccccctaccccccgccacgcgaggctgcggcgcacgattgaagaatgtcccggattccactggggaaggtcctcctgaggaatgtcatccggcacacagatgctcacaataagattcaggaggaatcagatatgtggaaaataagagaactggaaaaacagatggaagatgcttaccgggggaccaaaaggaaaatgctacccagcagttcaagccggatgcgcagtgatggttttgatgaagaaagtcaaagatactattggaggccaaagaatgaaatttctgggacactggaagatgattttcttaaggctaaatcctggaataaaaagttctatgattatgaagcaaacatgccagacagatggggtcacagtggttataaagagttataccctgaagaatttgaaacagacagtgatcagcaagatattaccaacgggaagaaaacatctccccaggtaaagtcatctacccatgaatcccgcaaacacaagaagtcaaagaaatcccacaaaaaaaagcagaaaaaaaggtcacacaaaaaacagaagaaaagcaaaaaggaagccacagatataacagcagattcctcgagtgagttctcagaagaaactggggcttctggtacaaggaaagggaaacaaccacataaacgcaagaaaaaatccaggaaaaagtctctcaaaaaacctgctttattcttagaggcagaaagtaacacttcacattcagatgattcagcatccagcagttctgaggaaagtgaggaaagagacactaagaaaaccaaaaggaaaaagagagagaaaaaagcccatacctctgtagccaacaatgaaatacaggagaggacaaacaaacgcacaaattggaaagtagctacagatgaaaggtctgctgagagctcagaggatgactaaatgggaaacacttttgttttccacatgactgtggatatttacagttcttactccttgtggttttgccagtgactcttgttcagcacggggcctgaggtcagagctgtcttgtgccatctgtatgttctgacagacgtcttgtcttctattttggcgttaagcttgatccccttttcttgttaaaagggaatctggtattttgttatgaaggtttcttgaagagattatttttttttgcaattaattacgtttagtgtagagtgcatatacagcaaattaaaggacccagaaagctggatccaatagtgacctgggtacaccaatcggaatattgaatttggggaagtcaagggctgggatcaagaggtggattggaactaatgccatgtaggatggtatgacaaggcaacactgtattgctctctgtttatatagcaggtgtcacaactaacttgtctttagccttggtgctttgatccttctatattttgaccccacaggtgtggtccggtttacttaatcaggacatgggcctaagaacaaaccttttcccttcatgataacatccatagacaacttattagaagggactagagtttttgcaaatttccctgctggatggggcctatagctatacttagtatatgcctaaacatggtaattggatagtaaatggttttctagttccattgctgtatatttgcctaaatggacttgtgttcaaattatttcttcaattgtcatagataatcctgtaccaaatggggaagaattaggaaataatcatgttgtctaatggtactctggattcagggcagcaactgccatttaaatgttgtcttgttcatttctaaatctgttcatgaagtttaggttttccctgaaactaagttgaattatttccaaaatgaaacaggcttctcagggacatatccacttcttcccagtctgcctttggattaaagcaccaagcagagaccacattaattccctttgctatactgtgatccttagtatgttaattcttaagaaaccaacatatcactgaaagaaggctggcagaacgcaagtgcattttttcactgtgggaagaaagatcaagtgacgtattattttttcctggttgtcacttaatgggctgagtaaaaagcttgaaaactca

SEQ ID NO: 118060 - DNA, 3739 bp, Homo sapiens
  Payload ID: 3101
  Gene Symbol: C11orf57
  Gene Name: chromosome 11 open reading frame 57
  Uniprot ID: Q6ZUT1
  ENST ID: ENST00000532163
  CDS Start-End: 767-1561
ggaagtctcctcctttttctcccaaaccacttcttcccccctaccccccgccacgcgaggctgcggcgcacggtatgggtgtgtttgtgtgtatttgtgtggggagggcgtttggagggaaggttaccgggagctccgaggccgctggggaacagggatcccggtgacaaagatggggatatttcctctgtcttccacttggaaacctcaacccccgcttcaggctccctagatactttctggggcccaaccgaaggccgtagccatccaaagcgttcccagcctttctggggagtgaaacttacccccggggttcgtcctagaggagcgtgagcggggaatgcccaggtcaaccgggctgtccgaattccgccccggctcagcctccggcctcagtccgggagagagatctgcctgtcggtctgggctgggggaaacgcggcagtggcctgggccacaggtgagggcagagtaaccagtgggaaggctgcgttttcacgaaggactcgggtgaagctgcagagctgcctttgagccctgactccttggcttcctgggtcggaggagatcttgtaatggagtggttcttcgtctcactagcaagatgcctgatttcctcaggatcaagggattgaagaatgtcccggattccactggggaaggtcctcctgaggaatgtcatccggcacacagatgctcacaataaggtgggaggtacaacctagttactcctcaacgcttactgaagattcaggaggaatcagatatgtggaaaataagagaactggaaaaacagatggaagatgcttaccgggggaccaaaaggaaaatgctacccagcagttcaagccggatgcgcagtgatggttttgatgaagaaagtcaaagatactattggaggccaaagaatgaaatttctgggacactggaagatgattttcttaaggctaaatcctggaataaaaagttctatgattatgaagcaaacatgccagacagatggggtcacagtggttataaagagttataccctgaagaatttgaaacagacagtagtgatcagcaagatattaccaacgggaagaaaacatctccccaggtaaagtcatctacccatgaatcccgcaaacacaagaagtcaaagaaatcccacaaaaaaaagcagaaaaaaaggtcacacaaaaaacagaagaaaagcaaaaaggaagccacagatataacagcagattcctcgagtgagttctcagaagaaactggggcttctggtacaaggaaagggaaacaaccacataaacgcaagaaaaaatccaggaaaaagtctctcaaaaaacctgctttattcttagaggcagaaagtaacacttcacattcagatgattcagcatccagcagttctgaggaaagtgaggaaagagacactaagaaaaccaaaaggaaaaagagagagaaaaaagcccatacctctgtagccaacaatgaaatacaggagaggacaaacaaacgcacaaattggaaagtagctacagatgaaaggtctgctgagagctcagaggatgactaaatgggaaacacttttgttttccacatgactgtggatatttacagttcttactccttgtggttttgccagtgactcttgttcagcacggggcctgaggtcagagctgtcttgtgccatctgtatgttctgacagacgtcttgtcttctattttggcgttaagcttgatccccttttcttgttaaaagggaatctggtattttgttatgaaggtttcttgaagagattatttttttttgcaattaattacgtttagtgtagagtgcatatacagcaaattaaaggacccagaaagctggatccaatagtgacctgggtacaccaatcggaatattgaatttggggaagtcaagggctgggatcaagaggtggattggaactaatgccatgtaggatggtatgacaaggcaacactgtattgctctctgtttatatagcaggtgtcacaactaacttgtctttagccttggtgctttgatccttctatattttgaccccacaggtgtggtccggtttacttaatcaggacatgggcctaagaacaaaccttttcccttcatgataacatccatagacaacttattagaagggactagagtttttgcaaatttccctgctggatggggcctatagctatacttagtatatgcctaaacatggtaattggatagtaaatggttttctagttccattgctgtatatttgcctaaatggacttgtgttcaaattatttcttcaattgtcatagataatcctgtaccaaatggggaagaattaggaaataatcatgttgtctaatggtactctggattcagggcagcaactgccatttaaatgttgtcttgttcatttctaaatctgttcatgaagtttaggttttccctgaaactaagttgaattatttccaaaatgaaacaggcttctcagggacatatccacttcttcccagtctgcctttggattaaagcaccaagcagagaccacattaattccctttgctatactgtgatccttagtatgttaattcttaagaaaccaacatatcactgaaagaaggctggcagaacgcaagtgcattttttcactgtgggaagaaagatcaagtgacgtattattttttcctggttgtcacttaatgggctgagtaaaaagcttgaaaactcagactttcggtcttggttctgccactcattggttatgaggaggcccagagcaggtaagttcaccttcctggccttactttcctgatgtgtaatacggaattacttcacagtagcatgacagtataagacaccagcagtagatacaactatgatgacattccatgagttggtatttttagttctaactgctaaatttgttctctttacgggacagatttctaataaagtgcttggtcttaaaatacatggttggacagaggtgccctatcccttaactatgagcaggtgctaccttttgggatatttattttaaattttaatactttggtactcaattgtcagtgttccatggtgtgtatttttatttttgggattagtgggggtctaaagggagaagaatagtctctaattactacctcttaacctaaagcaattattttgttcctggagcaagttaaatctttgttggaaggagctttggccatatattttttagcatgcattgtttctgtgccctgaaagtacctgaaaggttttaagcacagactcaggaaaatgtgccagtagaacaggccatctccaggaaattggctctatttgggtcctgaccttcccttcctcccaagttagcaggcttgttctttcgcaaggaatacacatcttgcctttttttttttttttttgccatgttttccttttcttggtcatgtataagcaataaagctgttttttgttcttcatctttcttaaccccaaattttcttctatgccttaggcttcgatggttcttccaacccccttaatatggcttagggtggtttttcaaaacctacaatcccccatttgcactactggccatggaacatttatttctagtgttcctgccaatcagagatctctatattaaattctaaaatgggattaaaagaagagttggagaattcacacttattgagtaactgatgtcatacaacctggaatttctgaattccaaataaataaatttcactctttgaa

SEQ ID NO: 118061 - DNA, 943 bp, Homo sapiens
  Payload ID: 3101
  Gene Symbol: C11orf57
  Gene Name: chromosome 11 open reading frame 57
  ENST ID: ENST00000524989
  CDS Start-End: 82-273
cttcttcccccctaccccccgccacgcgaggctgcggcgcacgcaagatgcctgatttcctcaggatcaagggattgaagaatgtcccggattccactggggaaggtcctcctgaggaatgtcatccggcacacagatgctcacaataaggtgggagattcaggaggaatcagatatgtggaaaataagagaactggaaaaacagatggaagatgcttaccgggggaccaaaaggaaaatgctacccagcagttcaagccggatgcgcagtgatggttttgatgaagaaagtcaaagatactattggaggccaaagaatgaaatttctgggacactggaagatgattttcttaaggctaaatcctggaataaaaagttctatgattatgaagcaaacatgccagacagatggggtcacagtggttataaagagttataccctgaagaatttgaaacagacagtagtgatcagcaagatattaccaacgggaagaaaacatctccccaggtaaagtcatctacccatgaatcccgcaaacacaagaagtcaaagaaatcccacaaaaaaaagcagaaaaaaaggtcacacaaaaaacagaagaaaagcaaaaaggaagccacagatataacagcagattcctcgagtgagttctcagaagaaactggggcttctggtacaaggaaagggaaacaaccacataaacgcaagaaaaaatccaggaaaaagtctctcaaaaaacctgctttattcttagaggcagaaagtaacacttcacattcagatgattcagcatccagcagttctgaggaaagtgaggaaagagacactaagaaaaccaaaaggaaaaagagagagaaaaaagcccatacctctgtagccaacaatgaaatacaggagaggacaaacaaacgcacaaattggaaagtagctacagatgaaagg

SEQ ID NO: 118062 - DNA, 517 bp, Homo sapiens
  Payload ID: 3101
  Gene Symbol: C11orf57
  Gene Name: chromosome 11 open reading frame 57
  ENST ID: ENST00000531378
  CDS Start-End: 178-517
cgaaggactcgggtgaagctgcagagctgcctttgagccctgactccttggcttcctgggtcggaggagatcttgtaatggagtggttcttcgtctcactagcaagatgcctgatttcctcaggatcaagggattgaagaatgtcccggattccactggggaaggtcctcctgaggaatgtcatccggcacacagatgctcacaataagccggatgcgcagtgatggttttgatgaagaaagtcaaagatactattggaggccaaagaatgaaatttctgggacactggaagatgattttcttaaggctaaatcctggaataaaaagttctatgattatgaagcaaacatgccagacagatggggtcacagtggttataaagagttataccctgaagaatttgaaacagacagtagtgatcagcaagatattaccaacgggaagaaaacatctccccaggtaaagtcatctacccatgaatcccgcaaacacaagaagtcaaagaaatcccacaaaa

SEQ ID NO: 118063 - DNA, 809 bp, Homo sapiens
  Payload ID: 3101
  Gene Symbol: C11orf57
  Gene Name: chromosome 11 open reading frame 57
  ENST ID: ENST00000525785
  CDS Start-End: 165-809
cccccgccacgcgaggctgcggcgcacgattgaagaatgtcccggattccactggggaaggtcctcctgaggaatgtcatccggcacacagatgctcacaataaggtgggaggtacaacctagttactcctcaacgcttactgaagattcaggaggaatcagatatgtggaaaataagagaactggaaaaacagatggaagatgcttaccgggggaccaaaaggaaaatgctacccagcagttcaagccggatgcgcagtgatggttttgatgaagaaagtcaaagatactattggaggccaaagaatgaaatttctgggacactggaagatgattttcttaaggctaaatcctggaataaaaagttctatgattatgaagcaaacatgccagacagatggggtcacagtggttataaagagttataccctgaagaatttgaaacagacagtagtgatcagcaagatattaccaacgggaagaaaacatctccccaggtaaagtcatctacccatgaatcccgcaaacacaagaagtcaaagaaatcccacaaaaaaaagcagaaaaaaaggtcacacaaaaaacagaagaaaagcaaaaaggaagccacagatataacagcagattcctcgagtgagttctcagaagaaactggggcttctggtacaaggaaagggaaacaaccacataaacgcaagaaaaaatccaggaaaaagtctctcaaaaaacctgctttattcttagaggcagaaagtaacacttcacattcagatgattcagcatccagcagttctgaggaaagtgaggaa

SEQ ID NO: 118064 - DNA, 355 bp, Homo sapiens
  Payload ID: 3101
  Gene Symbol: C11orf57
  Gene Name: chromosome 11 open reading frame 57
  ENST ID: ENST00000526879
  CDS Start-End: 82-355
cttcttcccccctaccccccgccacgcgaggctgcggcgcacgcaagatgcctgatttcctcaggatcaagggattgaagaatgtcccggattccactggggaaggtcctcctgaggaatgtcatccggcacacagatgctcacaataagattcaggaggaatcagatatgtggaaaataagagaactggaaaaacagatggaagatgcttaccgggggaccaaaaggaaaatgctacccagcagttcaagccggatgcgcagtgatggttttgatgaagaaagtcaaagatactattggaggccaaagaatgaaatttctgggacactggaagatgattttcttaaggctaaat

SEQ ID NO: 118065 - DNA, 2049 bp, Homo sapiens
  Payload ID: 3102
  Gene Symbol: C11orf58
  Gene Name: chromosome 11 open reading frame 58
  Uniprot ID: O00193
  ENST ID: ENST00000228136
  CDS Start-End: 379-930
acaaagctctcggccaacgctcaccgccatacacatccgcgggaacgcttcctccaccagccgaaggcggggcctctgagggcactcccgccacacagcgcgaattgagcctcggggcttcctgggaattgtagttttagtcacggacacatcttttttattcgggccagtatgcaatgaatcagaaaactacaactcccaaagtgccccggggcggcgaggggccgcaacggtgacgactgtggcagagaaggcccggaggggctctgcgttctgtagtggcgctgcttgggcccttggcggattgtaagctgctggttttgcggctgggaagagcggcgagagggttcggcatttttcgtcgggatccccgcaaggatgagtgctgccagagagtctcacccgcatggggtgaagcgttcagcctccccagacgacgatctgggatctagcaattgggaggcagcagacttgggtaatgaagagagaaaacaaaagttcttgagacttatgggtgcaggaaagaaagaacatactggtcgtcttgttataggagatcacaaatcaacatctcacttccgaaccggggaagaagacaagaaaattaatgaagaactggagtctcaatatcagcaaagtatggacagtaaattatcaggaagatatcggcgacattgtggacttggcttcagtgaggtagaagaccatgatggagaaggtgatgtggctggagatgatgatgatgacgatgatgattcacctgatcctgaaagtccagatgattctgaaagcgattcagagtcagagaaagaagaatctgctgaagaactccaagctgctgagcaccctgatgaagtggaggatcccaaaaacaaaaaagatgcaaaaagcaattataaaatgatgtttgttaaatccagtggttcataactcccaaacgcttagtctttgtattaaaagtaagccttattgttacaatgcacagtggaggactgcttatagagcacagacctttgtattataatttttaaaaaggcccttttaaataattacaaagagtgtttgctttcaaatgccatgggttacacttttatgggcatgactataaccatttttgtaaagagtaagagttgtataaaataagaaataaatacagtactcaacttcctttcatattagcatcatcaaccctctaattcaccttatgggggaaatgcttctttttgtttgtgatagctattttatcatttccttcatatttttctcttataaaaatgtatttgatactgtgatatgttcacgaaaagtattctttaattattctttgttatagtagagctgttcattatggatatttctgctgccagtcacaatctaaattaattttggcaaaagattgggtacttagtttcctgttactgagttagctctactcttttggaccaaagcaacatgagagcaagtacttttcacacttgttaagatggagttataactgtcatacatttggaatattatgatcccaagtagtctttttataatttggattgtatcgtatgttagatttttgataaaatttggccaatttttacagaagaaattctctgatcatttagttctgtctatttagaaatatgtaaaactggatttttttttaagtaatatgtgaccaaagttaattttgtcccaaaggtctaaataaagagcagtttcccatatttggctgtgatacctttatcctcattatctacaaatgaggaacaggcttactgataagaagctgaaacaagaaattctcttcattttatcccagtgctattttattgattaattactaaaaagtattactttctaattttattgctgtttctgttggtgtgagattagaatcatctgactgctattaggtggttgatttgtatagctgattaacacaaattgcattatgagctagtaaatggatctttggataatggggtccaaattcttaatgtttataagtaacaagttcaaaggctttagtcacacctgtttgtgagctgagctatt

SEQ ID NO: 118066 - DNA, 776 bp, Homo sapiens
  Payload ID: 3102
  Gene Symbol: C11orf58
  Gene Name: chromosome 11 open reading frame 58
  ENST ID: ENST00000528634
  CDS Start-End: 122-595
ggaggggctctgcgttctgtagtggcgctgcttgggcccttggcggattgtaagctgctggttttgcggctgggaagagcggcgagagggttcggcatttttcgtcgggatccccgcaaggatgagtgctgccagagagtctcacccgcatggggtgaagcgttcagcctccccagacgacgatctgggatctagcaattgggaggcagcagacttgggtaatgaagagagaaaacaaaagttcttgagacttatgggtgcaggaaagaaagaacatactggtcgtcttgttataggagatcacaaatcaacatctcacttccgaaccggggaagaagacaagaaaattaatgaagaactggagtctcaatatcagcaaagtatggacagtaaattatcaggaagatatcggcgacattgtggacttggcttcagtgagagacggagttttgctatgttgcccaggctggtctcaaaactcctgggttcaagcgatctttccgccttccaaagtgctggaactacaggtgtgagccaccatgtccggccagggcacatttttaataggcgtgaacaacaacatgctcacaagtagaagaccatgatggagaaggtgatgtggctggagatgatgatgatgacgatgatgattcacctgatcctgaaagtccagatgattctgaaagcgattcagagtcagagaaagaagaatctgctgaagaactccaagctgctgagcaccctgatgaagtggaggatcccaaaaacaaaaaaga

SEQ ID NO: 118067 - DNA, 405 bp, Homo sapiens
  Payload ID: 3102
  Gene Symbol: C11orf58
  Gene Name: chromosome 11 open reading frame 58
  ENST ID: ENST00000524439
  CDS Start-End: 136-405
ggcagagaaggcccggaggggctctgcgttctgtagtggcgctgcttgggcccttggcggattgtaagctgctggttttgcggctgggaagagcggcgagagggttcggcatttttcgtcgggatccccgcaaggatgagtgctgccagagagtctcacccgcatggggtgaagcgttcagcctccccagacgacgataaagaacatactggtcgtcttgttataggagatcacaaatcaacatctcacttccgaaccggggaagaagacaagaaaattaatgaagaactggagtctcaatatcagcaaagtatggacagtaaattatcaggaagatatcggcgacattgtggacttggcttcagtgaggtagaagaccatgatggagaaggtgatgtggctgga

SEQ ID NO: 118068 - DNA, 575 bp, Homo sapiens
  Payload ID: 3102
  Gene Symbol: C11orf58
  Gene Name: chromosome 11 open reading frame 58
  ENST ID: ENST00000525684
  CDS Start-End: 122-382
ggaggggctctgcgttctgtagtggcgctgcttgggcccttggcggattgtaagctgctggttttgcggctgggaagagcggcgagagggttcggcatttttcgtcgggatccccgcaaggatgagtgctgccagagagtctcacccgcatggggtgaagcgttcagcctccccagacgacgatctgggatctagcaattgggaggcagcagacttgggtaatgaagagagaaaacaaaagttcttgagacttatgggtgcaggaaaggggaagaagacaagaaaattaatgaagaactggagtctcaatatcagcaaagtatggacagtaaattatcaggaagatatcggcgacattgtggacttggcttcagtgaggtagaagaccatgatggagaaggtgatgtggctggagatgatgatgatgacgatgatgattcacctgatcctgaaagtccagatgattctgaaagcgattcagagtcagagaaagaagaatctgctgaagaactccaagctgctgagcaccctgatgaagtggaggatcccaaaaacaaaaaagatgcaaaaagcaa

SEQ ID NO: 118069 - DNA, 3147 bp, Homo sapiens
  Payload ID: 3103
  Gene Symbol: C11orf63
  Gene Name: chromosome 11 open reading frame 63
  Uniprot ID: Q6NUN7
  ENST ID: ENST00000227349
  CDS Start-End: 535-2871
catttagatttctcgtgtgtttgtgaaatacctttccatttacccattatttaattgggttccttttcttcttgatttgtagcagttcctcgcgtattttagtagttttatttgtggcaaagatctcctcccccgggtggcctctgccctccggcgctgggaagtccgggcggcgaggcagcctctcccggggcgttcgggctcctccggctctgccccgatgtcgttattacggccgtttgcagcctccgtgccagggccgggggtgcggttcgggacgcgggatcctaggtcgggtcctgccccgcccatgtggcgccggcgtctgtgttgtctgcggtctccagggcagcgccggggcgggcgggggcccgggcggcggcggcggcggcgcgggaggatgcggggcccgtccgggtcgcggccgcggaggagcgccgggcaggtaacgcttttgtgaaccacaactttaaatatcagccagctgctcctatcaacacgagtatcccctgttaattttttgcatttttcaagatgagtaaacgtaaactaattcccaagctctctattcaatctcctgtccttcataccaacttaaatgtccagtccacacacccacctttgaagaaagaagacttacatcggatttcaaaagactccttggaatctgattcagaaagcctcacgcaagagattatgtgccattctgagtttgatgatcgaatccggggcaacggtatggagcccgacagcttagacgaggaggaaagccctcgatggggaagcctgcacgagatggaagaggaagcaagtggaaaagcagctcagatggctcgcgagcaaaaccaccatacctgggaccagggcgccaataacaggcaacaaccaatagaagacaaatattcagacctccgctatgacccgaactggaagagtaagaaggaggaagggcagctgctgtctgtggaagcgttgccggagtccacggacagctctttagaaaatctgcctttggctcccctctacccttcccaggagacgtcaatggaactctccgggggaaaaggcgagcagaaagagagtccacagagtgcagcttctttacttggtagtgaatttttaagcccaaactatgagcatggtgcccgtcgcagcaagccgttttcagagctgagcgacagtgacctggaggagaagtcgagcagcctttctccgtacgtgaagagctcaagttcacataacgaggttttcctgccgggatcacgtggccctcggcgaaggaaatccaaacaacattttgtggaaaaaaacaagctcactttgggattacccaccccgaaaacggactcttatcttcaacttcacaataaaaaaagaggggaatctcatccagaacagatctcctaccccgtcagagtaacagacaagacgtctattcagaatgccaaggaaatggaaaatgctgccatcgatcctgaagataaatggcatcaaagagcacaacagctaaagaattaccaggaacactggtctcaatatgaaagtacaaaatcaagcaatgtaccaagagggcaaccttctgacatggtgaatgaccatcaaccttccagaagaccagccaagctcaagattcgaaagcagtgtaaacaccagaatggcctgaagtcttccacaacggaagaggtgactgccagtcaggggaaccagaataaccctcccaggcagcaacaaaaccaaaataagcctcttgatacttcaacaaagcctgaatcgattgtgattatgcatgcctctaacaatgatgtacaagcctcaagggcacttagaagccacaatctcaaagaaacctccaatacatttgctccaccaaaacaggcttttgacaaggtcttatctaaaaactctactggatgtgactctgggctgaatgttaataaagaaagaggacacaaagaccaagaagagaaaagattttcatatcagcagctacacaccctttctgacatggatttgaacaaccttaatgaactttctaagagacacgtgctcctgagccagaaaggctctcagtttgtttatcacataaatactcatggatcaaccaaaaataagaaacaactcaaacagccttatacagagacaaaatacaggaacttagaaatgttatggaaattccattcttcttctgacagccagacggttagagcttctccagattcatggctcacccagataatggagcagcatcagcaagccttggtgcagctgaccgacgtgcagcccagtgaaggggccttatccagcgtcacgcttccacctatactgtcaagggtagaaagtgaatcccaactcagttcagagagaagccaaagaaaccaagtgaaaattagccgtagcaattctgaaggctatctgtttcaactggaaaagggaaaaaagcataagaaaagaagcagcagtaagaacaccaagctgaaaggttatcagaaaagagacgtgaagcttggaggcctcggacctgactttgagtccatcagagacaaaacgcaaaaattaatacagcaaaaggaatatgcaaaacaagtcaaggagtacaacatgaagacactatccattctatcaaaaccacaaacagaaaaaactcaaaagaaatctgctatccctcggcagaaggctttggaatacgctaagaccatccccaaacccaaaccatcaaatctgactcatcaagcatcaaaggaacaaaaaaatccaacctatgctgggaaagaagaaagtttacctgaaatctcactgctggaaatactgcagaacagacacgaaagggaaaaacaggctgtggctgctttcaaagtccttcacatcgtatagacaacatttgataggaaggagaccaaaaatggtccaggaatgaacgtggagaaaagaaacgccaaccaccttctctgcgttgagagtaatggcctattattatcatctatctgccgtccatgtttgctttctgcaggatttaaaatatgaggcccaattggattatggtgccatattttactttctaggaagaaaattttttaaattatttattttcaaatcagttagaattggagctgaataataactagagaataaagcttttgttttatattg

SEQ ID NO: 118070 - DNA, 1964 bp, Homo sapiens
  Payload ID: 3103
  Gene Symbol: C11orf63
  Gene Name: chromosome 11 open reading frame 63
  Uniprot ID: Q6NUN7
  ENST ID: ENST00000307257
  CDS Start-End: 380-1303
gctgggaagtccgggcggcgaggcagcctctcccggggcgttcgggctcctccggctctgccccgatgtcgttattacggccgtttgcagcctccgtgccagggccgggggtgcggttcgggacgcgggatcctaggtcgggtcctgccccgcccatgtggcgccggcgtctgtgttgtctgcggtctccagggcagcgccggggcgggcgggggcccgggcggcggcggcggcggcgcgggaggatgcggggcccgtccgggtcgcggccgcggaggagcgccgggcaggtaacgcttttgtgaaccacaactttaaatatcagccagctgctcctatcaacacgagtatcccctgttaattttttgcatttttcaagatgagtaaacgtaaactaattcccaagctctctattcaatctcctgtccttcataccaacttaaatgtccagtccacacacccacctttgaagaaagaagacttacatcggatttcaaaagactccttggaatctgattcagaaagcctcacgcaagagattatgtgccattctgagtttgatgatcgaatccggggcaacggtatggagcccgacagcttagacgaggaggaaagccctcgatggggaagcctgcacgagatggaagaggaagcaagtggaaaagcagctcagatggctcgcgagcaaaaccaccatacctgggaccagggcgccaataacaggcaacaaccaatagaagacaaatattcagacctccgctatgacccgaactggaagagtaagaaggaggaagggcagctgctgtctgtggaagcgttgccggagtccacggacagctctttagaaaatctgcctttggctcccctctacccttcccaggagacgtcaatggaactctccgggggaaaaggcgagcagaaagagagtccacagagtgcagcttctttacttggtagtgaatttttaagcccaaactatgagcatggtgcccgtcgcagcaagccgttttcagagctgagcgacagtgacctggaggagaagtcgagcagcctttctccgtacgtgaagagctcaagttcacataacgaggttttcctgccgggatcacgtggccctcggcgaaggaaatccaaacaacattttgtggaaaaaaacaagctcactttgggattacccaccccgaaaacggactcttatcttcaacttcacaataaaaaaagaggggaatctcatccagaacaggtcattttgagagtaaattctctcccacgtgatggattcaaaaccttttggagccagtaaacttagttccatttcacaggtgcacataaagaccttcctgcccacctcctatggacatgtccagggatacaggacaagagtggggttagaatggtagagtccaccactcttactggaaagagcttgagatttatcacctgctaatgtgaggtcattttcaaatacaaaggagaggttattatgttaaatgtggttgcccttagacctattccaaatcccaactggtatttttttttaacatattctaacctgttctaacctctaagcattttctaatggaacaaaatagatgaggtggatgaacatttgtggcttttcttcagagactcccttttttgtcttaaagaattacgtctggtggcacgttggctcatgcctgtaatcccagcactttgggaggtcgaggtgggaggatcacttgaggccacgagttcaagaccagcctggccaacatggtgaaacccatctataccaaaaatacaaaaattagccgggtgtggtgatgcacacctgtaatcccagctactcgggaggctgaggcacaagaatcgcttgaacacgggaggcagaggttgcagtgagccgagatggcgccactacactccagcctgggttatagagtgagactctgtctcaaaataaataaataaaaataaaaaaa

SEQ ID NO: 118071 - DNA, 2782 bp, Homo sapiens
  Payload ID: 3103
  Gene Symbol: C11orf63
  Gene Name: chromosome 11 open reading frame 63
  Uniprot ID: Q6NUN7
  ENST ID: ENST00000531316
  CDS Start-End: 93-2429
caggtaacgcttttgtgaaccacaactttaaatatcagccagctgctcctatcaacacgagtatcccctgttaattttttgcatttttcaagatgagtaaacgtaaactaattcccaagctctctattcaatctcctgtccttcataccaacttaaatgtccagtccacacacccacctttgaagaaagaagacttacatcggatttcaaaagactccttggaatctgattcagaaagcctcacgcaagagattatgtgccattctgagtttgatgatcgaatccggggcaacggtatggagcccgacagcttagacgaggaggaaagccctcgatggggaagcctgcacgagatggaagaggaagcaagtggaaaagcagctcagatggctcgcgagcaaaaccaccatacctgggaccagggcgccaataacaggcaacaaccaatagaagacaaatattcagacctccgctatgacccgaactggaagagtaagaaggaggaagggcagctgctgtctgtggaagcgttgccggagtccacggacagctctttagaaaatctgcctttggctcccctctacccttcccaggagacgtcaatggaactctccgggggaaaaggcgagcagaaagagagtccacagagtgcagcttctttacttggtagtgaatttttaagcccaaactatgagcatggtgcccgtcgcagcaagccgttttcagagctgagcgacagtgacctggaggagaagtcgagcagcctttctccgtacgtgaagagctcaagttcacataacgaggttttcctgccgggatcacgtggccctcggcgaaggaaatccaaacaacattttgtggaaaaaaacaagctcactttgggattacccaccccgaaaacggactcttatcttcaacttcacaataaaaaaagaggggaatctcatccagaacagatctcctaccccgtcagagtaacagacaagacgtctattcagaatgccaaggaaatggaaaatgctgccatcgatcctgaagataaatggcatcaaagagcacaacagctaaagaattaccaggaacactggtctcaatatgaaagtacaaaatcaagcaatgtaccaagagggcaaccttctgacatggtgaatgaccatcaaccttccagaagaccagccaagctcaagattcgaaagcagtgtaaacaccagaatggcctgaagtcttccacaacggaagaggtgactgccagtcaggggaaccagaataaccctcccaggcagcaacaaaaccaaaataagcctcttgatacttcaacaaagcctgaatcgattgtgattatgcatgcctctaacaatgatgtacaagcctcaagggcacttagaagccacaatctcaaagaaacctccaatacatttgctccaccaaaacaggcttttgacaaggtcttatctaaaaactctactggatgtgactctgggctgaatgttaataaagaaagaggacacaaagaccaagaagagaaaagattttcatatcagcagctacacaccctttctgacatggatttgaacaaccttaatgaactttctaagagacacgtgctcctgagccagaaaggctctcagtttgtttatcacataaatactcatggatcaaccaaaaataagaaacaactcaaacagccttatacagagacaaaatacaggaacttagaaatgttatggaaattccattcttcttctgacagccagacggttagagcttctccagattcatggctcacccagataatggagcagcatcagcaagccttggtgcagctgaccgacgtgcagcccagtgaaggggccttatccagcgtcacgcttccacctatactgtcaagggtagaaagtgaatcccaactcagttcagagagaagccaaagaaaccaagtgaaaattagccgtagcaattctgaaggctatctgtttcaactggaaaagggaaaaaagcataagaaaagaagcagcagtaagaacaccaagctgaaaggttatcagaaaagagacgtgaagcttggaggcctcggacctgactttgagtccatcagagacaaaacgcaaaaattaatacagcaaaaggaatatgcaaaacaagtcaaggagtacaacatgaagacactatccattctatcaaaaccacaaacagaaaaaactcaaaagaaatctgctatccctcggcagaaggctttggaatacgctaagaccatccccaaacccaaaccatcaaatctgactcatcaagcatcaaaggaacaaaaaaatccaacctatgctgggaaagaagaaagtttacctgaaatctcactgctggaaatactgcagaacagacacgaaagggaaaaacaggctgtggctgctttcaaagtccttcacatcgtatagacaacatttgataggaaggagaccaaaaatggtccaggaatgaacgtggagaaaagaaacgccaaccaccttctctgcgttgagagtaatggcctattattatcatctatctgccgtccatgtttgctttctgcaggatttaaaatatgaggcccaattggattatggtgccatattttactttctaggaagaaaattttttaaattatttattttcaaatcagttagaattggagctgaataataactagagaataaagcttttgttttatattgatcttttgatttcttcatctctaccccattccttagcataatggaaaccttaaagttacccagaaataaatgtagct

SEQ ID NO: 118072 - DNA, 1033 bp, Homo sapiens
  Payload ID: 3104
  Gene Symbol: C11orf65
  Gene Name: chromosome 11 open reading frame 65
  Uniprot ID: Q8NCR3
  ENST ID: ENST00000393084
  CDS Start-End: 71-1012
acgtcatttccgcctgcgacgttacctaggagtccagcggcgcccgggccagcagcgattggaatttcaaatgccttggaaagaggaatcagaatttacaaagcaggataaggctgccagagtcattcagcaggcctggaaaagtttccttaatgtcgctatatttcaacactttaaaagtctgattgatttaagaagacaaggagaaccacgtcagatagtgaaatatattaatcccaaagaggcagagcttctagatgctgctgctggcattcatgtgcgattcagattaggtggagttaaatttccacctgatatatactataagatttttactcacagacctattgaagatctctgtgctaacagccctagaaattatgcaaaacttccagcaaagcatacatctcataataaaaatgatcatcttcaggaagaggatcatagtggctggtatcatcgtatagaaaacaatggctggaggccagtttctgatacattttggctatctactgatggtatggtggtggaagacaaaaaggaaagtgaattccatttctctaaactgaagagaaggcaagatttggaaaagaaaagaaaacttagaaaaatagagtggatgaggcaaatgtactactcaggaagtctggaggctaagtcaacacatcatgaaactctaggactaattcacactgcaacaaaggggctgattagagcttttgaagatggggggatagattctgtgatggaatgggaagtggatgaagtgctgaactggacaaatacactgaactttgatgagtacattgccagctggaaggaaattgctacaagcaactcttcggctaacttcaaaggattcaggtttaatcaagcacagaaaaacatatataactatggaggagacatatcaaagatgcaaatgggaataccagatgatacttactatgaaaatgtttatcaagaaccaaatgtaactagattaacgcctgattctacttatggactataaagtactttatttctattctga

SEQ ID NO: 118073 - DNA, 2683 bp, Homo sapiens
  Payload ID: 3104
  Gene Symbol: C11orf65
  Gene Name: chromosome 11 open reading frame 65
  Uniprot ID: Q8NCR3
  ENST ID: ENST00000527531
  CDS Start-End: 104-1045
ggtctaattttaggttagggacctgcgcaattttgtggatgcaactctgtctctatgcacgttaagaaaggtttatttgaagtcatacaacagggaatttcaaatgccttggaaagaggaatcagaatttacaaagcaggataaggctgccagagtcattcagcaggcctggaaaagtttccttaatgtcgctatatttcaacactttaaaagtctgattgatttaagaagacaaggagaaccacgtcagatagtgaaatatattaatcccaaagaggcagagcttctagatgctgctgctggcattcatgtgcgattcagattaggtggagttaaatttccacctgatatatactataagatttttactcacagacctattgaagatctctgtgctaacagccctagaaattatgcaaaacttccagcaaagcatacatctcataataaaaatgatcatcttcaggaagaggatcatagtggctggtatcatcgtatagaaaacaatggctggaggccagtttctgatacattttggctatctactgatggtatggtggtggaagacaaaaaggaaagtgaattccatttctctaaactgaagagaaggcaagatttggaaaagaaaagaaaacttagaaaaatagagtggatgaggcaaatgtactactcaggaagtctggaggctaagtcaacacatcatgaaactctaggactaattcacactgcaacaaaggggctgattagagcttttgaagatggggggatagattctgtgatggaatgggaagtggatgaagtgctgaactggacaaatacactgaactttgatgagtacattgccagctggaaggaaattgctacaagcaactcttcggctaacttcaaaggattcaggtttaatcaagcacagaaaaacatatataactatggaggagacatatcaaagatgcaaatgggaataccagatgatacttactatgaaaatgtttatcaagaaccaaatgtaactagattaacgcctgattctacttatggactataaaaaccaatggcaaactgtaacaaatgacaacatgtatgaacagaatttgaaatcggtaaaagaaaaaagaatgtatttttaaccttgggaatagcacagccttggatttaattttaccaacgtattattgggacctatttcagcaaactccttgtagcaaaatctgtattaccatctgcagtccaaaggagatctataaagatgcctcggttcataaaggtgcacacaggaccaccctgatggactgttactcatcttccaagggataaagccccacccttattgaccacaggcttaatggttaatgccaatgaattaagacagttctcatatcctagttgaacagtaggagagatttttaaaaatgcacatattcctgccccatctctagaaacctggtttgaatttgatcagcatcaatgttttttaaatgcagtaaaagtaatactaacatgcagccagtccaacataaatcaggttaaaggaagaaaagctgagtagtggaaaagtggcaagcccatactgcactctacctgccatgcttccctggggaggccacactcctgatttcttgtctcacatacccttaccagattggtgaatgactggcataggtactaacagcacagacactgaaatttgtttgacttccttttttctgccctggatcaagacaaggcagtgatcctgattacatgtgtttgctctgcaggcccaaaccctattcaggtgagctgtcccaaagttaagacagcagagaggtactgaggtagcaccagcagtaaactagtctggccctcattcctaagccatgttcctctagtaatgatgctgacaatttgatctccatttgtctgactaattagttctgaacctgagcagggaaaaaggagatataaatttctgatttttcttaaaccctaatggaaaccattctgaaaataataataccatatggaatatctaaatgtcaaagaattgatttatgaattgaaaactagagactacttacaatgctctaacattccaagaaactcaagggggctgaaggcatttctaaaccagtatttttggatgtgtgaaaaggctaagtgcacaatctcctcctttctgctgcccagccacatccccctatgttaaaatgaagcagtgctcttcacatcagtgacttcctgatgagatacacagtctacctgagacacaaaaaaaatggagaaaagcctggttctagaaaataatgcatttctactctacaaatcttcctcatttgtttacttacattattgaggacttcatgaaatcctaggcctcccatcatcttggtccccattctagcagccaattggtacataagaggcaaaaatttatatgttggaatcttcattccgtctctctaccattaaaaaaaagacacaaaattaagaaacaaggtatttcaaatattctcacatctaagcaagtaagttattttaagacagtgctcctctattagcacaagtggttaacaaaacttcactaactatattgttttccttcatttcttttcttatctgaaggtctttctaatgggtactctagattaatgcattggtaaatcaaaatatttggtcctaaattaaactggattcagaactagaa

SEQ ID NO: 118074 - DNA, 456 bp, Homo sapiens
  Payload ID: 3104
  Gene Symbol: C11orf65
  Gene Name: chromosome 11 open reading frame 65
  ENST ID: ENST00000524755
  CDS Start-End: 1-317
ggcaagatttggaaaagaaaagaaaacttagaaaaatagagtggatgaggcaaatgtactactcaggaagtctggaggctaagtcaacacatcatgaaactctaggactaattcacactgcaacaaaggggctgattagagcttttgaagatggggggatagattctgtgatggaatgggaagtggatgaagtgctgaactggacaaatacactgaactttgatgaagacacaaaaaaaatggagaaaagcctggttctagaaaataatgcatttctactctacaaatcttcctcatttgtttacttacattattgaggacttcatgaaatcctaggcctcccatcatcttggtccccattctagcagccaattggtacataagaggcaaaaatttatatgttggaatcttcattccgtctctctaccattaaaaaaaagacacaaaattaagaaa

SEQ ID NO: 118075 - DNA, 1263 bp, Homo sapiens
  Payload ID: 3104
  Gene Symbol: C11orf65
  Gene Name: chromosome 11 open reading frame 65
  Uniprot ID: Q8NCR3
  ENST ID: ENST00000525729
  CDS Start-End: 71-811
acgtcatttccgcctgcgacgttacctaggagtccagcggcgcccgggccagcagcgattggaatttcaaatgccttggaaagaggaatcagaatttacaaagcaggataaggctgccagagtcattcagcaggcctggaaaagtttccttgttaaatttccacctgatatatactataagatttttactcacagacctattgaagatctctgtgctaacagccctagaaattatgcaaaacttccagcaaagcatacatctcataataaaaatgatcatcttcaggaagaggatcatagtggctggtatcatcgtatagaaaacaatggctggaggccagtttctgatacattttggctatctactgatggtatggtggtggaagacaaaaaggaaagtgaattccatttctctaaactgaagagaaggcaagatttggaaaagaaaagaaaacttagaaaaatagagtggatgaggcaaatgtactactcaggaagtctggaggctaagtcaacacatcatgaaactctaggactaattcacactgcaacaaaggggctgattagagcttttgaagatggggggatagattctgtgatggaatgggaagtggatgaagtgctgaactggacaaatacactgaactttgatgagtacattgccagctggaaggaaattgctacaagcaactcttcggctaacttcaaaggaatattcttcaggatcttattcagcattaaaatggaatatgaagaatttttatcttctccaactcctgctaatgtcaacaccattctaccccaatggtaagtctgaaatgaatgactcaaaggtaaaactgcctcccaacaccaagaaaacaaatgctctccactacattaaagcttctgataggcctcctcagaagataatctggtataaaactctaaggtaaaataaccagaagcaaagacactgaaaagcataaaacttctttttctactagagaagaagaatggtttaagactacataggaattaattttttaagatattaatgcatttaggcttaaaaacatttcatttttcactcacctctccctctcattctttaccaaccacccctaccaccaccatacacacttatgagacatcgattcctacctattcaaattataggcctactacactatttcttcagagttctggtcaactctcaagcagtactcatcagtcagaccatccattctagcaatttctgtatgcactgttaaaaatctcatg

SEQ ID NO: 118076 - DNA, 582 bp, Homo sapiens
  Payload ID: 3104
  Gene Symbol: C11orf65
  Gene Name: chromosome 11 open reading frame 65
  ENST ID: ENST00000533583
  CDS Start-End: 11-582
ggaatttcaaatgccttggaaagaggaatcagaatttacaaagcaggataaggctgccagagtcattcagcaggcctggaaaagtttccttaatgtcgctatatttcaacactttaaaagtctgattgatttaagaagacaaggagaaccacgtcagatagtgaaatatattaatcccaaagaggttaaatttccacctgatatatactataagatttttactcacagacctattgaagatctctgtgctaacagccctagaaattatgcaaaacttccagcaaagcatacatctcataataaaaatgatcatcttcaggaagaggatcatagtggctggtatcatcgtatagaaaacaatggctggaggccagtttctgatacattttggctatctactgatggtatggtggtggaagacaaaaaggaaagtgaattccatttctctaaactgaagagaaggcaagatttggaaaagaaaagaaaacttagaaaaatagagtggatgaggcaaatgtactactcaggaagtctggaggctaagtcaacacatcatgaaactctaggactaattcacactgc

SEQ ID NO: 118077 - DNA, 973 bp, Homo sapiens
  Payload ID: 3104
  Gene Symbol: C11orf65
  Gene Name: chromosome 11 open reading frame 65
  Uniprot ID: Q8NCR3
  ENST ID: ENST00000529391
  CDS Start-End: 11-952
ggaatttcaaatgccttggaaagaggaatcagaatttacaaagcaggataaggctgccagagtcattcagcaggcctggaaaagtttccttaatgtcgctatatttcaacactttaaaagtctgattgatttaagaagacaaggagaaccacgtcagatagtgaaatatattaatcccaaagaggcagagcttctagatgctgctgctggcattcatgtgcgattcagattaggtggagttaaatttccacctgatatatactataagatttttactcacagacctattgaagatctctgtgctaacagccctagaaattatgcaaaacttccagcaaagcatacatctcataataaaaatgatcatcttcaggaagaggatcatagtggctggtatcatcgtatagaaaacaatggctggaggccagtttctgatacattttggctatctactgatggtatggtggtggaagacaaaaaggaaagtgaattccatttctctaaactgaagagaaggcaagatttggaaaagaaaagaaaacttagaaaaatagagtggatgaggcaaatgtactactcaggaagtctggaggctaagtcaacacatcatgaaactctaggactaattcacactgcaacaaaggggctgattagagcttttgaagatggggggatagattctgtgatggaatgggaagtggatgaagtgctgaactggacaaatacactgaactttgatgagtacattgccagctggaaggaaattgctacaagcaactcttcggctaacttcaaaggattcaggtttaatcaagcacagaaaaacatatataactatggaggagacatatcaaagatgcaaatgggaataccagatgatacttactatgaaaatgtttatcaagaaccaaatgtaactagattaacgcctgattctacttatggactataaagtactttatttctattctga

SEQ ID NO: 118078 - DNA, 2711 bp, Homo sapiens
  Payload ID: 3104
  Gene Symbol: C11orf65
  Gene Name: chromosome 11 open reading frame 65
  Uniprot ID: Q8NCR3
  ENST ID: ENST00000615746
  CDS Start-End: 134-1075
agtccagcggcgcccgggccagcagcgattggtctaattttaggttagggacctgcgcaattttgtggatgcaactctgtctctatgcacgttaagaaaggtttatttgaagtcatacaacagggaatttcaaatgccttggaaagaggaatcagaatttacaaagcaggataaggctgccagagtcattcagcaggcctggaaaagtttccttaatgtcgctatatttcaacactttaaaagtctgattgatttaagaagacaaggagaaccacgtcagatagtgaaatatattaatcccaaagaggcagagcttctagatgctgctgctggcattcatgtgcgattcagattaggtggagttaaatttccacctgatatatactataagatttttactcacagacctattgaagatctctgtgctaacagccctagaaattatgcaaaacttccagcaaagcatacatctcataataaaaatgatcatcttcaggaagaggatcatagtggctggtatcatcgtatagaaaacaatggctggaggccagtttctgatacattttggctatctactgatggtatggtggtggaagacaaaaaggaaagtgaattccatttctctaaactgaagagaaggcaagatttggaaaagaaaagaaaacttagaaaaatagagtggatgaggcaaatgtactactcaggaagtctggaggctaagtcaacacatcatgaaactctaggactaattcacactgcaacaaaggggctgattagagcttttgaagatggggggatagattctgtgatggaatgggaagtggatgaagtgctgaactggacaaatacactgaactttgatgagtacattgccagctggaaggaaattgctacaagcaactcttcggctaacttcaaaggattcaggtttaatcaagcacagaaaaacatatataactatggaggagacatatcaaagatgcaaatgggaataccagatgatacttactatgaaaatgtttatcaagaaccaaatgtaactagattaacgcctgattctacttatggactataaaaaccaatggcaaactgtaacaaatgacaacatgtatgaacagaatttgaaatcggtaaaagaaaaaagaatgtatttttaaccttgggaatagcacagccttggatttaattttaccaacgtattattgggacctatttcagcaaactccttgtagcaaaatctgtattaccatctgcagtccaaaggagatctataaagatgcctcggttcataaaggtgcacacaggaccaccctgatggactgttactcatcttccaagggataaagccccacccttattgaccacaggcttaatggttaatgccaatgaattaagacagttctcatatcctagttgaacagtaggagagatttttaaaaatgcacatattcctgccccatctctagaaacctggtttgaatttgatcagcatcaatgttttttaaatgcagtaaaagtaatactaacatgcagccagtccaacataaatcaggttaaaggaagaaaagctgagtagtggaaaagtggcaagcccatactgcactctacctgccatgcttccctggggaggccacactcctgatttcttgtctcacatacccttaccagattggtgaatgactggcataggtactaacagcacagacactgaaatttgtttgacttccttttttctgccctggatcaagacaaggcagtgatcctgattacatgtgtttgctctgcaggcccaaaccctattcaggtgagctgtcccaaagttaagacagcagagaggtactgaggtagcaccagcagtaaactagtctggccctcattcctaagccatgttcctctagtaatgatgctgacaatttgatctccatttgtctgactaattagttctgaacctgagcagggaaaaaggagatataaatttctgatttttcttaaaccctaatggaaaccattctgaaaataataataccatatggaatatctaaatgtcaaagaattgatttatgaattgaaaactagagactacttacaatgctctaacattccaagaaactcaagggggctgaaggcatttctaaaccagtatttttggatgtgtgaaaaggctaagtgcacaatctcctcctttctgctgcccagccacatccccctatgttaaaatgaagcagtgctcttcacatcagtgacttcctgatgagatacacagtctacctgagacacaaaaaaaatggagaaaagcctggttctagaaaataatgcatttctactctacaaatcttcctcatttgtttacttacattattgaggacttcatgaaatcctaggcctcccatcatcttggtccccattctagcagccaattggtacataagaggcaaaaatttatatgttggaatcttcattccgtctctctaccattaaaaaaaagacacaaaattaagaaacaaggtatttcaaatattctcacatctaagcaagtaagttattttaagacagtgctcctctattagcacaagtggttaacaaaacttcactaactatattgttttccttcatttcttttcttatctgaaggtctttctaatgggtactctagattaatgcattggtaaatcaaaatatttggtcctaaattaaactggattcagaactag

SEQ ID NO: 118079 - DNA, 1619 bp, Homo sapiens
  Payload ID: 3105
  Gene Symbol: C11orf68
  Gene Name: chromosome 11 open reading frame 68
  Uniprot ID: Q9H3H3
  ENST ID: ENST00000438576
  CDS Start-End: 87-968
cggccgctgcggccgctgaggcccgcggctccgccctgtggctgcgcctgtctataaagttgttgttgaggtggcgcggcgctaagatggcggcggcggcggcggcggccgtggcgggggtggggcgcggtggcggtggcgcggagccacggcaggagcggagccgggcccggggctgggccggcgtcgaacgcagcgaaggccggagcaggatggaaccaggtgaggagctggaagaggagggctctccaggtggccgtgaggatggcttcaccgccgagcacctggctgcagaggccatggcagctgacatggacccctggctagtgtttgatgcccgcacaacgcctgccactgagctggatgcctggctggccaagtacccaccatcccaagttacccgctatggggaccccggttcacccaactcagagcctgtgggctggattgcagtgtatgggcagggctacagccccaactccggggacgtgcagggcctgcaggcagcctgggaagctctgcagaccagtgggcggcccatcacaccgggtaccctgcgccagctcgccatcacccaccacgtgctctcgggcaagtggcttatgcatctggcaccgggcttcaagctggaccacgcctgggctggcattgcccgggccgtggttgaaggccagcttcaggtggccaaggtgagcccacgtgccaaggagggtgggcgccaggtcatctgtgtttacacggacgacttcacggaccgcttgggtgtactggaggcggattcagccatccgtgcagcgggcattaagtgcctgctcacctacaagcctgatgtctacacctacctgggcatctaccgggccaatcgctggcacctctgccccactctctatgagagccgtttccagcttgggggtagtgcccgtggctcccgagtgcttgaccgtgccaacaacgtggaactgacctaggggggccaaattggggagactgcccactcccccctccatgctggggttggatcctcctgtcttcctccttgtcctatgaaggccacaccccccagctctggggactcctaggtcacttgggaactacctgcatcttcagtccccttgaacttctgccctctgttcagggctgacacaagccccacaggctggggggctccggttccctgagggatgagccttcagcctccctttgtaatgctgctcctctccactgcccagcaccatgagttgggtgcagacacctagaaggagagacttcttggaacgctcatcccccgctatacctccccttcctcctgcatctccccttctttccttccccctcaggagagagaaaacttagtgcttccagcccttcttggagccttcatggtccaggggtaggggccccactggcctgagcatgccattttgaggggagggtagttgtgcctacttatcccctggcagaggggatgccaggaccatggacatgaggcttgcccatccctgccaacttacacagcctgtaccactgtccccccttccttggctactttgacatgtgcctgctcctggcatttcaataaaacccggcttgggtctgtgtcttgagtgttttttaaaata

SEQ ID NO: 118080 - DNA, 1559 bp, Homo sapiens
  Payload ID: 3105
  Gene Symbol: C11orf68
  Gene Name: chromosome 11 open reading frame 68
  Uniprot ID: Q9H3H3
  ENST ID: ENST00000449692
  CDS Start-End: 32-910
aaagttgttgttgaggtggcgcggcgctaagatggcggcggcggcggcggcggccgtggcgggggtggggcgcggtggcggtggcgcggagccacggcaggagcggagccgggcccggggctgggccggcgtcgaacgcagcgaaggccggaggatggaaccaggtgaggagctggaagaggagggctctccaggtggccgtgaggatggcttcaccgccgagcacctggctgcagaggccatggcagctgacatggacccctggctagtgtttgatgcccgcacaacgcctgccactgagctggatgcctggctggccaagtacccaccatcccaagttacccgctatggggaccccggttcacccaactcagagcctgtgggctggattgcagtgtatgggcagggctacagccccaactccggggacgtgcagggcctgcaggcagcctgggaagctctgcagaccagtgggcggcccatcacaccgggtaccctgcgccagctcgccatcacccaccacgtgctctcgggcaagtggcttatgcatctggcaccgggcttcaagctggaccacgcctgggctggcattgcccgggccgtggttgaaggccagcttcaggtggccaaggtgagcccacgtgccaaggagggtgggcgccaggtcatctgtgtttacacggacgacttcacggaccgcttgggtgtactggaggcggattcagccatccgtgcagcgggcattaagtgcctgctcacctacaagcctgatgtctacacctacctgggcatctaccgggccaatcgctggcacctctgccccactctctatgagagccgtttccagcttgggggtagtgcccgtggctcccgagtgcttgaccgtgccaacaacgtggaactgacctaggggggccaaattggggagactgcccactcccccctccatgctggggttggatcctcctgtcttcctccttgtcctatgaaggccacaccccccagctctggggactcctaggtcacttgggaactacctgcatcttcagtccccttgaacttctgccctctgttcagggctgacacaagccccacaggctggggggctccggttccctgagggatgagccttcagcctccctttgtaatgctgctcctctccactgcccagcaccatgagttgggtgcagacacctagaaggagagacttcttggaacgctcatcccccgctatacctccccttcctcctgcatctccccttctttccttccccctcaggagagagaaaacttagtgcttccagcccttcttggagccttcatggtccaggggtaggggccccactggcctgagcatgccattttgaggggagggtagttgtgcctacttatcccctggcagaggggatgccaggaccatggacatgaggcttgcccatccctgccaacttacacagcctgtaccactgtccccccttccttggctactttgacatgtgcctgctcctggcatttcaataaaacccggcttgggtctgtgtcttgagtgttttttaaaa

SEQ ID NO: 118081 - DNA, 1528 bp, Homo sapiens
  Payload ID: 3105
  Gene Symbol: C11orf68
  Gene Name: chromosome 11 open reading frame 68
  Uniprot ID: Q9H3H3
  ENST ID: ENST00000530188
  CDS Start-End: 147-902
caggaacagttgttatcccattgtaaagatgaggcaactgaggcgcatcgacagtaactcttactcaaggccacagtttaatccagtgcctggcatctgtagttattgtctcagaccctgccctgactcggttccctcacagcaggatggaaccaggtgaggagctggaagaggagggctctccaggtggccgtgaggatggcttcaccgccgagcacctggctgcagaggccatggcagctgacatggacccctggctagtgtttgatgcccgcacaacgcctgccactgagctggatgcctggctggccaagtacccaccatcccaagttacccgctatggggaccccggttcacccaactcagagcctgtgggctggattgcagtgtatgggcagggctacagccccaactccggggacgtgcagggcctgcaggcagcctgggaagctctgcagaccagtgggcggcccatcacaccgggtaccctgcgccagctcgccatcacccaccacgtgctctcgggcaagtggcttatgcatctggcaccgggcttcaagctggaccacgcctgggctggcattgcccgggccgtggttgaaggccagcttcaggtggccaaggtgagcccacgtgccaaggagggtgggcgccaggtcatctgtgtttacacggacgacttcacggaccgcttgggtgtactggaggcggattcagccatccgtgcagcgggcattaagtgcctgctcacctacaagcctgatgtctacacctacctgggcatctaccgggccaatcgctggcacctctgccccactctctatgagagccgtttccagcttgggggtagtgcccgtggctcccgagtgcttgaccgtgccaacaacgtggaactgacctaggggggccaaattggggagactgcccactcccccctccatgctggggttggatcctcctgtcttcctccttgtcctatgaaggccacaccccccagctctggggactcctaggtcacttgggaactacctgcatcttcagtccccttgaacttctgccctctgttcagggctgacacaagccccacaggctggggggctccggttccctgagggatgagccttcagcctccctttgtaatgctgctcctctccactgcccagcaccatgagttgggtgcagacacctagaaggagagacttcttggaacgctcatcccccgctatacctccccttcctcctgcatctccccttctttccttccccctcaggagagagaaaacttagtgcttccagcccttcttggagccttcatggtccaggggtaggggccccactggcctgagcatgccattttgaggggagggtagttgtgcctacttatcccctggcagaggggatgccaggaccatggacatgaggcttgcccatccctgccaacttacacagcctgtaccactgtccccccttccttggctactttgacatgtgcctgctcctggcatttcaataaaacccggcttgggtc

SEQ ID NO: 118082 - DNA, 2193 bp, Homo sapiens
  Payload ID: 3106
  Gene Symbol: C11orf70
  Gene Name: chromosome 11 open reading frame 70
  Uniprot ID: Q9BRQ4
  ENST ID: ENST00000434758
  CDS Start-End: 29-832
cccaggcatccacccagccgagagcacgatggctactggggagctcggggacttgggtggctactacttcaggttcttgcctcagaaaaccttccagtctctgagctctaaggagatcaccagccggctccgccagtggtccatgctgggcagaatcaaggcgcaggcgttcggctttgaccagacctttcagtcctatcggaaggatgatttcgttatggcttttttcaaagacccaaatgttattcccaatttgaagttactttcagattcttctggacaatggatcatattaggaactgaagtgaaaaaaattgaagctataaatgttccttgcacacagctttcaatgtcattttttcatcggttatatgatgaagatattgtacgagacagtggacatattgttaaatgtttagattctttttgtgatccatttctcatttctgatgagttacgaagagttttgctagtggaagactcagaaaaatatgaaatattcagccaaccagatagagaagagttcctgttttgtcttttcaaacatctttgccttggtggagccctttgtcaatatgaggatgtgattagcccatatctggaaacaacaaagcttatctataaggatctggtgagtgttcgaaagaatcctcaaaccaagaaaatacagattacctcttctgtctttaaagtttcagcttatgattctgctggtatgtgctatccttcagcaaagaatcatgaacagacattttcttactttattgtggatcctatcaggcgtcaccttcatgttttataccactgttatggtgtgggagacatgtcttaatgttctttcagattatgtacctctactattttgtatttatcatttttctatcttaatactaacttatagataaacatatactttgcaaattaattcaagaaaaatgtaaggagcctacttagagcagaagaaagcaaacaccaagatgcctttttaaaaatttgtgtggaatactaaccggggatcaaatttcatccataataaaatctataccaaaaaagttgtggaatttttacagaaagttacaaggaattagaaatctagttcatatttgttgcattgtgattcaagtgaatcctcaattttccatgtattttaatttataagctaattaattatggattgaaaatgtagcagaaaactaaacatgtctaccactgatcattaatatgaattgttagtttatttaacttgtttcatttaattacatttcttcattgcacaagcgtttacatctgtaaagctaggcaaagcataacaattcttttgcttcatttgttccacttataagcctcagtaaagaagtaacgttctggggcctggcacggtggctcacgcctgtaatctcagcactttgggaggccaaggcgggcggatcacgaggtcaagagatcgagaccatcctggccaacatggtgaaaccccgtctctaccaaaagtacaaaaattagctggctgtggtggtgtgtgcctgtagtcccagctactcaggaggctgaggcaagagaatcacttgaacccgggaagtgaggttgcagtgagccgaggctgtgccactgtactctagctctggcaacagagcaagactccgtctcagaaaaaaaaaaggttctgaaagtggttgtaaactcttgtatcacataataaattaaaactgcagctgtcccacggctaatacaagagctacatgtaaacagagaaagttgcctgatggcattagtaagtcgttcaaagagtgagaagcaggttatcttagtactgttccttatttcattcatagaatgaatgtataacctagattgtttttggtttattttgatggcaaaaatcattgacatatatcccatgggtcatgggaagcctgtaagaaatgttgaggtttgaggaggagcaagtttgaaagatgtgtttctgtgttgtgggataaagacgataatcttggacttgaacctggatttgaatctggaatgcagctggcaatttgggtatagagctcaggagaaagagtatgttttacttctaatacctaacacaatgacttggcatattaaatgtttattgaatgaataactactttctagatatcctcataatacccatagatttttttaaattacataaaaacataaaatcaagaactg

SEQ ID NO: 118083 - DNA, 349 bp, Homo sapiens
  Payload ID: 3106
  Gene Symbol: C11orf70
  Gene Name: chromosome 11 open reading frame 70
  ENST ID: ENST00000529204
  CDS Start-End: 1-287
cattttttcatcggttatatgatgaagatattgtacgagacagtggacatattgttaaatgtttagattctttttgtgatccatttctcatttctgatgagttacgaagagttttgctagtggaagactcagaaaaatatgaaatattcagccaaccagatagagaagagttcctgttttgtcttttcaaacatctttgccttggtggagccctttgtcaatatgaggatgtgattagcccatatctggaaacaacaaagcttatctataaggatctggtgaggtaatgttgctagatcacaatatgtaaatctctagttaatagaataaattatttgcttaaccttga

SEQ ID NO: 118084 - DNA, 845 bp, Homo sapiens
  Payload ID: 3106
  Gene Symbol: C11orf70
  Gene Name: chromosome 11 open reading frame 70
  ENST ID: ENST00000526781
  CDS Start-End: 17-742
cccagccgagagcacgatggctactggggagctcggggacttgggtggctactacttcaggttcttgcctcagaaaaccttccagtctctgagctctaaggagatcaccagccggctccgccagtggtccatgctgggcagaatcaaggcgcaggcgttcggctttgaccagacctttcagtcctatcggaaggatgatttcgttatggcttttttcaaagacccaaatgttattcccaatttgaagttactttcagattcttctggacaatggatcatattaggaactgaagtgaaaaaaattgaagctataaatgttccttgcacacagctttcaatgtcattttttcatcggttatatgatgaagatattgtacgagacagtggacatattgttaaatgtttagattctttttgtgatccatttctcatttctgatgagttacgaagagttttgctagtggaagactcagaaaaatatgaaatattcagccaaccagatagagaagagttcctgttttgtcttttcaaacatctttgccttggtggagccctttgtcaatatgaggatgtgattagcccatatctggaaacaacaaagcttatctataaggatctggtgagtgttcgaaagaatcctcaaaccaagaaaatacagattacctcttctgtctttaaagtttcagcttatgtaagtgtgagagaacttttgcaaccaaagaatttaattactttttattaatagagttgttacaactggagttaacaatcaggacaatgttatgcctaggagaaaagacaatgttatttagagttttgttaaaattaaaagttgatagagtatg

SEQ ID NO: 118085 - DNA, 520 bp, Homo sapiens
  Payload ID: 3106
  Gene Symbol: C11orf70
  Gene Name: chromosome 11 open reading frame 70
  Uniprot ID: Q9BRQ4
  ENST ID: ENST00000534360
  CDS Start-End: 14-313
agccgagagcacgatggctactggggagctcggggacttgggtggctactacttcaggttcttgcctcagaaaaccttccagtctctgagctctaaggagatcaccagccggctccgccagtggtccatgctgggcagaatcaaggcgcaggcgttcggctttgaccagacctttcagtcctatcggaaggatgatttcgttatggcttttttcaaagacccaaatgttattcccaatttgaagttactttcagattcttctggacaatggatcatattaggttttgctagtggaagactcagaaaaatatgaaatattcagccaaccagatagagaagagttcctgttttgtcttttcaaacatctttgccttggtggagccctttgtcaatatgaggatgtgattagcccatatctggaaacaacaaagcttatctataaggatctggtgaggtaatgttgctagatcacaatatgtaaatctctagttaatagaataaattatttgcttaaccttga

SEQ ID NO: 118086 - DNA, 780 bp, Homo sapiens
  Payload ID: 3107
  Gene Symbol: C11orf71
  Gene Name: chromosome 11 open reading frame 71
  Uniprot ID: Q6IPW1
  ENST ID: ENST00000325636
  CDS Start-End: 220-663
tgctctcagcgggcgacgacgtgcgcggacggtctgcgcatgctcgccaggatacccctcgttaaaggcaaggcggcttctggctcttccgcaggctcagttatgggttcctgtgtgcttagtcatcgggtccgacacaggctggactgatctggggagccgcgaagggcctgccttcacaaagggacgtaacgcaagtactgcgggcagtgtttgaatatggccctgaacaatgtgtccctgtcctccggtgatcagaggagcagggtggcctaccgctcttcccatggcgacctcagaccgcgggcgtcagcgttggcgatggtctccggagacggcttcctcgtttccaggcctgaagcgattcatctaggacctcggcaggcggtgcgaccaagcgttcgggccgagagccgtcgagtggatggtggcggccggagcccaagggaaccagatggccggggccggagccgccaagccagattctcaccttacccaatccctgccgttgaacccgatctcctaagaagtgtgctgcaacagcgtttgattgcattaggagttactacctggaccctgaagctatctgagtctgcaacccctgatttaagatggtgttcaacatgcagccattcaaatatttttgaaattttagtaatatgaactgatttgtgatataattacatttatattatttaagataaaaattggatatgaaattgtatgtattatatgatcttacctatatgaatgaaatatgcattaaaaaactagaattgc

SEQ ID NO: 118087 - DNA, 372 bp, Homo sapiens
  Payload ID: 3107
  Gene Symbol: C11orf71
  Gene Name: chromosome 11 open reading frame 71
  Uniprot ID: Q6IPW1
  ENST ID: ENST00000634180
  CDS Start-End: 1-372
atggccctgaacaatgtgtccctgtcctccggtgatcagaggagcagggtggcctaccgctcttcccatggcgacctcagaccgcgggcgtcagcgttggcgatggtctccggagacggcttcctcgtttccaggcctgaagcgattcatctaggacctcggcaggcggtgcgaccaagcgttcgggccgagagccgtcgagtggatggtggcggccggagcccaagggaaccagatggccggggccggagccgccaagccagattctcaccttacccaatccctgccgttgaacccgatctcctaagaagtgtgctgcaacagcgtttgattgcattaggaggtgttatcgcagctcgaatttcagtttaa

SEQ ID NO: 118088 - DNA, 1113 bp, Homo sapiens
  Payload ID: 3108
  Gene Symbol: C11orf73
  Gene Name: chromosome 11 open reading frame 73
  Uniprot ID: Q53FT3
  ENST ID: ENST00000278483
  CDS Start-End: 227-820
aagccccggaagtacttgttgcctgagcagtgggctgcttaggaagagaaggtcagagttcgcgggggcagaggcattcttgccgctggcccagtcactatgtagtggaggggcagacaccctcccgcaaattctggaaggttcttagtctcgactagggcagtagccccaggactcctagtcgccggcttcaggtcactgccggctgaacggagctgccgtcgccatgtttggctgcttggtggcggggaggctggtgcaaacagctgcacagcaagtggcagaggataaatttgtttttgacttacctgattatgaaagtatcaaccatgttgtggtttttatgctgggaacaatcccatttcctgagggaatgggaggatctgtctacttttcttatcctgattcaaatggaatgccagtatggcaactcctaggatttgtcacgaatgggaagccaagtgccatcttcaaaatttcaggtcttaaatctggagaaggaagccaacatccttttggagccatgaatattgtccgaactccatctgttgctcagattggaatttcagtggaattattagacagtatggctcagcagactcctgtaggtaatgctgctgtatcctcagttgactcattcactcagttcacacaaaagatgttggacaatttctacaattttgcttcatcatttgctgtctctcaggcccagatgacaccaagcccatctgaaatgttcattccggcaaatgtggttctgaaatggtatgaaaactttcaaagacgactagcacagaaccctctcttttggaaaacataatttgaataaaataatttttaatggattctgaaatttgtcatgttttgaagataactgactccatctaaaagtatgaggtcaaaggatcacgaaacctaagtttaaaaactgcttagagactgaagcttaattaaaaatctttattaaaaattaaaaacattgaaaaatgaaaatatgttcatcattaaagacttttttccccttaagcttaaaataccattcaaaggcaagacattttgttttggctatgattcattttttttacttaaaaataaaacctataccaaacagta

SEQ ID NO: 118089 - DNA, 1694 bp, Homo sapiens
  Payload ID: 3108
  Gene Symbol: C11orf73
  Gene Name: chromosome 11 open reading frame 73
  ENST ID: ENST00000533986
  CDS Start-End: 239-823
aaaaccgggtgtaagccccggaagtacttgttgcctgagcagtgggctgcttaggaagagaaggtcagagttcgcgggggcagaggcattcttgccgctggcccagtcactatgtagtggaggggcagacaccctcccgcaaattctggaaggttcttagtctcgactagggcagtagccccaggactcctagtcgccggcttcaggtcactgccggctgaacggagctgccgtcgccatgtttggctgcttggtggcggggaggctggtgcaaacagctgcacagcaagtggcagaggataaatttgtttttgacttacctgattatgaaagtatcaaccatgttgtggtttttatgctgggaacaatcccatttcctgagggaatgggaggatctgtctacttttcttatcctgattcaaatggaatgccagtatggcaactcctaggatttgtcacgaatgggaagccaagtgccatcttcaaaatttcaggtcttaaatctggagaaggaagccaacatccttttggagccatgaatattgtccgaactccatctgttgctcagattggaatttcagtggaattattagacagtatggctcagcagactcctgtaggtaatgctgctgtatcctcagttgactcattcactcagttcacacaaaagatgttggacaatttctacaattttgcttcatcatttgctgtctctcaggcccagatgacaccaagcccatctgaaatgttcattccggcaaatgtggttctgaaatggtatgaggcattttctgtctccaatattaaggctttttataactgaatatctattttgtctatgaatatattccttttttgacatttaaacatattcttttattgtgaacatcagcactgcatgccattaaagtatgtactatagagatctgatgagaaacagttcttaccctaaatattttgttatattgtcgccattatgaatttataaagacaggaaaatatagttgcctatgttttagggaccactattaaagcttataaatatttgtgtattttcatttagaagtaccatctatgagagtagtttatactgcactgtgtacatgaatggctaatgaatctattttccaactttcccgtgttttatagatatttcttttcactttgagtatcctagagatgggaggatgcctaggaagagtttgttgagaagtggtaccatggtgtagcatggagagcattggaatgcactaggtttgaattttggcataatgtagctatgtgaccctgagcaaatttctctcatctgctcatctgtggaatgaggaaataggagttgaatttgatttttttccttaggtcccttctaggtcttaaatttgcagaagataaacaattactaaaatttcttatgatttgtgctctctgataaaagctaatcaaaactgccccgatatttaaattcctatgcttgctgtctttttataagaataattacatttccagattatctttttagattttttatagctttttagaaatgacatgtaaaattgttttggataagtcatttggcagttaatgaaagatcctattttaattttcttgtgaatgtaaatatatgtgttttcttttctaggtatgaaaactttcaaagacgactagcacagaaccctctcttttggaaaacataa

SEQ ID NO: 118090 - DNA, 1409 bp, Homo sapiens
  Payload ID: 3108
  Gene Symbol: C11orf73
  Gene Name: chromosome 11 open reading frame 73
  ENST ID: ENST00000528004
  CDS Start-End: 199-477
agtgggctgcttaggaagagaaggtcagagttcgcgggggcagaggcattcttgccgctggcccagtcactatgtagtggaggggcagacaccctcccgcaaattctggaaggttcttagtctcgactagggcagtagccccaggactcctagtcgccggcttcaggtcactgccggctgaacggagctgccgtcgccatgtttggctgcttggtggcggggaggctggtgcaaacagctgcacagcaagtggcagaggataaatttgtttttgacttacctgattatgaaagtatcaaccatgttgtggtttttatgctgggaacaatcccatttcctgagggaatgggaggatctgtctacttttcttatcctgattcaaatggaatgccagtatggcaactcctaggatttgtcacgaatgggaagccaagtgccatcttcaaaatttcaggtcttaaatctggtaattattgaacatctacttgctgcctactttcaacatctgcatgtgtgtgtgaatattaaatatcacaccaagacattgttcagaggagacagaatagtgagctgagataaatgagaatctctctatggaagattagactggagcatgaacttgaaatatgagagaaggaagccaacatccttttggagccatgaatattgtccgaactccatctgttgctcagattggaatttcagtggaattattagacagtatggctcagcagactcctgtaggtaatgctgctgtatcctcagttgactcattcactcagttcacacaaaagatgttggacaatttctacaattttgcttcatcatttgctgtctctcaggcccagatgacaccaagcccatctgaaatgttcattccggcaaatgtggttctgaaatggtatgaggcattttctgtctccaatattaaggctttttataactgaatatctattttgtctatgaatatattccttttttgacatttaaacatattcttttattgtgaacatcagcactgcatgccattaaagtatgtactatagagatctgatgagaaacagttcttaccctaaatattttgttatattgtcgccattatgaatttataaagacaggaaaatatagttgcctatgttttagggaccactattaaagcttataaatatttgtgtattttcatttagaagtaccatctatgagagtagtttatactgcactgtgtacatgaatggctaatgaatctattttccaactttcccgtgttttatagatatttcttttcactttgagtatcctagagatgggaggatgcctaggaagagtttgttgagaagtggtaccatggtgtagcatggagagcattggaatgcactaggtttgaattttggcataatgtagctatgtga

SEQ ID NO: 118091 - DNA, 499 bp, Homo sapiens
  Payload ID: 3108
  Gene Symbol: C11orf73
  Gene Name: chromosome 11 open reading frame 73
  ENST ID: ENST00000618164
  CDS Start-End: 80-475
tgctgggaacaatcccatttcctgagggaatgggaggatctgtctacttttcttatcctgattcaaatggaatgccagtatgcaactcctaggatttgtcacgaatgggaagccaagtgccatcttcaaaatttcaggtcttaaatctggagaaggaagccaacatccttttggagccatgaatattgtccgaactccatctgttgctcagattggaatttcagtggaattattagacagtatggctcagcagactcctgtaggtaatgctgctgtatcctcagttgactcattcactcagttcacacaaaagatgttggacaatttctacaattttgcttcatcatttgctgtctctcaggcccagatgacaccaagcccatctgaaatgttcattccggcaaatgtggttctgaaatggtatgaaaactttcaaagacgactagcacagaaccctctcttttggaaaacataatttgaataaaataatttttaatgg

SEQ ID NO: 118092 - DNA, 633 bp, Homo sapiens
  Payload ID: 3109
  Gene Symbol: C11orf74
  Gene Name: chromosome 11 open reading frame 74
  Uniprot ID: Q86VG3
  ENST ID: ENST00000347206
  CDS Start-End: 104-547
gtgtagctttggaaatctgtctttgttgctctgggagaggggactcctggaatgtgtctgtgaataaagactagccgaagatactgtggcctcatgaataggaatgtctgcccatatgtcaggattggaaataatggatgaagatcaattaatcaaagacgtcttggataaattccttaattgtcatgagcaaacatatgatgaagaatttctgaacacttttactcatctttcacaagatttgctgctgcttccaggagaagtggagcaggatgtaagcaccagcattccttcctgtatcccttttgtggcccagcctcctacctgtgaagtgaagccaaagcccagtgttaaaagaatggacaaacagacggaagagatacttggagatgaagttcaacttttttcacttgatgaagaatttgattatgacaatgtgatgctaacctccaagtttagtcctgcagagatagagaacatcaaagagctatgcaagcagcagaagagaaaggacaccagcccagacttagagaaatcctgtgactgattcacagaggcattttgtgtgtgtgtgcttattttaattttgttcttattctagcaacattagaataaaagataaacctactataa

SEQ ID NO: 118093 - DNA, 863 bp, Homo sapiens
  Payload ID: 3109
  Gene Symbol: C11orf74
  Gene Name: chromosome 11 open reading frame 74
  Uniprot ID: Q86VG3
  ENST ID: ENST00000334307
  CDS Start-End: 116-781
tctctctgggatgtgtagctttggaaatctgtctttgttgctctgggagaggggactcctggaatgtgtctgtgaataaagactagccgaagatactgtggcctcatgaataggaatgtctgcccatatgtcaggattggaaataatggatgaagatcaattaatcaaagacgtcttggataaattccttaattgtcatgagcaaacatatgatgaagaatttctgaacacttttactcatctttcacaagaggatcatgtgtccaaaaggggagtgtttggaactgattcttcagaaaacatttttacctcagcaaaagttactcataaaaatgaagcagatgactaccatcttagaaataaaaccatctttcttcgtacttcatcacaatgtttggaagaacaggtagataatttcctagatttagaagatttggacatggatgaagagattaaaccccaaatgagtgaggatttgctgctgcttccaggagaagtggagcaggatgtaagcaccagcattccttcctgtatcccttttgtggcccagcctcctacctgtgaagtgaagccaaagcccagtgttaaaagaatggacaaacagacggaagagatacttggagatgaagttcaacttttttcacttgatgaagaatttgattatgacaatgtgatgctaacctccaagtttagtcctgcagagatagagaacatcaaagagctatgcaagcagcagaagagaaaggacaccagcccagacttagagaaatcctgtgactgattcacagaggcattttgtgtgtgtgtgcttattttaattttgttcttattctagcaacattagaataaaagataaacctact

SEQ ID NO: 118094 - DNA, 1062 bp, Homo sapiens
  Payload ID: 3109
  Gene Symbol: C11orf74
  Gene Name: chromosome 11 open reading frame 74
  Uniprot ID: Q86VG3
  ENST ID: ENST00000446510
  CDS Start-End: 293-958
gaatccgttctctctgggatgtgtagctttggaaatctgtctttgttgctctgggagaggggactcctggaatgtgtctgtgaataaagactagccgaaggtgcgaagtgactagacgggagcaaaggaggaaaactagggaatgggaggtgagagtggctgacaccgacccaacgtccgggttgccggaaggctgcagcgcccggagcggtgtcgggcaaaccgctaccctggtattgctggagcctctcctggggacttttgaacagatactgtggcctcatgaataggaatgtctgcccatatgtcaggattggaaataatggatgaagatcaattaatcaaagacgtcttggataaattccttaattgtcatgagcaaacatatgatgaagaatttctgaacacttttactcatctttcacaagaggatcatgtgtccaaaaggggagtgtttggaactgattcttcagaaaacatttttacctcagcaaaagttactcataaaaatgaagcagatgactaccatcttagaaataaaaccatctttcttcgtacttcatcacaatgtttggaagaacaggtagataatttcctagatttagaagatttggacatggatgaagagattaaaccccaaatgagtgaggatttgctgctgcttccaggagaagtggagcaggatgtaagcaccagcattccttcctgtatcccttttgtggcccagcctcctacctgtgaagtgaagccaaagcccagtgttaaaagaatggacaaacagacggaagagatacttggagatgaagttcaacttttttcacttgatgaagaatttgattatgacaatgtgatgctaacctccaagtttagtcctgcagagatagagaacatcaaagagctatgcaagcagcagaagagaaaggacaccagcccagacttagagaaatcctgtgactgattcacagaggcattttgtgtgtgtgtgcttattttaattttgttcttattctagcaacattagaataaaagataaacctactataattccctttgtggaaattt

SEQ ID NO: 118095 - DNA, 930 bp, Homo sapiens
  Payload ID: 3109
  Gene Symbol: C11orf74
  Gene Name: chromosome 11 open reading frame 74
  Uniprot ID: Q86VG3
  ENST ID: ENST00000532470
  CDS Start-End: 177-842
acggtgtcctgcctgtctggatgcttaggagcgcgactcaaaactacacccctgacgaccctggagaaagatactgtactgtgaaacattaaatcttgctgatccgtgctggccatgttttcttgattgctccagagtagcaagtaacctcatatactgtggcctcatgaataggaatgtctgcccatatgtcaggattggaaataatggatgaagatcaattaatcaaagacgtcttggataaattccttaattgtcatgagcaaacatatgatgaagaatttctgaacacttttactcatctttcacaagaggatcatgtgtccaaaaggggagtgtttggaactgattcttcagaaaacatttttacctcagcaaaagttactcataaaaatgaagcagatgactaccatcttagaaataaaaccatctttcttcgtacttcatcacaatgtttggaagaacaggtagataatttcctagatttagaagatttggacatggatgaagagattaaaccccaaatgagtgaggatttgctgctgcttccaggagaagtggagcaggatgtaagcaccagcattccttcctgtatcccttttgtggcccagcctcctacctgtgaagtgaagccaaagcccagtgttaaaagaatggacaaacagacggaagagatacttggagatgaagttcaacttttttcacttgatgaagaatttgattatgacaatgtgatgctaacctccaagtttagtcctgcagagatagagaacatcaaagagctatgcaagcagcagaagagaaaggacaccagcccagacttagagaaatcctgtgactgattcacagaggcattttgtgtgtgtgtgcttattttaattttgttcttattctagcaacattagaataaaagataaacctactataatt

SEQ ID NO: 118096 - DNA, 631 bp, Homo sapiens
  Payload ID: 3109
  Gene Symbol: C11orf74
  Gene Name: chromosome 11 open reading frame 74
  ENST ID: ENST00000530697
  CDS Start-End: 383-631
tcctggaatgtgtctgtgaataaagactagccgaaggtgcgaagtgactagacgggagcaaaggaggaaaactagggaatgggaggtgagagtggctgacaccgacccaacgtccgggttgccggaaggctgcagcgcccggagcggtgtcgggcaaaccgctaccctggtattgctggagcctctcctggggacttttgaacaggtgacccgataggaagcacaactgcttctgttggagtgcggttacctggagaccgcagtctgaagggactcccggcagagatgtcgttacggtgtcctgcctgtctggatgcttaggagcgcgactcaaaactacacccctgacgaccctggagatactgtggcctcatgaataggaatgtctgcccatatgtcaggattggaaataatggatgaagatcaattaatcaaagacgtcttggataaattccttaattgtcatgagcaaacatatgatgaagaatttctgaacacttttactcatctttcacaagaggatcatgtgtccaaaaggggagtgtttggaactgattcttcagaaaacatttttacctcagcaaaagttactcataaaaatgaagcagatgactaccatcttagaaataaa

SEQ ID NO: 118097 - DNA, 801 bp, Homo sapiens
  Payload ID: 3109
  Gene Symbol: C11orf74
  Gene Name: chromosome 11 open reading frame 74
  Uniprot ID: Q86VG3
  ENST ID: ENST00000534635
  CDS Start-End: 270-713
tagctttggaaatctgtctttgttgctctgggagaggggactcctggaatgtgtctgtgaataaagactagccgaaggtgcgaagtgactagacgggagcaaaggaggaaaactagggaatgggaggtgagagtggctgacaccgacccaacgtccgggttgccggaaggctgcagcgcccggagcggtgtcgggcaaaccgctaccctggtattgctggagcctctcctggggacttttgaacagatactgtggcctcatgaataggaatgtctgcccatatgtcaggattggaaataatggatgaagatcaattaatcaaagacgtcttggataaattccttaattgtcatgagcaaacatatgatgaagaatttctgaacacttttactcatctttcacaagatttgctgctgcttccaggagaagtggagcaggatgtaagcaccagcattccttcctgtatcccttttgtggcccagcctcctacctgtgaagtgaagccaaagcccagtgttaaaagaatggacaaacagacggaagagatacttggagatgaagttcaacttttttcacttgatgaagaatttgattatgacaatgtgatgctaacctccaagtttagtcctgcagagatagagaacatcaaagagctatgcaagcagcagaagagaaaggacaccagcccagacttagagaaatcctgtgactgattcacagaggcattttgtgtgtgtgtgcttattttaattttgttcttattctagcaacattagaataaaagataaacctactataatt

SEQ ID NO: 118098 - DNA, 694 bp, Homo sapiens
  Payload ID: 3109
  Gene Symbol: C11orf74
  Gene Name: chromosome 11 open reading frame 74
  ENST ID: ENST00000531554
  CDS Start-End: 153-694
gtgtagctttggaaatctgtctttgttgctctgggagaggggactcctggaatgtgtctgtgaataaagactagccgaaggtgcgaagtgactagacgggagcaaaggaggaaaactagggaatgggagatactgtggcctcatgaataggaatgtctgcccatatgtcaggattggaaataatggatgaagatcaattaatcaaagacgtcttggataaattccttaattgtcatgagcaaacatatgatgaagaatttctgaacacttttactcatctttcacaagaggatcatgtgtccaaaaggggagtgtttggaactgattcttcagaaaacatttttacctcagcaaaagttactcataaaaatgaagcagatgactaccatcttagaaataaaaccatctttcttcgtacttcatcacaatgtttggaagaacaggtagataatttcctagatttagaagatttggacatggatgaagagattaaaccccaaatgagtgaggatttgctgctgcttccaggagaagtggagcaggatgtaagcaccagcattccttcctgtatcccttttgtggcccagcctcctacctgtgaagtgaagccaaagcccagtgttaaaagaatggacaaacagacggaagagatacttggagatgaagttcaacttttttcacttgatgaagaatt

SEQ ID NO: 118099 - DNA, 861 bp, Homo sapiens
  Payload ID: 3109
  Gene Symbol: C11orf74
  Gene Name: chromosome 11 open reading frame 74
  ENST ID: ENST00000528092
  CDS Start-End: 165-494
aggaaaactagggaatgggaggtgagagtggctgacaccgacccaacgtccgggttgccggaaggctgcagcgcccggagcggtgtcgggcaaaccgctaccctggtattgctggagcctctcctggggacttttgaacagatactgtggcctcatgaataggaatgtctgcccatatgtcaggattggaaataatggatgaagatcaattaatcaaagacgtcttggataaattccttaattgtcatgagcaaacatatgatgaagaatttctgaacacttttactcatctttcacaagaggatcatgtgtccaaaaggggagtgtttggaactgattcttcagaaaacatttttacctcagcaaaagttactcataaaaatgaagcagatgactaccatcttagaaataaaaccatctttcttcgtacttcatcacaatgtttggaagaacagatttgctgctgcttccaggagaagtggagcaggatgtaagcaccagcattccttcctgtatcccttttgtggcccagcctcctacctgtgaagtgaagccaaagcccagtgttaaaagaatggacaaacagacggaagagatacttggagatgaagttcaacttttttcacttgatgaagaatttgattatgacaatgtgatgctaacctccaagtttagtcctgcagagatagagaacatcaaagagctatgcaagcagcagaagagaaaggacaccagcccagacttagagaaatcctgtgactgattcacagaggcattttgtgtgtgtgtgcttattttaattttgttcttattctagcaacattagaataaaagataaacctactataattccctttgtgg

SEQ ID NO: 118100 - DNA, 366 bp, Homo sapiens
  Payload ID: 3109
  Gene Symbol: C11orf74
  Gene Name: chromosome 11 open reading frame 74
  ENST ID: ENST00000527108
  CDS Start-End: 95-366
tgtgaataaagactagccgaaggtgcgaagtgactagacgggagcaaaggaggaaaactagggaatgggagatactgtggcctcatgaataggaatgtctgcccatatgtcaggattggaaataatggatgaagatcaattaatcaaagacgtcttggataaattccttaattgtcatgagcaaacatatgatgaagaatttctgaacacttttactcatctttcacaagatttgctgctgcttccaggagaagtggagcaggatgtaagcaccagcattccttcctgtatcccttttgtggcccagcctcctacctgtgaagtgaagccaaagcccagtgttaaaagaatggacaaacagacgga

SEQ ID NO: 118101 - DNA, 937 bp, Homo sapiens
  Payload ID: 3109
  Gene Symbol: C11orf74
  Gene Name: chromosome 11 open reading frame 74
  Uniprot ID: Q86VG3
  ENST ID: ENST00000617650
  CDS Start-End: 168-833
aggaagcacaactgcttctgttggagtgcggttacctggagaccgcagtctgaagggactcccggcagagatgtcgttacggtgtcctgcctgtctggatgcttaggagcgcgactcaaaactacacccctgacgaccctggagatactgtggcctcatgaataggaatgtctgcccatatgtcaggattggaaataatggatgaagatcaattaatcaaagacgtcttggataaattccttaattgtcatgagcaaacatatgatgaagaatttctgaacacttttactcatctttcacaagaggatcatgtgtccaaaaggggagtgtttggaactgattcttcagaaaacatttttacctcagcaaaagttactcataaaaatgaagcagatgactaccatcttagaaataaaaccatctttcttcgtacttcatcacaatgtttggaagaacaggtagataatttcctagatttagaagatttggacatggatgaagagattaaaccccaaatgagtgaggatttgctgctgcttccaggagaagtggagcaggatgtaagcaccagcattccttcctgtatcccttttgtggcccagcctcctacctgtgaagtgaagccaaagcccagtgttaaaagaatggacaaacagacggaagagatacttggagatgaagttcaacttttttcacttgatgaagaatttgattatgacaatgtgatgctaacctccaagtttagtcctgcagagatagagaacatcaaagagctatgcaagcagcagaagagaaaggacaccagcccagacttagagaaatcctgtgactgattcacagaggcattttgtgtgtgtgtgcttattttaattttgttcttattctagcaacattagaataaaagataaacctactataattccctttgtggaaattt

SEQ ID NO: 118102 - DNA, 1807 bp, Homo sapiens
  Payload ID: 3110
  Gene Symbol: C11orf80
  Gene Name: chromosome 11 open reading frame 80
  ENST ID: ENST00000360962
  CDS Start-End: 1-1719
tggagtctcactctgttacccaggccggagtgcagtggcgcagtctcggctcactgcaacctccacctcccaggttcaagtgattctcatgcctcagtcccccgagtagctgggattacagatgcccaccaccatgcctggctaattatggttgcttctgcaggaagcctttttggtggcatggtcctcaagaagttcctaaaagaaatacagtccatactgcccggaatctctgcaaagctgacttggacttcagaggaaggcagctattctcaggatatgacaggggtaacacccttccagatgatttttgaggttgatgaaaagcccagaaccttgatgacagattgtctggttataaagcattttttacgtaaaatcatcatggtgcaccctaaggtcagatttcatttcagtgtaaaggtaaatggaatcctctccacagagatctttggggtggagaatgaacccactttgaaccttgggaatggaattgctcttttggtcgactcccagcattatgtgagtagaccaaattttggtacaattgaatcacactgcagcagaattcaccctgtgctaggacatccagtaatgcttttcatccctgaagacgtggctggcatggacttgttgggagaactgatactgactccagcagctgcactgtgccccagcccaaaggtttcttccaaccagcttaacaggatttcttcagtttccatatttctatatggacctttgggtctgcctctgatattgtcaacttgggagcagccgatgactactttcttcaaagatacctcttctttagttgactggaaaaaataccatttgtgtatgatacccaatttggatctcaatttggatagagatttggtgcttccagatgtgagttatcaggtggaatccagtgaggaggatcagtctcagactatggatcctcaaggacaaactctgctgctttttctctttgtggatttccacagtgcatttccagtccagcaaatggaaatctggggagtctatactttgctcacaactcatctcaatgccatccttgtggagagccacagtgtagtgcaaggttccatccaattcactgtggacaaggtcttggagcaacatcaccaggctgccaaggctcagcagaaactacaggcctcactctcagtggctgtgaactccatcatgagtattctgactggaagcactaggagcagcttccgaaagatgtgtctccagacccttcaagcagctgacacacaagagttcaggaccaaactgcacaaagtatttcgtgagatcacccaacaccaatttcttcaccactgctcatgtgaggtgaagcagcagctaaccctagaaaaaaaggactcagcccagggcactgaggacgcacctgataacagcagcctggagctcctagcagataccagcgggcaagcagaaaacaagaggctcaagaggggcagcccccgcatagaggagatgcgagctctgcgctctgccagggccccgagcccgtcagaggccgccccgcgccgcccggaagccaccgcggcccccctcactcctagaggaagggagcaccgcgaggctcacggcagggccctggcgccgggcagggcgagcctcggaagccgcctggaggacgtgctgtggctgcaggaggtctccaacctgtcagagtggctgagtcccagccctgggccctgagccgggtccccttccgcaagcgcccaccgatccggaggctgcgggcagccgttatcccgtggtttaataaagctgccgcgcgctcacc

SEQ ID NO: 118103 - DNA, 1666 bp, Homo sapiens
  Payload ID: 3110
  Gene Symbol: C11orf80
  Gene Name: chromosome 11 open reading frame 80
  ENST ID: ENST00000527634
  CDS Start-End: 228-1610
ggactcgggcgtgggcactggcggagttccaagcccgggctgaggagggggcggcggcggcggcggcggcggcgggcgggtacccttcgactgggcgttgccgctgttccctgcgcggcatggaggggacggccgtggccgtgttcgagttgcttctgcaggaagcctttttggtggcatggtcctcaagaagttcctaaaaggttgatgaaaagcccagaaccttgatgacagattgtctggttataaagcattttttacgtaaaatcatcatggtgcaccctaaggtcagatttcatttcagtgtaaaggtaaatggaatcctctccacagagatctttggggtggagaatgaacccactttgaaccttgggaatggaattgctcttttggtcgactcccagcattatgtgagtagaccaaattttggtacaattgaatcacactgcagcagaattcaccctgtgctaggacatccagtaatgcttttcatccctgaagacgtggctggcatggacttgttgggagaactgatactgactccagcagctgcactgtgccccagcccaaaggtttcttccaaccagcttaacaggatttcttcacaactacacatatttctatatggacctttgggtctgcctctgatattgtcaacttgggagcagccgatgactactttcttcaaagatacctcttctttagttgactggaaaaaataccatttgtgtatgatacccaatttggatctcaatttggatagagatttggtgcttccagatgtgagttatcaggtggaatccagtgaggaggatcagtctcagactatggatcctcaaggacaaactctgctgctttttctctttgtggatttccacagtgcatttccagtccagcaaatggaaatctggggagtctatactttgctcacaactcatctcaatgccatccttgtggagagccacagtgtagtgcaaggttccatccaattcactgtggacaaggtcttggagcaacatcaccaggctgccaaggctcagcagaaactacaggcctcactctcagtggctgtgaactccatcatgagtattctgactggaagcactaggagcagcttccgaaagatgtgtctccagacccttcaagcagctgacacacaagagttcaggaccaaactgcacaaagtatttcgtgagatcacccaacaccaatttcttcaccactgctcatgtgaggtgaagcagcagctaaccctagaaaaaaaggactcagcccagggcactgaggacgcacctgataacagcagcctggagctcctagcagataccagcgggcaagcagaaaacaagaggctcaagaggggcagcccccgcatagaggagatgcgagctctgcgctctgccagggccccgagcccgtcagaggccgccccgcgccgcccggaagccaccgcggcccccctcactcctagaggaagggagcaccgcgaggctcacggcagggccctggcgccgggcagggcgagcctcggaagccgcctggaggacgtgctgtggctgcaggaggtctccaacctgtcagagtggctgagtcccagccctgggccctgagccgggtccccttccgcaagcgcccaccgatccggaggctgcgggcagccgttatc

SEQ ID NO: 118104 - DNA, 2135 bp, Homo sapiens
  Payload ID: 3110
  Gene Symbol: C11orf80
  Gene Name: chromosome 11 open reading frame 80
  Uniprot ID: Q8N6T0
  ENST ID: ENST00000525908
  CDS Start-End: 8-2041
ggaagggatgggctcgcgctgccgggcgtgggcgtggactcgggcgtgggcactggcggagttccaagcccgggctgaggagggggcggcggcggcggcggcggcggcgggcgggtacccttcgactgggcgttgccgctgttccctgcgcggcatggaggggacggccgtggccgtgttcgagattttgagatttttaataattcactggaagtgtgacatagatgtatcaaagggagcattgctagaagggcagctagtgatttccatagaaggattaaattctaagcaccaggcaaatgctcttcattgtgtaacaactagatggagtctcactctgttacccaggccggagtgcagtggcgcagtctcggctcactgcaacctccacctcccaggttcaagtgattctcatgcctcagtcccccgagtagctgggattacagatgcccaccaccatgcctggctaattatggttgcttctgcaggaagcctttttggtggcatggtcctcaagaagttcctaaaagaaatacagtccatactgcccggaatctctgcaaagctgacttggacttcagaggaaggcagctattctcaggatatgacaggggtaacacccttccagatgatttttgaggttgatgaaaagcccagaaccttgatgacagattgtctggttataaagcattttttacgtaaaatcatcatggtgcaccctaaggtcagatttcatttcagtgtaaaggtaaatggaatcctctccacagagatctttggggtggagaatgaacccactttgaaccttgggaatggaattgctcttttggtcgactcccagcattatgtgagaccaaattttggtacaattgaatcacactgcagcagaattcaccctgtgctaggacatccagtaatgcttttcatccctgaagacgtggctggcatggacttgttgggagaactgatactgactccagcagctgcactgtgccccagcccaaaggtttcttccaaccagcttaacaggatttcttcagtttccatatttctatatggacctttgggtctgcctctgatattgtcaacttgggagcagccgatgactactttcttcaaagatacctcttctttagttgactggaaaaaataccatttgtgtatgatacccaatttggatctcaatttggatagagatttggtgcttccagatgtgagttatcaggtggaatccagtgaggaggatcagtctcagactatggatcctcaaggacaaactctgctgctttttctctttgtggatttccacagtgcatttccagtccagcaaatggaaatctggggagtctatactttgctcacaactcatctcaatgccatccttgtggagagccacagtgtagtgcaaggttccatccaattcactgtggacaaggtcttggagcaacatcaccaggctgccaaggctcagcagaaactacaggcctcactctcagtggctgtgaactccatcatgagtattctgactggaagcactaggagcagcttccgaaagatgtgtctccagacccttcaagcagctgacacacaagagttcaggaccaaactgcacaaagtatttcgtgagatcacccaacaccaatttcttcaccactgctcatgtgaggtgaagcagcagctaaccctagaaaaaaaggactcagcccagggcactgaggacgcacctgataacagcagcctggagctcctagcagataccagcgggcaagcagaaaacaagaggctcaagaggggcagcccccgcatagaggagatgcgagctctgcgctctgccagggccccgagcccgtcagaggccgccccgcgccgcccggaagccaccgcggcccccctcactcctagaggaagggagcaccgcgaggctcacggcagggccctggcgccgggcagggcgagcctcggaagccgcctggaggacgtgctgtggctgcaggaggtctccaacctgtcagagtggctgagtcccagccctgggccctgagccgggtccccttccgcaagcgcccaccgatccggaggctgcgggcagccgttatcccgtggtttaataaagctgccgcgcgctcaccaagtcc

SEQ ID NO: 118105 - DNA, 581 bp, Homo sapiens
  Payload ID: 3110
  Gene Symbol: C11orf80
  Gene Name: chromosome 11 open reading frame 80
  ENST ID: ENST00000526260
  CDS Start-End: 1-326
aaatacagtccatactgcccggaatctctgcaaagctgacttggacttcagaggaaggcagctattctcaggatatgacaggggtaacacccttccagatgatttttgaggttgatgaaaagcccagaaccttgatgacagattgtctggttataaagcattttttacgtaaaatcatcatggtgcaccctaaggtcagatttcatttcagtgtaaaggtaaatggaatcctctccacagagatctttggggtggagaatgaacccactttgaaccttgggaatggaattgctcttttggtcgactcccagcattatgtgaggtgaaggcgtaaagccttgttgtccctctgcatgttttactctcctctcgagtacgaattagaccaaattttggtacaattgaatcacactgcagcagaattcaccctgtgctaggacatccagtaatgcttttcatccctgaagacgtggctggcatggacttgttgggagaactgatactgactccagcagctgcactgtgccccagcccaaaggtttcttccaaccagcttaacaggatttcttcagtttccatat

SEQ ID NO: 118106 - DNA, 810 bp, Homo sapiens
  Payload ID: 3110
  Gene Symbol: C11orf80
  Gene Name: chromosome 11 open reading frame 80
  ENST ID: ENST00000531415
  CDS Start-End: 1-632
gagtctatactttgctcacaactcatctcaatgccatccttgtggagagccacagtgtagtgcaaggttccatccaattcactgtggacaaggtcttggagcaacatcaccaggctgccaaggctcagcagaaactacaggcctcactctcagtggctgtgaactccatcatgagtattctgactggaagcactaggagcagcttccgaaagatgtgtctccagacccttcaagcagctgacacacaagagttcaggaccaaactgcacaaagtatttcgtgagatcacccaacaccaatttcttcaccactgctcatgtgaggtgaagcagctaaccctagaaaaaaaggactcagcccagggcactgaggacgcacctgataacagcagcctggagctcctagcagtgcttaaacagccttcccagcccacagcagcaggggtacagcagctctcacattcagtcactagcagagatgccagataccagcgggcaagcagaaaacaagaggctcaagaggggcagcccccgcatagaggagatgcgagctctgcgctctgccagggccccgagcccgtcagaggccgccccgcgccgcccggaagccaccgcggcccccctcactcctagaggaagggagcaccgcgaggctcacggcagggccctggcgccgggcagggcgagcctcggaagccgcctggaggacgtgctgtggctgcaggaggtctccaacctgtcagagtggctgagtcccagccctgggccctgagccgggtccccttccgcaagcgcccaccgatccggaggc

SEQ ID NO: 118107 - DNA, 450 bp, Homo sapiens
  Payload ID: 3110
  Gene Symbol: C11orf80
  Gene Name: chromosome 11 open reading frame 80
  ENST ID: ENST00000532089
  CDS Start-End: 1-450
aaatacagtccatactgcccggaatctctgcaaagctgacttggacttcagaggaaggcagctattctcaggatatgacaggggtaacacccttccagatgatttttgaggttgatgaaaagcccagaaccttgatgacagattgtctggttataaagcattttttacgtaaaatcatcatggtgcaccctaaggtcagatttcatttcagtgtaaaggtaaatggaatcctctccacagagatctttggtagaccaaattttggtacaattgaatcacactgcagcagaattcaccctgtgctaggacatccagtaatgcttttcatccctgaagacgtggctggcatggacttgttgggagaactgatactgactccagcagctgcactgtgccccagcccaaaggtttcttccaaccagcttaacaggatttcttcagtttccatat

SEQ ID NO: 118108 - DNA, 1821 bp, Homo sapiens
  Payload ID: 3110
  Gene Symbol: C11orf80
  Gene Name: chromosome 11 open reading frame 80
  ENST ID: ENST00000525449
  CDS Start-End: 274-1731
ataattcactggaagtgtgacatagatgtatcaaagggagcattgctagaagggcagctagtgatttccatagaaggattaaattctaagcaccaggcaaatgctcttcattgtgtaacaactagatggagtctcactctgttacccaggccggagtgcagtggcgcagtctcggctcactgcaacctccacctcccaggttcaagtgattctcatgcctcagtcccccgagtagctgggattacagatgcccaccaccatgcctggctaattatggttgcttctgcaggaagcctttttggtggcatggtcctcaagaagttcctaaaagaaatacagtccatactgcccggaatctctgcaaagctgacttggacttcagaggaaggcagctattctcaggatatgacaggggtaacacccttccagatgatttttgaggttgatgaaaagcccagaaccttgatgacagattgtctggttataaagcattttttacgtaaaatcatcatggtgcaccctaaggtcagatttcatttcagtgtaaaggtaaatggaatcctctccacagagatctttggggtggagaatgaacccactttgaaccttgggaatggaattgctcttttggtcgactcccagcattatgtgagaccaaattttggtacaattgaatcacactgcagcagaattcaccctgtgctaggacatccagtaatgcttttcatccctgaagacgtggctggcatggacttgttgggagaactgatactgactccagcagctgcactgtgccccagcccaaaggtttcttccaaccagcttaacaggatttcttcagtttccatatttctatatggacctttgggtctgcctctgatattgtcaacttgggagcagccgatgactactttcttcaaagatacctcttctttagttgactggaaaaaataccatttgtgtatgatacccaatttggatctcaatttggatagagatttggtgcttccagatgtgagttatcaggtggaatccagtgaggaggatcagtctcagactatggatcctcaaggacaaactctgctgctttttctctttgtggatttccacagtgcatttccagtccagcaaatggaaatctggggagtctatactttgctcacaactcatctcaatgccatccttgtggagagccacagtgtagtgcaaggttccatccaattcactgtggacaaggtcttggagcaacatcaccaggctgccaaggcagctgacacacaagagttcaggaccaaactgcacaaagtatttcgtgagatcacccaacaccaatttcttcaccactgctcatgtgaggtgaagcagcagctaaccctagaaaaaaaggactcagcccagggcactgaggacgcacctgataacagcagcctggagctcctagcagataccagcgggcaagcagaaaacaagaggctcaagaggggcagcccccgcatagaggagatgcgagctctgcgctctgccagggccccgagcccgtcagaggccgccccgcgccgcccggaagccaccgcggcccccctcactcctagaggaagggagcaccgcgaggctcacggcagggccctggcgccgggcagggcgagcctcggaagccgcctggaggacgtgctgtggctgcaggaggtctccaacctgtcagagtggctgagtcccagccctgggccctgagccgggtccccttccgcaagcgcccaccgatccggaggctgcgggcagccgttatcccgtggtttaataaagctgccgcgcgctcaccaa

SEQ ID NO: 118109 - DNA, 1948 bp, Homo sapiens
  Payload ID: 3110
  Gene Symbol: C11orf80
  Gene Name: chromosome 11 open reading frame 80
  ENST ID: ENST00000532565
  CDS Start-End: 513-1892
ggaggggacggccgtggccgtgttcgagattttgagatttttaataattcactggaagtgtgacatagatgtatcaaagggagcattgctagaagggcagctagtgatttccatagaaggattaaattctaagcaccaggcaaatgctcttcattgtgtaacaactagatggagtctcactctgttacccaggccggagtgcagtggcgcagtctcggctcactgcaacctccacctcccaggttcaagtgattctcatgcctcagtcccccgagtagctgggattacagatgcccaccaccatgcctggctaattatggttgcttctgcaggaagcctttttggtggcatggtcctcaagaagttcctaaaagaaatacagtccatactgcccggaatctctgcaaagctgacttggacttcagaggaaggcagctattctcaggatatgacaggggtaacacccttccagatgatttttgaggcaggttgatgaaaagcccagaaccttgatgacagattgtctggttataaagcattttttacgtaaaatcatcatggtgcaccctaaggtcagatttcatttcagtgtaaaggtaaatggaatcctctccacagagatctttggggtggagaatgaacccactttgaaccttgggaatggaattgctcttttggtcgactcccagcattatgtgagaccaaattttggtacaattgaatcacactgcagcagaattcaccctgtgctaggacatccagtaatgcttttcatccctgaagacgtggctggcatggacttgttgggagaactgatactgactccagcagctgcactgtgccccagcccaaaggtttcttccaaccagcttaacaggatttcttcacaactacacatatttctatatggacctttgggtctgcctctgatattgtcaacttgggagcagccgatgactactttcttcaaagatacctcttctttagttgactggaaaaaataccatttgtgtatgatacccaatttggatctcaatttggatagagatttggtgcttccagatgtgagttatcaggtggaatccagtgaggaggatcagtctcagactatggatcctcaaggacaaactctgctgctttttctctttgtggatttccacagtgcatttccagtccagcaaatggaaatctggggagtctatactttgctcacaactcatctcaatgccatccttgtggagagccacagtgtagtgcaaggttccatccaattcactgtggacaaggtcttggagcaacatcaccaggctgccaaggctcagcagaaactacaggcctcactctcagtggctgtgaactccatcatgagtattctgactggaagcactaggagcagcttccgaaagatgtgtctccagacccttcaagcagctgacacacaagagttcaggaccaaactgcacaaagtatttcgtgagatcacccaacaccaatttcttcaccactgctcatgtgaggtgaagcagcagctaaccctagaaaaaaaggactcagcccagggcactgaggacgcacctgataacagcagcctggagctcctagcagataccagcgggcaagcagaaaacaagaggctcaagaggggcagcccccgcatagaggagatgcgagctctgcgctctgccagggccccgagcccgtcagaggccgccccgcgccgcccggaagccaccgcggcccccctcactcctagaggaagggagcaccgcgaggctcacggcagggccctggcgccgggcagggcgagcctcggaagccgcctggaggacgtgctgtggctgcaggaggtctccaacctgtcagagtggctgagtcccagccctgggccctgagccgggtccccttccgcaagcgcccaccgatccggaggctgcgggcagccgttatc

SEQ ID NO: 118110 - DNA, 548 bp, Homo sapiens
  Payload ID: 3110
  Gene Symbol: C11orf80
  Gene Name: chromosome 11 open reading frame 80
  ENST ID: ENST00000524551
  CDS Start-End: 161-548
gctcagaggctctaggtggctcccggcggcggttcgcggtctcggggccctgcagcgtcgagtgcgcaggcgcggcgggcagttgcttctgcaggaagcctttttggtggcatggtcctcaagaagttcctaaaaggttgatgaaaagcccagaaccttgatgacagattgtctggttataaagcattttttacgtaaaatcatcatggtgcaccctaaggtcagatttcatttcagtgtaaaggtaaatggaatcctctccacagagatctttggggtggagaatgaacccactttgaaccttgggaatggaattgctcttttggtcgactcccagcattatgtgagtagaccaaattttggtacaattgaatcacactgcagcagaattcaccctgtgctaggacatccagtaatgcttttcatccctgaagacgtggctggcatggacttgttgggagaactgatactgactccagcagctgcactgtgccccagcccaaaggtttcttccaaccagcttaacaggatttcttcagtttccatat

SEQ ID NO: 118111 - DNA, 1616 bp, Homo sapiens
  Payload ID: 3110
  Gene Symbol: C11orf80
  Gene Name: chromosome 11 open reading frame 80
  ENST ID: ENST00000532727
  CDS Start-End: 13-156
ctttttggtggcatggtcctcaagaagttcctaaaagaaatacagtccatactgcccggaatctctgcaaagctgacttggacttcagaggaaggcagctattctcaggatatgacaggggtaacacccttccagatgatttttgaggcaggttgatgaaaagcccagaaccttgatgacagattgtctggttataaagcattttttacgtaaaatcatcatggtgcaccctaaggtcagatttcatttcagtgtaaaggtaaatggaatcctctccacagagatctttggggtggagaatgaacccactttgaaccttgggaatggaattgctcttttggtcgactcccagcattatgtgagtagaccaaattttggtacaattgaatcacactgcagcagaattcaccctgtgctaggacatccagtaatgcttttcatccctgaagacgtggctggcatggacttgttgggagaactgatactgactccagcagctgcactgtgccccagcccaaaggtttcttccaaccagcttaacaggatttcttcacaactacacatatttctatatggacctttgggtctgcctctgatattgtcaacttgggagcagccgatgactactttcttcaaagatacctcttctttagttgactggaaaaaataccatttgtgtatgatacccaatttggatctcaatttggatagagatttggtgcttccagatgtgagttatcaggtggaatccagtgaggaggatcagtctcagactatggatcctcaaggacaaactctgctgctttttctctttgtggatttccacagtgcatttccagtccagcaaatggaaatctggggagtctatactttgctcacaactcatctcaatgccatccttgtggagagccacagtgtagtgcaaggttccatccaattcactgtggacaaggtcttggagcaacatcaccaggctgccaaggctcagcagaaactacaggcctcactctcagtggctgtgaactccatcatgagtattctgactggaagcactaggagcagcttccgaaagatgtgtctccagacccttcaagcagctgacacacaagagttcaggaccaaactgcacaaagtatttcgtgagatcacccaacaccaatttcttcaccactgctcatgtgaggtgaagcagcagctaaccctagaaaaaaaggactcagcccagggcactgaggacgcacctgataacagcagcctggagctcctagcagataccagcgggcaagcagaaaacaagaggctcaagaggggcagcccccgcatagaggagatgcgagctctgcgctctgccagggccccgagcccgtcagaggccgccccgcgccgcccggaagccaccgcggcccccctcactcctagaggaagggagcaccgcgaggctcacggcagggccctggcgccgggcagggcgagcctcggaagccgcctggaggacgtgctgtggctgcaggaggtctccaacctgtcagagtggctgagtcccagccctgggccctgagccgggtccccttccgcaagcgcccaccgatccggaggctgcgggcagccgttatccc

SEQ ID NO: 118112 - DNA, 367 bp, Homo sapiens
  Payload ID: 3110
  Gene Symbol: C11orf80
  Gene Name: chromosome 11 open reading frame 80
  ENST ID: ENST00000531400
  CDS Start-End: 130-332
ggcggcggcggcggcggcggcggcgggcgggtacccttcgactgggcgttgccgctgttccctgcgcggcatggaggggacggccgtggccgtgttcgagttgcttctgcaggaagcctttttggtggcatggtcctcaagaagttcctaaaagaaatacagtccatactgcccggaatctctgcaaagctgacttggacttcagaggaaggcagctattctcaggatatgacaggggtaacacccttccagatgatttttgaggtcagatttcatttcagtgtaaaggtaaatggaatcctctccacagagatctttggggtggagaatgaacccactttgaaccttgggaatggaattgctcttt

SEQ ID NO: 118113 - DNA, 583 bp, Homo sapiens
  Payload ID: 3110
  Gene Symbol: C11orf80
  Gene Name: chromosome 11 open reading frame 80
  ENST ID: ENST00000534325
  CDS Start-End: 538-583
gattagggccaagggccgcatctcgccgccaccgtgggaaactatctttgagaggagggaggagtcgtggcctggcctcattcccgctcacctccagccttggccgcctctcgcgggctcttccccgccccgaacctcccacctgcgggcccactggcacccgcggcgctcagaggctctaggtggctcccggcggcggttcgcggtctcggggccctgcagcgtcgagtgcgcaggcgcggcgggcagattttgagatttttaataattcactggaagtgtgacatagatgtatcaaagggagcattgctagaagggcagctagtgatttccatagaaggattaaattctaagcaccaggcaaatgctcttcattgtgtaacaactagatggagtctcactctgttacccaggccggagtgcagtggcgcagtctcggctcactgcaacctccacctcccaggttcaagtgattctcatgcctcagtcccccgagtagctgggattacagatgcccaccaccatgcctggctaattatggttgcttctgcaggaagcctttttggtggcatggtcctcaaga

SEQ ID NO: 118114 - DNA, 1786 bp, Homo sapiens
  Payload ID: 3110
  Gene Symbol: C11orf80
  Gene Name: chromosome 11 open reading frame 80
  ENST ID: ENST00000540737
  CDS Start-End: 163-1698
actggcggagttccaagcccgggctgaggagggggcggcggcggcggcggcggcggcgggcgggtacccttcgactgggcgttgccgctgttccctgcgcggcatggaggggacggccgtggccgtgttcgagttgcttctgcaggaagcctttttggtggcatggtcctcaagaagttcctaaaagaaatacagtccatactgcccggaatctctgcaaagctgacttggacttcagaggaaggcagctattctcaggatatgacaggggtaacacccttccagatgatttttgaggttgatgaaaagcccagaaccttgatgacagattgtctggttataaagcattttttacgtaaaatcatcatggtgcaccctaaggtcagatttcatttcagtgtaaaggtaaatggaatcctctccacagagatctttggggtggagaatgaacccactttgaaccttgggaatggaattgctcttttggtcgactcccagcattatgtgagtagaccaaattttggtacaattgaatcacactgcagcagaattcaccctgtgctaggacatccagtaatgcttttcatccctgaagacgtggctggcatggacttgttgggagaactgatactgactccagcagctgcactgtgccccagcccaaaggtttcttccaaccagcttaacaggatttcttcagtttccatatttctatatggacctttgggtctgcctctgatattgtcaacttgggagcagccgatgactactttcttcaaagatacctcttctttagttgactggaaaaaataccatttgtgtatgatacccaatttggatctcaatttggatagagatttggtgcttccagatgtgagttatcaggtggaatccagtgaggaggatcagtctcagactatggatcctcaaggacaaactctgctgctttttctctttgtggatttccacagtgcatttccagtccagcaaatggaaatctggggagtctatactttgctcacaactcatctcaatgccatccttgtggagagccacagtgtagtgcaaggttccatccaattcactgtggacaaggtcttggagcaacatcaccaggctgccaaggctcagcagaaactacaggcctcactctcagtggctgtgaactccatcatgagtattctgactggaagcactaggagcagcttccgaaagatgtgtctccagacccttcaagcagctgacacacaagagttcaggaccaaactgcacaaagtatttcgtgagatcacccaacaccaatttcttcaccactgctcatgtgaggtgaagcagctaaccctagaaaaaaaggactcagcccagggcactgaggacgcacctgataacagcagcctggagctcctagcagataccagcgggcaagcagaaaacaagaggctcaagaggggcagcccccgcatagaggagatgcgagctctgcgctctgccagggccccgagcccgtcagaggccgccccgcgccgcccggaagccaccgcggcccccctcactcctagaggaagggagcaccgcgaggctcacggcagggccctggcgccgggcagggcgagcctcggaagccgcctggaggacgtgctgtggctgcaggaggtctccaacctgtcagagtggctgagtcccagccctgggccctgagccgggtccccttccgcaagcgcccaccgatccggaggctgcgggcagccgttatcccgtggtttaataaagctgccgcgcgctcacc

SEQ ID NO: 118115 - DNA, 2024 bp, Homo sapiens
  Payload ID: 3111
  Gene Symbol: C11orf84
  Gene Name: chromosome 11 open reading frame 84
  Uniprot ID: Q9BUA3
  ENST ID: ENST00000294244
  CDS Start-End: 300-1445
ggctggccggccgggcgggcgccgacaatgagcctccataaaagggagcggcggggggcaggggccccggattgagccctccccgcccgggctcccgacgcgccgaggtctcggggaggcccggacgcgccggtcgcaggcccggccggcgagcggcgggcgggcggcggggagggggctgcgcggggcgggcggcgggcccggcgctattccggccaggaggcgggaggcggttgccggctgcgcgccgaagcctgcgcgccagtcctccggccactgctatcgcccacggccgcaccatggccctaaaggccgagggcgccgcactcgactgcttcgaggtgacgctgaaatgcgaggaaggggaggacgaggaggaggccatggtggtggccgtaattccgcggcccgagccgatgctcagagtgacccaacaggagaagaccccaccgcctagacccagcccgctagaggcaggcagtgatggctgtgaggagccgaagcagcaggtgtcttgggagcaggagttcctggtgggcagcagcccaggaggcagcgggcgggcactgtgcatggtgtgtggcgctgagatccgggcaccctcggccgacacagctcgctcgcacatcttggagcagcaccctcacaccttggacctgagcccttctgagaagagcaatatcctggaggcctggagtgaaggggtggccctcttgcaagacgtgagagctgagcagccgtccccacccaactcagactcgggccaggatgcccacccagacccagacgccaacccagacgctgccagaatgccagccgaaatcgtcgttctccttgactctgaggataacccatccctccctaaaaggagccggcccaggggactccgccccctcgagcttcctgctgtccctgccacagagccaggaaataagaagccccgtggtcagagatggaaggaacccccaggggaagagccagtcagaaagaaaagaggcagacctatgaccaaaaacctggaccctgacccagagcccccatcgccagactcgcccacggagactttcgcagcaccagccgaggtccgacacttcactgacggcagcttccccgccggcttcgtcttgcagctcttctcccacacccagctcaggggcccagacagcaaggactcacccaaagacagggaagtggcagaaggaggccttccccgggcggagagcccctctccagctccccctccggggctccgcgggacactggatctccaggttatccgcgtgcggatggaggagcccccagcggtcagcctcctgcaagactggtccaggcacccccagggcaccaagcgtgtgggagcaggtgacacctcagactggcccacagttctgtcagaatccagcaccactgtggcagggaagccggaaaaagggaatggagtgtaaattcttgctttcctggggagggagggagggatgaggcagcgtcccccagtggcttataactcagagctgcctggctcacccacctggtggagagagtagaaacaggtgccagggcaggagggggctggggcagcatccactgttatttcggggcactggaaagtgtctgttcctggccaggcctgaggtcggcgagggtggctgaggctgttgtgcagtagggcactgggcctgtggagaacacctaccccagtccttcgctgacccccacctctgtttgtcccccatgacctcctcccaccctccccctgctccccaccattctcccttggcacagtgccttacacaagagtggtcataagggggtttgaactgagtcccactacctcgggggacacctctcctccccacttgttcaggcttctaaaccaggaggcctccattacctcttcctgtcccacccctgcagaggcctgaagctgggcctgggcaccccattcactcccgttctcatttacatctgttttcctgttgtatatatcacctttgttgacaataaattatttttttttattaaga

SEQ ID NO: 118116 - DNA, 729 bp, Homo sapiens
  Payload ID: 3111
  Gene Symbol: C11orf84
  Gene Name: chromosome 11 open reading frame 84
  ENST ID: ENST00000535820
  CDS Start-End: 1-88
caaagacagggaagtggcagaaggaggccttccccgggcggagagcccctctccaggcctcaccccttcacgtagatcacagttttaactgtctcaagtttcagcttgagtcacattccagtcctggctccctgagaccgagtgtgctgcttggacttgagcgtgtcccgagtctcctggtcctctccggtggatccctgctctaaatggctgacctcttccactgtctaatgggtcttctgatttcattctcgaaagggagccctcatttcaagtcctggggtaccctgtgcgcaaactccatctatctggagtggtgagtagatgagaagagaatccctgagattctaggtttctttggggtgagtgggcaaagtctgagaggaaggggcttcagcaggctgcttgagtgatctgagggggcggaggcaattgtagggtgttgtcagcagtggcagccttcgtggaggttggagatgcctgggaaaccatagaggatacctcactggtacacaagtgttcctggagcctgtgcccgagggaggcaccctgggagatggcatgagtgagacagcctttgtcccccaaaattctgtgtccaggtatataggctggaggcagtaaatctttaaaaaccaggggcccccgtggcggttctttgcggagcagaggctctggacctgtggtttcagacgatctcacgaacccaaagcttggacagatttctca

SEQ ID NO: 118117 - DNA, 554 bp, Homo sapiens
  Payload ID: 3111
  Gene Symbol: C11orf84
  Gene Name: chromosome 11 open reading frame 84
  ENST ID: ENST00000540893
  CDS Start-End: 1-339
gagccagtcagaaagaaaagaggcagacctatgaccaaaaacctggaccctgacccagagcccccatcgccagactcgcccacggagactttcgcagcaccagccgaggtccgacacttcactgacggcagcttccccgccggcttcgtcttgcagctcttctcccacacccagctcaggggcccagacagcaaggactcacccaaagacagggaagtggcagaaggaggccttccccgggcggagagcccctctccagggagccctcatttcaagtcctggggtaccctgtgcgcaaactccatctatctggagtggtatataggctggaggcagtaaatctttaaaaaccaggggcccccgtggcggttctttgcggagcagaggctctggacctgtggtttcagacgatctcacgaacccaaagcttggacagatttctcagaaacctgtgaggcttcgaccaaaatgtctctactttctgtgttgttatgtacgtattgaagttctctgaagactttatttaaataaagatcctgccactttaaaaaaaa

SEQ ID NO: 118118 - DNA, 843 bp, Homo sapiens
  Payload ID: 3112
  Gene Symbol: C11orf85
  Gene Name: chromosome 11 open reading frame 85
  Uniprot ID: Q3KP22
  ENST ID: ENST00000301896
  CDS Start-End: 75-725
tggggctgagagacgaccttaagtggacagagattctagaacaggagaaataaaacagctatcgtttgggagcaatgagtttaaaaccctttacctacccgtttccagagacgaggtttcttcatgcaggacccaatgtgtataaattcaaaatcagatatgggaagagtatcagaggagaagagatagaaaataaggaagtcatcacccaggagctggaggattctgtccgcgtggtcttgggaaacttggacaatcttcagccctttgctacagaacacttcattgtatttccctataaaagcaaatgggagagagtttcccacctgaaattcaaacatggggaaattatcttgatcccctacccatttgtttttactctatatgtggagatgaaatggttccatgaaaacctgtcacctgggaaaccaataagtgacagtcctcttgggttggtcccagttgagaagaaagcagtaggagctgtgatgaggaaacgaaaacacatggacgagcccagctcccccagcaggccagggctggacagaatagggaaagaaaaacccaacaaggattgcaggagactctggcctctgatatcactgatgtccagaaacaagattctgagtggggacacagcctgccagggcgaattgtcccacccctgcagcacaactcacctccacctaaggagcgagcagccaccggcttctttgggtttctaagctctctcttcccgtttcgatatttcttcaggaagagcagccactcttgagccttccaaatgcagcgctggaaagaggatcatctcttgtagtgactcctcccgagccattcttcctc

SEQ ID NO: 118119 - DNA, 838 bp, Homo sapiens
  Payload ID: 3112
  Gene Symbol: C11orf85
  Gene Name: chromosome 11 open reading frame 85
  Uniprot ID: Q3KP22
  ENST ID: ENST00000432175
  CDS Start-End: 67-717
agagacgaccttaagtggacagagattctagaacaggagaaataaaacagctatcgtttgggagcaatgagtttaaaaccctttacctacccgtttccagagacgaggtttcttcatgcaggacccaatgtgtataaattcaaaatcagatatgggaagagtatcagaggagaagagatagaaaataaggaagtcatcacccaggagctggaggattctgtccgcgtggtcttgggaaacttggacaatcttcagccctttgctacagaacacttcattgtatttccctataaaagcaaatgggagagagtttcccacctgaaattcaaacatggggaaattatcttgatcccctacccatttgtttttactctatatgtggagatgaaatggttccatgaaaacctgtcacctgggaaaccaataagtgacagtcctcttgggttggtcccagttgagaagaaagcagtaggagctgtgatgaggaaacgaaaacacatggacgagcccagctcccccagcaggccagggctggacagaatagggaaagaaaaacccaacaaggattgcaggagactctggcctctgatatcactgatgtccagaaacaagattctgagtggggacacagcctgccagggcgaattgtcccacccctgcagcacaactcacctccacctaaggagcgagcagccaccggcttctttgggtttctaagctctctcttcccgtttcgatatttcttcaggaagagcagccactcttgagccttccaaatgcagcgctggaaagaggatcatctcttgtagtgactcctcccgagccattcttcctccaa

SEQ ID NO: 118120 - DNA, 2046 bp, Homo sapiens
  Payload ID: 3112
  Gene Symbol: C11orf85
  Gene Name: chromosome 11 open reading frame 85
  ENST ID: ENST00000530735
  CDS Start-End: 274-618
ctggtgggtgcgcggcacgagccccgaagttgcttaggagctggcgagccagtccctcaaaacgacttcgttcgaggttggcgcccgcctttttcagagagcacttcttagtgggtattccgtccggggccacttttctgaggccgaaggacccctagtcagtgtgtgagacatagcctggccgagcctgggaaccacctggggctgagagacgaccttaagtggacagagattctagaacaggagaaataaaacagctatcgtttgggagcaatgagtttaaaaccctttacctacccgtttccagagacgaggtttcttcatgcaggacccaatgtgtataaattcaaaatcagatatgggaagagtatcagaggagaagagatagaaaataaggaagtcatcacccaggagctggaggtagggaaagaagcatacgacttctggaaaagttactctttaaggatgcatccacattcaggttttaattatttcctacaaactgagtcacaacctccacttgataacttggcttcctcctgctacatctcctttgcaaaggaactttatgtttttccatgggaatttaaagcctgtattctttctcagttttcctagttgaaatgtcagcacctttgaggctgagagctttttgttttcaccagtttccagccttgggcagctctcttttgttgcagctggcatagagaaagattccggaggactgcctccttccagggctctgggaaacctcaccatcccaaccactgcctggtacttgacgttcaggaaactcgactgtaaatacacagacaaggctgctgtgtcttcatttaaattggcaacatttgcaattgccttattccgacttcattttcattcctttctacccggttcctctagctttaggttttcctacagaagaagactgagcaggtgatcaactttacaaattggtggaagcaatggacaaggagttagagttctgggggttggccctggattccagtcctggcatagccaccacttagctgtgtgaccgttggcaaatcatatatcaacttggatcttaattgcctcatttggaaaatgagaggtctaaactagcttttcctcttctgacttcacaattcggattctgtccgcgtggtcttgggaaacttggacaatcttcagccctttgctacagaacacttcattgtatttccctataaaagcaaatgggagagagtttcccacctgaaattcaaacatggggaaattatcttgatcccctacccatttgtttttactctatatgtggagatgaaatggttccatgaaaacctgtcacctgggaaaccaataagtgacagtcctcttgggttggtcccagttgagaagaaagcagtaggagctgtgatgaggaaacgaaaacacatggacgagcccagctcccccagcaggccagggctggacagggccaagatagggacttccagccaaggccccagcaaaaagaagccccctgtggaaaccaggagaaatagggaaagaaaaacccaacaaggattgcaggagactctggcctctgatatcactgatgtccagaaacaagattctgagtggggacacagcctgccagggcgaattgtcccacccctgcagcacaactcacctccacctaaggagcgagcagccaccggcttctttgggtttctaagctctctcttcccgtttcgatatttcttcaggaagagcagccactcttgagccttccaaatgcagcgctggaaagaggatcatctcttgtagtgactcctcccgagccattcttcctccaactctatccttttcttatgacacttcagtcgtggggaatgaggtccccatgctgagtcctctgtggttttatcgtgtcctttgcccctttataatagattttttcccccaatttaaaacattaagaatggaactttctaaaatgttcatgtcctgagggccggtttaggccttttgtcttcggcacttaggatcctaatgacaataaattatttatgaagagtt

SEQ ID NO: 118121 - DNA, 1037 bp, Homo sapiens
  Payload ID: 3112
  Gene Symbol: C11orf85
  Gene Name: chromosome 11 open reading frame 85
  ENST ID: ENST00000530444
  CDS Start-End: 212-742
cgacttcgttcgaggttggcgcccgcctttttcagagagcacttcttagtgggtattccgtccggggccacttttctgaggccgaaggacccctagtcagtgtgtgagacatagcctggccgagcctgggaaccacctggggctgagagacgaccttaagtggacagagattctagaacaggagaaataaaacagctatcgtttgggagcaatgagtttaaaaccctttacctacccgtttccagagacgaggtttcttcatgcaggacccaatgtgtataaattcaaaatcagatatgggaagagtatcagaggagaagagatagaaaataaggaagtcatcacccaggagctggaggtcccagttgagaagaaagcagtaggagctgtgatgaggaaacgaaaacacatggacgagcccagctcccccagcaggccagggctggacagggccaagatagggacttccagccaaggccccagcaaaaagaagccccctgtggaaaccaggagaaatagggaaagaaaaacccaacaaggattgcaggagactctggcctctgatatcactgatgtccagaaacaagattctgagtggggacacagcctgccagggcgaattgtcccacccctgcagcacaactcacctccacctaaggagcgagcagccaccggcttctttgggtttctaagctctctcttcccgtttcgatatttcttcaggaagagcagccactcttgagccttccaaatgcagcgctggaaagaggatcatctcttgtagtgactcctcccgagccattcttcctccaactctatccttttcttatgacacttcagtcgtggggaatgaggtccccatgctgagtcctctgtggttttatcgtgtcctttgcccctttataatagattttttcccccaatttaaaacattaagaatggaactttctaaaatgttcatgtcctgagggccggtttaggccttttgtcttcggcacttaggatcctaatgacaataaattatttatgaagagtta

SEQ ID NO: 118122 - DNA, 333 bp, Homo sapiens
  Payload ID: 3112
  Gene Symbol: C11orf85
  Gene Name: chromosome 11 open reading frame 85
  ENST ID: ENST00000532617
  CDS Start-End: 1-178
aatagggaaagaaaaacccaacaaggattgcaggagactctggcctctgatatcactgatgtccagaaacaagattctgagtggggacacagcctgccagggcgaattgtcccacccctgcagcacaactcacctccacctaaggagcgagcagccaccggcttctttgggtttctaagaagccatcatctgtcacatgccagagggtgcccctcaagagtgggagagcaggggctgaactgctgagttcccgctgcgtcctgttgctatgctgcctgcacccttggtggggagaagagaagaggtggactgctgcggaggacctggcaaaca

SEQ ID NO: 118123 - DNA, 1187 bp, Homo sapiens
  Payload ID: 3113
  Gene Symbol: C11orf86
  Gene Name: chromosome 11 open reading frame 86
  Uniprot ID: A6NJI1
  ENST ID: ENST00000308963
  CDS Start-End: 87-434
agatgggtggaggcactgggccacctcagagggccagtgtcttgctgaggggccggagcagtcctgtgcctgcagcctccggagccatgggaacagggctgcgaagtcagtccttgcgagagccccgaccctcctatggaaagctgcaggagccctgggggaggccccaggagggccaactccgcagggcgctaagcctcagacaggggcaagagaagtccaggtcccagggcctcgagagaggcacagaagggccagatgccactgcccaggagcgggtgccggggagcctgggggacacagagcagctgatccaagcccagcgaagaggcagccggtggtggctgaggcggtaccaacaggtaagaagaaggtgggagagctttgtcgccatcttccccagcgtgactctgagtcagccggcctccccgtagcccacactgggcaccatcagctaaagatgctggaagccatcgtggcccccttgctgtgcctggaccagcccaccgtgtctgctgacctacctcttcacagctctctggactttggctgggtggccctaggaggcttctgccaccagctcactggagtcgccacgtggctgccactcttagctctggcccttccactccagcactagctctctttgaagatcccagcagggtcaaaaagaagggggctcagctgtctgccctctgggcttgggtaggggccttggactatgattctatgaaggtttagaagaagcctgcccggaatgggggctgtggacgctcctgccccacacgaccagctgtcaacttccaggacggagcttgatgaagccagacccatggccgagaggctcacggacgttgcctggtcactgggccatgacccaactgcccttcttgtcagttgctgatggtgggccagggcgcaggtctccctcccagatggtgagccctctggggcaaggaccacagctgggtggccctcctggctgagcactctgtgctgaaaacctttgaacctcacggtgtcctgatgaaggaagcagaggaagtcttcctccctgtgtgacagagggggaaactgaggcccagagtggggaagggatttcttggttttgacatctccgaccccaccccaccccatccagtgtccagcactggagtcgaacacagtaataaagatgctgagaaaaa

SEQ ID NO: 118124 - DNA, 5884 bp, Homo sapiens
  Payload ID: 3114
  Gene Symbol: C11orf87
  Gene Name: chromosome 11 open reading frame 87
  Uniprot ID: Q6NUJ2
  ENST ID: ENST00000327419
  CDS Start-End: 404-997
gaagcggcggcgaaggcggcggcggcggcggcggcggcggcagcagcgcggctcggtctctggtccattcactccacgctttctgcagccgccactgcagccgcgcggcgggggctccctccttgcagccagccggcggtccagcctggtgcctctgcaaaggaaaggggagcgtggagacgtgttcgaggtggtatcggcgaggatctctcgggcgccgctcactccttggtcgccttgcttgccagcagttgctcccttagtccttggctcgctcgcacaccccctcccgctacagggagcagttttgggtggcgtgggctccgtcctcttcttggctggtaggaacggtgtgcccaagaggggaagcctagtgggcctggcccctcccagccccgcgccaatgagtgccagggcgccgaaggagctgaggctggcgttgccgccgtgtctcctcaaccggacctttgcttcccccaacgccagcggcagcggcaacacgggtgcccgcggcccaggcgcagtaggcagcggcacctgcatcacgcaggtgggacagcagctcttccagtccttctcctccacgctggtgctgattgtcctggttaccctcatcttctgcctcatcgtgctgtccctctccactttccacatccacaagcgtaggatgaagaagcggaagatgcagagggctcaggaggaatatgagcgggatcactgcagcggcagccgcggtggcggggggctgccccgacctggcaggcaggccccaacccacgcaaaggaaacccggctggagaggcagccccgggactctcccttctgcgccccttccaacgcctcgtcgttgtcctcttcgtcccctggcctcccgtgccagggtccctgtgctcctccgcctccaccgccagcctccagtccccaaggagcacacgcagcttcctcctgtttggacacagctggcgagggccttttgcaaacggtggtactgtcctgatcgtctagcccctctcgttccccgtcctcgtttccagcatctttgccacccttgcttttttccttcttccttccttttccattttcctctggcccctctttcctcttcctggtttccttacctgccctccccttactcttgtttctcctccgccgaggcactgtgcggtatttgtaaatattgggcgaggaaagtctcggaagaagaaataacgctgataataatactttattaatatttatagtaattattataatactaataacacaatccaagcgcatgacaaatcacataatttctaactgtcaatggaggatgcatcttcccattccaccccgcgctcccctcaattaggaggagaaaccgcacaagctaccaaatatataaaaggcattgattcccggagcaaagggaggggagggggcccggtaatgtacatagctgtcaagttaagatttagtttccttccttcccctctgacccctaagctttcacttttcctttagcttccctttcctccccattcccaccctcagccgggctcaggcaatagtatattataaagaaaatgtctacattaagcaccaggactgcaagaggccatagagaatagtccccggaaagtgtttatgacaggtacccctcgccagtccgcccatttctcaccctttggttaaccattacattttccaggacagagcatttaatttactttttaaaatgaccctcgctggccgagcataagtacgttaaaatctttaaatgagttttttttaaaaagctaacgctttcattccctgccccgcccccacccgtacacctttgacttgtgacattttcaggatttacaaaggatctgggagctgtccagccaggtctggtgctgaagtcgcctcaccgttctgattacttcctctagttgtgaaggcagaggaggggctgttttggaaagtgactattctggcttttggttgggttctttcttctttttctacaatcgagttagcgtgtactattggttttcttattattaaacattgcataagttaccttttttgtaaaaaaaaaaaagtattaggtgatgtgcagtactgaaagtgcagtatctaaccaactagaacgtttgttttatttttagaacaagtgcacctttgttatatatttagtatattggtaccaaatacagaaaaaaactatagttctgtactatgtcctccaaactgtatattattgttcttaatttccagctgttgatataatggttaccactggatgagaaattcagtggtgcagacctggcttctgctgtttccagaagtgttcttttgtaccttattctgtagtagactgttataaaaagatgacacacacgctttattttttcttttgcaaataatagaaaaaacacaaccacagaaacaaacaaataatggatgtgcaagaatgccatctattaaaaacatggttaatatttaaacagtgcctgtagttctccctgcatgcagttaccacctggaggcagtggtgtgtgtgcttgcttgtactgtatgtggttggggatgagactggtggggatgttgggcaatttggatgataagacatgcgaatttcaagaaaagctagatccagtaattacttataggatacaaatgtttgcagcttgtttgtttagttacaaatctgtgcctgcagcaaaagaaaggctctctttctcagtctgtcctaacttcactgaacatacaaaaatactgagaaaaaaagaaagtgagaaaataagataaatattttattattttctaatgccagacaaggccatctatgttagaaatggaagtagtctatagttatttaccaccttgtttcctttggttgaatgacagaagaagccagaagcatattacaatattaattatatgcagtgacatctcttcttggaaatcaagcctttgacagctattcaaatttttggaaaatgtatgaatgaaagtgatctgcaaaaagctctaccaagagagtccttactatcctgcagggtgtaaggcaacagtgcccctatgagcatccctctcccaagcaactcattgttctaaattgtctacttggtccagacatatgtgctcttatccagaggaaacattacctctaatatttttggtcatctattaaattgcccaagctcagtttgcatcttttataaaaataatttaataaacttaattttaatcacccataagataatcacctttcctgaagcacagaagatcatcattgaagcatgccatcttgtaatattaggaagaccaggtataatctttgggtacaatatattaaacaatgaaccagtttttctccagtgccttagtcacttcctagtaataggtaaaagagtgcattaactccctcaggccactagggaatcctgtagtgcatcagagttctacactgtacatcagaatgactaaggcactgtgaagaagaaagtccattgatttttgtagcttaccctcatccagtggtagctctttaataccttattacagaatgacttttggacttgaaatttgaatagaatcagggtcccagaagggagcttcatcatttccaatgagctccaataagtgcatggatattactttctttcccttatttggtgcactttctacagcgaataatttcccattttattaaagcaataagatgttctgttgtgagcagtgctggataacgattccattttcttggtgctgaagctacgcatatgttcttgccttatgaatcatagtatattcaaggcatgcaataataatccccttccaaggagcagcctgtacactctgtgggggtaattatgaaattgtcctacatcatttctccccaaaggaatgcaaggagcaagagaaataaaagcattatgtatattgtaaaacaaatgatctcaatacctctcaacgtgggcacacatctgtaatacacttttattgtgcaactttaaatgtgtgtgcctttctccattaattgactgtagtttaatatttttaatagtgctctgtgtaaagatgatgcagtttgtgagtcagatttcatactgagcttaatatactcaaaacctaagcttccagtggtattacttgtgatttttttatgagatagagaattacatgaaattctagtaatccagtttccacacaaaattatttcaataagcacatatccaagcaatttgtacagaccttgtttaaagcactgcttcttatagggctcaattggcagtctcaggagcttgggatgctaccaacagggcatttaggttttcatttttatgaaacaaaaggcaatctggaaatagctaaatttattttaaggattttattcactgatgtcccgtcaaactaaatgcttcaaacccctatagctacagcttaacttctgcacttgctattcagtattaataaggtggcatgcttgattcttattgtttttaaaaatgagaaaatttggagagagaatactattatgtcaacggtacaagactctgaatcttgaagatgtagatggatataatatttagactttatatacacccatagatatgtatttatatatgcatacgttttgtataaatttacaattgactttttgtattctcttttctgtcattacaagaatgagatggaaaccaaaatagttgttccatcctcttacccaaagaggatactgaaaagtccggtatgtgcatgcacttgtttctctggggtcaaatctgaatgactttctctttaataatgaaaggggagagtcctggttagcttggaaaattggtaattagataagcttcctttcctaggttagtgactcaaatgtagcaatgataataaagttatgaccatatcaatgtggtctaaatatctagatggaaagcaaaaatatccagaagaggtttagggccatctagaccacaaacctggaacctggattgtggtttgatttttttcattttcaacctatatgttgtgtagaaatacaatttatatctgcatagctaaaggtaaagtgaaaatatgaccattatctgtttagtttgagaaatcatttttggataatatggataaattagctttaagaaacttctttgacatctgacttttccaccatttctatctgtatcaattgtattaattagataatggttaaatttttatttttttatcatgtagacatatgctttcatgcttttctgtgggtgaaagttgaacaattgctagctgatattatgtggaagttacaggttaaagtagaaccagaaattttaatataatctgatcaggttccttagtcccattcccatgtgaatctgaactttgaatttgaatctgaaaggcctacttatttgggccattttttgttggaacttgtgattgtaactcacagatgtttcagttcatattagaataaattgcccaatctataagagagtgtttaatcattggaatgaatgtaaatctgattctgatttggttatttatttgataacatttgagaaacagctaatgtggcttgacatcaatacttattaatgtcttcaacctaataatacaattggtgtcatgtatgaatgcttagctgacaataagaatttaatcaactttatttggagacaatgacttatcaaggaggtcctacccatttgtggtagggatatttcccttacagttgtgattacaagggattgtttctatagagagatgaacagcaacaacagtgacaatgatgacaacagaaaaactgacttttgaacttgagtatatccaatagatagaagaaaaaagatattagaattcatggaaattttgttttgcttttctatcaataaaagagttttcttgttaa

SEQ ID NO: 118125 - DNA, 795 bp, Homo sapiens
  Payload ID: 3115
  Gene Symbol: C11orf88
  Gene Name: chromosome 11 open reading frame 88
  Uniprot ID: Q6PI97
  ENST ID: ENST00000332814
  CDS Start-End: 1-591
atggaaacgggacccagcgaagaacctagcggccgaaaagagtcccaggaaatgtgccccccgggattactggtatttgctggctcctcggaacaagatgccaacttggctaagcagttctggatctcggcgtcgatgtatccccctagcgaatctcagctggtgctgcgcagagacagcagtcagcgtctgccggtggcgcggcccaggaggagcagagggtctgaaaacagccactcctcgcagtcttttcaccttgcgagtaacaaaaatagagacatctttgccgaagccctaaagatacaggaatctgaggagaaagtaaagtatctccaaaagacaaggtctcactctgtcacccagaatgaagtgcagtggcatgatcatggctcactgcagcctcaactttctcggattcaggctaaaacaagagaagagattctccaactcttaagaaaacaaagagaagaaaggatctcgaaagaactgatttcccttccgtataaaccaaaagccaaagaacacaaagcaaagaaagtggtatcagagtcagataaagaggaccaagaagaagtcaaaactttggactaatttgcttgacacatggcagaggatggctcacttataccttcactttggaaacaaccttctcttagatcaggatcattgagatcactggcaacattatagtagacaaagaaatacaagttaaatacgcagacttccaggaattttaccagttagtgagtacttgtgttaaaataaagaaataaaggttaaatatgcaggcttcta

SEQ ID NO: 118126 - DNA, 712 bp, Homo sapiens
  Payload ID: 3115
  Gene Symbol: C11orf88
  Gene Name: chromosome 11 open reading frame 88
  Uniprot ID: Q6PI97
  ENST ID: ENST00000375618
  CDS Start-End: 1-510
atggaaacgggacccagcgaagaacctagcggccgaaaagagtcccaggaaatgtgccccccgggattactggtatttgctggctcctcggaacaagatgccaacttggctaagcagttctggatctcggcgtcgatgtatccccctagcgaatctcagctggtgctgcgcagagacagcagtcagcgtctgccggtggcgcggcccaggaggagcagagggtctgaaaacagccactcctcgcagtcttttcaccttgcgagtaacaaaaatagagacatctttgccgaagccctaaagatacaggaatctgaggagaaagtaaagtatctccaaaaggctaaaacaagagaagagattctccaactcttaagaaaacaaagagaagaaaggatctcgaaagaactgatttcccttccgtataaaccaaaagccaaagaacacaaagcaaagaaagtggtatcagagtcagataaagaggaccaagaagaagtcaaaactttggactaatttgcttgacacatggcagaggatggctcacttataccttcactttggaaacaaccttctcttagatcaggatcattgagatcactggcaacattatagtagacaaagaaatacaagttaaatacgcagacttccaggaattttaccagttagtgagtacttgtgttaaaataaagaaataaaggttaaatatgcaggcttc

SEQ ID NO: 118127 - DNA, 3099 bp, Homo sapiens
  Payload ID: 3115
  Gene Symbol: C11orf88
  Gene Name: chromosome 11 open reading frame 88
  ENST ID: ENST00000529167
  CDS Start-End: 1-537
atggaaacgggacccagcgaagaacctagcggccgaaaagagtcccaggaaatgtgccccccgggattactggtatttgctggctcctcggaacaagatgccaacttggctaagcagttctggatctcggcgtcgatgtatccccctagcgaatctcagctggtgctgcgcagagacagcagtcagcgtctgccggtggcgcggcccaggaggagcagagggtctgaaaacagccactcctcgcagtcttttcaccttgcgagtaacaaaaatagagacatctttgccgaagccctaaagatacaggaatctgaggagaaagtaaagtatctccaaaagacaaggtctcactctgtcacccagaatgaagtgcagtggcatgatcatggctcactgcagcctcaactttctcggattcaggctaaaacaagagaagagattctccaactcttaagaaaacaaagagaagaaaggatctcgaaagaactgatttcccttccgtataaaccaaaagccaaagaacacaaagcaaagtaagtttacctatgtcaaaaatattctctcacctttcaacttactgtgtagggaagcatttcttttttcttactttgccacttacccttaaatcttctagaaacccacccgtgtattacagatttcttgccttgaataaactttcttctccgcacagctattaaagcctgtgtacgaacttgtctgtctgtggaatatgcaagcataagttagtgcaaaatggaaagcagctcagccttgaagctctgtgcacattctctgtccctctcttctcaccctgggctatataatcacccatcatcatgccctcctgactccactgtcccctatccacacctggcccacttctttagtgaatcagcacgtgtttgtggctcaccagctctgagtgggctaaggttgctaaaactaagttcatgtagcaaactctcaatgataagggagtagccttatctctggaataatgttagagcaggactaggaacagtttaacagtctagaagagtttaaaggaaataagtaagcaacagttaatcactaacgcacccctaataagaaatctgtccgtttttgtattatgactaaaaaccaatgtggccaactcaacattaatatgacaaatatttattttcataccacattctgggagaaacagaaagtgatagaattttgatttttctctcattggtattgaggctaactgcctttaatgctgtcaaagtaacacccttaaggaagaaagaatatgtctactctaattttgtaaacttctggaaaaaaaaatagaaagatcatttaatcacctagctatattatctacacaatgctcagcaacctaatttctcgctttttagccagacgatttgacttagcttccacagatgaagcaaaactagcccaatcaagagtgacttaacgataccaatagtggatgaagactgctacttaaatagcatcaatagatacgtctgggtgccttagatttccgcatgtatttttacagaacattcctgctactacccatgctgactcacctaataataaaacatttcccggcttggacagataattctcttaataatttaaatgcttacttaattccttttgtaaactaactttgtcctacatcctgaagccttgaatttcattctattctgttgtgattatcttcctactattaacttcttctagctactcttctttttttttttgagacggagtctcgctctgtcacctaggctggagtgcagtggcgcgatctcagctcactgcaacctctgccacccaggttcaagcaattctcctgcctcagccttccaagtagctgggattacaggcgcccaccaccatgcccagctaatttttgtagttttagtagatacagggtttcaccgtcttggccaagctggtcttgaactcctgctcgtgatccacccatctcagcttcccaaagtgctgggattacaggcgtgagccaccatgcctggcctctagttactctttgtacattctttgggcaactaatcatgcattactctgtgcccatattttataattatttaactcttattattgctttcattatttaacttttctcatattttttgtattgtctgtaactatactgtaagctccatgaggaattgggtcacccaaagtgccagcatactgcttacatgttggacttcagaaaatatttataacaaaaagtttagttgaaaaatatcatgtaattcagtgttagccaatttagaaagtgatgtttgcatactatacattaatttataaactttaaaaactattctattagacacaattgtaaaataactcccctacatacacagactcccccttaccattcctccttcaacaggtcttcttagtataatccaggtccccttctgttagaaagaaggaaccggaaaatgtgttcatagtaaggttttagtagcaatatatttattatccatcccagaatatttgcattttaaaagaagtctgaataaataaaataatgggtaaaccaaagaaatcaattaccaatgatgaaatctcaggagtctgactctagaataaacaaaacatatttggggtaggagggctcctgtacctccaaaccacacttcacaatatcataaccacttctctcacatacaagtttatacttggttgcaaaacccaacacatagaatctacaacagtgaatttttattgggagaattttcaaaagttgttttcatgctacatcatgttcacaatggcggagttctgtgtattggaactgactgatattactaccaacaggaaagtggtatcagagtcagataaagaggaccaagaagaagtcaaaactttggactaatttgcttgacacatggcagaggatggctcacttataccttcactttggaaacaaccttctcttagatcaggatcattgagatcactggcaacattatagtagacaaagaaatacaagttaaatacgcagacttccaggaattttaccagttagtgagtacttgtgttaaaataaagaaataaaggttaaatatgcaggcttct

SEQ ID NO: 118128 - DNA, 624 bp, Homo sapiens
  Payload ID: 3115
  Gene Symbol: C11orf88
  Gene Name: chromosome 11 open reading frame 88
  ENST ID: ENST00000529661
  CDS Start-End: 1-90
aatagagacatctttgccgaagccctaaagatacaggaatctgaggagaaagtaaagtatctccaaaagattacaggcaccatagtgtagtagattttggagacaacaagatgggtttggaagcctaactctgccacttactatttgtgtgaccttgagcaagtggtttaactcctgggatgctcagcttcctcatatataaaaagagaaatgattttttttaatatcctcctcatagagtgatgtaaggctaaaacaagagaagagattctccaactcttaagaaaacaaagagaagaaaggatctcgaaagaactgatttcccttccgtataaaccaaaagccaaagaacacaaagcaaagaaagtggtatcagagtcagataaagaggaccaagaagaagtcaaaactttggactaatttgcttgacacatggcagaggatggctcacttataccttcactttggaaacaaccttctcttagatcaggatcattgagatcactggcaacattatagtagacaaagaaatacaagttaaatacgcagacttccaggaattttaccagttagtgagtacttgtgttaaaataaagaaataaaggttaaatatgcaggcttcta

SEQ ID NO: 118129 - DNA, 811 bp, Homo sapiens
  Payload ID: 3116
  Gene Symbol: C11orf91
  Gene Name: chromosome 11 open reading frame 91
  Uniprot ID: Q3C1V1
  ENST ID: ENST00000379011
  CDS Start-End: 62-643
cggggcctgagcgcgcgtctcccggcgcggggttcctcccacgcagaccctcattcaaacgatgccaaaggggcggcgcggcagccacagccccaccatgagccagcggtcggctccgcccctctatttcccgtccctgtacgaccgcggcatctcctcgtccccgctcagcgacttcaacatctggaagaagctcttcgtgccgctgaaggcgggcggggcgccagtgggcggggcggcgggggcccggtccctgtcccaggcgctccccgccccggcgcccccgcccccgccaccacccggcctgggtccctccagcgagcgcccctggccctcgccctggccctccggcctggcctccatcccctacgagcctctgcgcttcttctactcaccgccgccggggcctgaggtggttgcctcgcccctggtcccctgcccctcgacccccaggctcgcctctgcctcccacccggaggagctctgcgagctggagatccggattaaggagctggagttgctcaccatcactggggacggcttcgactcccagagctacacattcctgaaggcgctaaaagacgaaaagttacaaggactgaagaccaagcaacctggaaagaagtcggcctctctctcctgaggagctgcctaccagagcttgggcagccacctccttaggtgttagtgcttagataatgtgtcccatttgttgtcatttcaaagatggttattttctgttctgtatttaccgctgttcttgttgctaccagcatgtacttcacatacagtgcccactttgtgtggtaaa

SEQ ID NO: 118130 - DNA, 291 bp, Homo sapiens
  Payload ID: 3116
  Gene Symbol: C11orf91
  Gene Name: chromosome 11 open reading frame 91
  ENST ID: ENST00000531145
  CDS Start-End: 1-212
ggcctgaggtggttgcctcgcccctggtcccctgcccctcgacccccaggctcgcctctgcctcccacccggaggagctctgcgagctggagatccggattaaggagctggagttgctcaccatcactggggacggcttcgactcccagagcttcttagggctctggaccacgtgtgctgatgcgggcaggatccctcagcctacgagctgaatgactcctccctgttggaggacacattcctgaaggcgctaaaagacgaaaagttacaaggactgaagaccaagcaacc

SEQ ID NO: 118131 - DNA, 369 bp, Homo sapiens
  Payload ID: 3117
  Gene Symbol: C11orf94
  Gene Name: chromosome 11 open reading frame 94
  Uniprot ID: C9JXX5
  ENST ID: ENST00000449465
  CDS Start-End: 38-334
agcatagggacgacaggagccaggacccgtgtaggagatggttctcgccatgctgggggctctgcacccccgggctgggctcagcctcttcctccacctcatcctggcagtggcactgcttcgctcccagcctctgaggtctcagcggtctgttcctgaggcattttccgcccccctggaactctcgcagccactttccggcctggtggatgactatggcatcctccccaagcacccaaggccgcgagggcctcgacccctcctgtctagggcccagcagcgcaagcgggacgggcccgaccttgccgagtattactatgatgcacacctatgacccaaggccctcataaagataccatgtgtgacaaa

SEQ ID NO: 118132 - DNA, 827 bp, Homo sapiens
  Payload ID: 3118
  Gene Symbol: C11orf95
  Gene Name: chromosome 11 open reading frame 95
  ENST ID: ENST00000445014
  CDS Start-End: 1-827
caacagctgggatgcacacctggggctgggggcctgcggagaggccgagggcctgggggtccagggggctgaggaggaggaggaggaggaagaagaggaggaggaggagggggccggtgtcccagcttgcccgcccaagggcccaggcaaagccccagctggtgggggctgccggcgccagcggcgagggggcccagtggcaccccgggctcggcgtctgcgcctctcagcctcccggagggccgggggcagcagggggctgggggcccggcgcctggagaggaggctgaaggagtccctgcagaactggttccgggccgagtgtctcatggactatgacccgcgggggaaccggctggcctgggggggccagcccgaggcgctgtctgagctcacccagtccccaccaggcgatgacctcgccccccaggacctgaccggaaagagccgggactcggcctccgctgctggagccccctcctctcaggatctcagccccccagacgtaaaggaagaggctggctgggtccctgagaggcccgggcccgcagaggaggaggaggagctggaggagggcgagggcgagagggcgggggtcccgggccggtcgccgcggggccgcgcccaccgccgccacccccaggagcgctggcggctggagtacctcatggagttggacggcggccggcgcggcctggtgtgcggggtgtgcgggggcgcgctggcctcgctcaagatgagcaccatcgagcgccacatccgccggcgccacccgggctccacgcgcctcggcgggcctgtccaggccctcatcgcccgggagtgga

SEQ ID NO: 118133 - DNA, 5716 bp, Homo sapiens
  Payload ID: 3118
  Gene Symbol: C11orf95
  Gene Name: chromosome 11 open reading frame 95
  Uniprot ID: C9JLR9
  ENST ID: ENST00000433688
  CDS Start-End: 154-2190
gccgagcgagcagcctgccgtccgtgcggccggccgccccgtgcatgcgccccgcgccccggggccccgcgcagcgagcgctccgcgcgggctgccgccggccccgcggccccgcgccccgccgccccggggccccgctccgcagcgcagcgcatggagcccggcggggaccaccggagccggagcagcggcggcaggggcggccccgggccagcagtggcctcggcacggggccgacggctgccgcccgccggatcgagcggcagcgcggagccagaggaagacgaaggcgggcaagatcttcagctggaagggggtgccttggggtcctgggggagtgcccccctgccctcctccagggccaggggaccagcatcttcaggcaggaaatattcagaccactgtgaggcccgggcctcgaggcctggaaagagccgcatccctggccgtgaccaccggcgctactaccacgaccactggcggctggagtacctgatggacttcaaccctgcccggcacggcatggtgtgcatggtgtgcggcagctccctggccaccctcaagctcagcaccatcaagcgccacatccgccaaaagcacccctactccttgcattggagtccccgggagaaggaagtcatcagcaacagctgggatgcacacctggggctgggggcctgcggagaggccgagggcctgggggtccagggggctgaggaggaggaggaggaggaagaagaggaggaggaggagggggccggtgtcccagcttgcccgcccaagggcccaggcaaagccccagctggtgggggctgccggcgccagcggcgagggggcccagtggcaccccgggctcggcgtctgcgcctctcagcctcccggagggccgggggcagcagggggctgggggcccggcgcctggagaggaggctgaaggagtccctgcagaactggttccgggccgagtgtctcatggactatgacccgcgggggaaccggctggtgtgcatggcctgtggccgggcactgcccagcctgcacctggacgacatccgtgcccacgtgctggaggtgcaccctggctccctggggctcagcggcccccagcgcagtgccctgctgcaggcctgggggggccagcccgaggcgctgtctgagctcacccagtccccaccaggcgatgacctcgccccccaggacctgaccggaaagagccgggactcggcctccgctgctggagccccctcctctcaggatctcagccccccagacgtaaaggaagaggctggctgggtccctgagaggcccgggcccgcagaggaggaggaggagctggaggagggcgagggcgagagggcgggggtcccgggccggtcgccgcggggccgcgcccaccgccgccacccccaggagcgctggcggctggagtacctcatggagttggacggcggccggcgcggcctggtgtgcggggtgtgcgggggcgcgctggcctcgctcaagatgagcaccatcgagcgccacatccgccggcgccacccgggctccacgcgcctcggcgggcctgtccaggccctcatcgcccgggagtggagcgagaaggccgcccacctgctggccctggggccgccccgccccgagtccccccagggccccatcccccccggcactgccgcagcctccgacgaggggggaggggacgaggaggaggagccagaggaggaggaggaggagtggggcgacgttccgctgtcccctggagctcccttggagcggcccgccgaagaagaggaggacgaagaggacggccaggagcctgggggactcgccttgccgccgccgcctcctcccccgcctccgcccccgccccgcagccgggagcagcggcggaactaccagccgcggtggcggggcgagtacctgatggactacgacggcagccggcgcggcctggtgtgtatggtgtgcgggggcgcgctggccacgctcaaggtgagcaccatcaagcgccacatcctgcaggtgcaccccttctccatggacttcacgcctgaggagcgccagactatcctggaggcctacgaggaggcggcgctgcgctgctacggccacgagggcttcgggccgcccgccccggcgccgcgtgacggcggcgcggacctcaagtctggcgctgtgtgtcgggcgtagcggcctagcgggcccccgggtcaggtcgggtcgggtcggatcggccccgccccgccctgtgctcgcccggcccttcggctgggagaccctcgcgtccggtgttagcgcttcccgcggccgcgccccccgctggccgggccgggcggagacgggggatcgggtggggccaccggcgtctgcgcggtgccacttgggtccctgagccagtcggtgcgctgcgggaagcgcactctcccatcggcccggagccctgccctccccgcgcagggcccacgttttccgagaatcctcagtggcctccacgtgttagcgccgagcgctcccggccgcaccccgcgagggggttctccgcaggccgggactgggggcgccgtcagtcagtattagggccgaaggggggccgtgcgggctctggctctggccctggctgggggcccagttccctgcagccttgcacgctggcaggcacggctcccggcttgggggctgctggctgcccttccctaattgggattctcggcctctcggaggccccggctgcggactggggcttccagcgggaggctgggccgcagggctcgggagccttcccggggtgggaaggcgcgttggaccgagggcggggctacgcgcccggggcccgggctggaccagctgcgcttacctccccggcaggctcagtgagaaccgtgcgcccggcggccccactctcctcccaggccgctgccacgccctccaggaaagctcttgtaaagggattagcacttttttcctttgctcctcttgccccgagggtctctgcttacccctaaaccaagtccgtgggagcccggggcacaggcggtcccggcagtcagccttcgattcccgccccatccccatccccctttgtccgcggtggatgcggcgtccgttctcaacccgcagggcctggggccgggcctcggcctcttttccccgtggcagccgcaggccctgtgtggcagggatggggccccgcgatctcccaggcaggtccgagagggatgtgtagattcattctcctgtggagaacaggtggccccgagatcaggcccttttttgctctttgtattttattttgaaactgtatttaatgcttttatatgaaagggggaggggcggggacagagctgacccagtcacccttatgtgcaaatgtcttatttattatgcgtgtatcagagataagctgtgaggtggtggagggaggacctgaaggaaggaggagcgagggcagaggcggggacgggaggaccccaactagctgtgctgatgttaatcccgctgggagactccgggccctactgtctgctcttcacaaagccaggctgctgcaggaacagttcccgcggtcctaaagccggggcggggaggctagtgggtggaacttgagggttgggtctggaggaagagatgcctgggcagcgtggtccagcccctgcctcggggtggaaaggcagagagcaaagaggaggcccctcttattccggacccccaggccagagcccaggagtgggaaagcagagggcaaagaggaggcccctcctctcatccctgacccccaggccagagcctaaggttcaagtgcctcaggcccagtccccttgacgcttcctgtttgggagttggattttataccacggattttatagcatttttatataattgaggattgtcagaattggaaagggccctggagatcactagtactaccctcctcaccttcacagataggtaaattggagcccaggaaccgagatgatcacacagccaggtagggacagtacaagaactagaatgaaaatcctagctcctgactcagtgttctttgcacgatgccacactgcttcccaattcgctggtcagttattaaaatttgtcaggcctgccgaaggattgacatgctgggcaatgcaggccaccacggtggatctgtgactcctgaaggtggcaaagccctgcacactgccttgggatgagcacactgagctctgcagggcctcagctggaaggcgccatccaatcgtccttcccctccccagcagaactccagaggtggggcggctgccgcagggcccaaggctgcctcggcagggggctttgtgctttttgttgtggaggccaccagggattcaggaagatcctgaatgggttgtcaattgactgaaaagtaaattcccagtgagtttgaacctccacggtttttgagacagtattaaaagcttgagaacggagattatggatggcaccaggctgggcactgccattcttttactttccttcatgcattttttcggatccagagtattaacaccactttttttactctgcccattcaaaaacagtaggcaaattgggggaaccaatttataatcactcaagcccactgccaaagttcggataagccagggcagaggggttagattcccccccctccgtaggcagagagaggcctcaggagagtggacatctttactgagacagccccaaacacaccagtggctctcaaagtgtgtccctgagaccagcagcatcaccttaggaatctgctagaaataaaaattcttgggccataccccagggttactgaatcagaaacttggttggggcctagcagtgttttcatgagccctccattgatcttgatgcagctgaagtgccgggcaccagtgaaagggaagggctgcggtagtgattccattgattcctgctttgatggaagttatggcctcacaggttagacgttgcaagttgagttggccctcttgcctaggtgtgcctccttgccttgggattctgacatgaacaggtgaagtctcttcatgattttttttgttgttgttgttaatggtatgcttgctattatggccaatatgtaaatgttactctgaatacatatttatataccatgttacttagtgacattattcaaacatttgtatgcgtatttgtgaaattgtttgcatcagtcatttaaaaaatatttcagcctaagttttctaagaggtatgttgaatacatttttaaaagccagcttaagggtcacagcagccttagtttaggagaagagctaatcacaggtgaccactcaagttctttcaatgaagacctgatgatgtatttagttcccattttccacggtgattgactcaatttaagtgtattgtggctatatgtaatttacaggctgctttgcgttgcaggtgggaaaatctcccaggctggtgtgaggctgaactggggtaaaagaccccctgacccctcctcattcttctaaggtcaccacctcttagagggtctcttattttctttcagagatcaaatgcacagttatgctgtacaactaaattctgcagtcttgggaatccttacgagtaccaactattagtcactttttaaagtccccaaagtggagtgaggatagggggagtggaagcagtgtttggttcttactttacccaaactgtgtataaagaataaagttagcagaatgatgccacagtca

SEQ ID NO: 118134 - DNA, 390 bp, Homo sapiens
  Payload ID: 3118
  Gene Symbol: C11orf95
  Gene Name: chromosome 11 open reading frame 95
  ENST ID: ENST00000546282
  CDS Start-End: 20-163
ccgctccgcagcgcagcgcatggagcccggcggggaccaccggagccggagcagcggcggcaggggcggccccgggccagcagtggcctcggcacggggccgacggctgccgcccgccggatcgagcggcagcgcggagccagaggaagacgaaggcgactagcctggatccagcgctggaaggatgcttagagaccagccagctagccagtgtcgttgcagacaaagaagctcaggcccagagtgcggacatgacctatcaaaggtcacagagcaagttaccagtgaagccaggacttgaacccaggcctatgactccgaagccagtggattctatggatctacttaaataaaaactaaaacaaaaaaacttccacaagggtgacagga

SEQ ID NO: 118135 - DNA, 723 bp, Homo sapiens
  Payload ID: 3118
  Gene Symbol: C11orf95
  Gene Name: chromosome 11 open reading frame 95
  ENST ID: ENST00000338498
  CDS Start-End: 1-608
aagtcatcagcaacagctgggatgcacacctggggctgggggcctgcggagaggccgagggcctgggggtccagggggctgaggaggaggaggaggaggaagaagaggaggaggaggagggggccggtgtcccagcttgcccgcccaagggcccaggcgacgttccgctgtcccctggagctcccttggagcggcccgccgaagaagaggaggacgaagaggacggccaggagcctgggggactcgccttgccgccgccgcctcctcccccgcctccgcccccgccccgcagccgggagcagcggcggaactaccagccgcggtggcggggcgagtacctgatggactacgacggcagccggcgcggcctggtgtgtatggtgtgcgggggcgcgctggccacgctcaaggtgagcaccatcaagcgccacatcctgcaggtgcaccccttctccatggacttcacgcctgaggagcgccagactatcctggaggcctacgaggaggcggcgctgcgctgctacggccacgagggcttcgggccgcccgccccggcgccgcgtgacggcggcgcggacctcaagtctggcgctgtgtgtcgggcgtagcggcctagcgggcccccgggtcaggtcgggtcgggtcggatcggccccgccccgccctgtgctcgcccggcccttcggctgggagaccctcgcgtccggtgttagcgcttcccgc

SEQ ID NO: 118136 - DNA, 1308 bp, Homo sapiens
  Payload ID: 3119
  Gene Symbol: C11orf96
  Gene Name: chromosome 11 open reading frame 96
  Uniprot ID: Q7Z7L8
  ENST ID: ENST00000339446
  CDS Start-End: 1-1308
atgggaaacaagcagccccagaaggtcacggtgcctactgggacagccctccaaggagtggtattgatcgtctccacgctgcaccagccaggtggctggatatgtggcaaggatccctgctgcagcttgaggccactttcaaactctgtacagaacgccttggcctgcaagagtaaacaagattaccaggctggaattctgttcaagaccagggcttttatatccagagattgtgggtcagatgcggcagaagactctgcttccaagggagagacttatactttaaccttggagcataagggggcgggggagggggacctgcggccccgcggccaacccggttggtgcagacttggggatcccagaagggacagtgcccgcccagtcgcggcgattgagggtccctgtccgggcgcagctcgggccagccgcgtgctccggggccgcggcttctcccggaacccccgcgggcggggcctgccttccggagccggttggcggggggcgggcggcgccggggaaggggccgttactttcccagagcggcggggcgacgtcaggcggaagggcgcggggcgcgcacgctttaaatggcattcgctgtcatccgagctcagagccgtgtgggcagccgcgggctatataagccgcgagcctggccgccgcggggcagacggcgacagcagcggcggcgagcgcctcggagcgcggcggaacagcgccccccgagccccgtgccccccgacgggtccgcccgcccgcccgccctcccgaggagcgccggcccgggcccgcgagggccgccgccaccccgcagcagatttggatcccccgcccggcgagcccccggctgctgcctcccggggggccccggcgcagcggccgccctcggagagccccggcgccccgccgcccggccccgcagacgccggaggcgccatggccgccaagcccggcgagctgatgggcatctgctccagttaccaggcggtgatgccgcacttcgtgtgcctggccgacgagttcccgcagcccgtgcggcccgccaagctgcccaagggccggggccggctgcggcggccgcgccagtctcgcttcaagacgcagccggtgaccttcgacgagatccaggaggtggaggaggagggggtgtcccccatggaggaggagaaggccaagaagtcgttcctgcagagcctggagtgcctgcgccgcagcacgcagagcctgtcgctgcagcgggagcagctcagcagctgcaaactgaggaacagcctggactccagcgactccgactcggccctgtaa

SEQ ID NO: 118137 - DNA, 1834 bp, Homo sapiens
  Payload ID: 3119
  Gene Symbol: C11orf96
  Gene Name: chromosome 11 open reading frame 96
  ENST ID: ENST00000528572
  CDS Start-End: 52-1305
agagcggcggggcgacgtcaggcggaagggcgcggggcgcgcacgctttaaatggcattcgctgtcatccgagctcagagccgtgtgggcagccgcgggctatataagccgcgagcctggccgccgcggggcagacggcgacagcagcggcggcgagcgcctcggagcgcggcggaacagcgccccccgagccccgtgccccccgacgggtccgcccgcccgcccgccctcccgaggagcgccggcccgggcccgcgagggccgccgccaccccgcagcagatttggatcccccgcccggcgagcccccggctgctgcctcccggggggccccggcgcagcggccgccctcggagagccccggcgccccgccgcccggccccgcagacgccggaggcgccatggccgccaagcccggcgagctgatgggcatctgctccagttaccaggcggtgatgccgcacttcgtgtgcctggccgacgagttcccgcagcccgtgcggcccgccaagctgcccaagggccggggccggctgcggcggccgcgccagtctcgcttcaagacgcagccggtgaccttcgacgagatccaggaggtggaggaggagggggtgtcccccatggaggaggagaaggccaagaagtcgttcctgcagagcctggagtgcctgcgccgcagcacgcagagcctgtcgctgcagcgggagcagctcagcagctgcaaactgaggaacagcctggactccagcgactccgactcggccctgtaaggggcgccgcccgcgggggggacgcgcgcgtccgcggtccgcgcggggaccggcgtgtgaaccccgagagtgcccgcgccctgctcccgggggacccgcaaggacccgggaccgccgctcctcgcgcgctcggactcccgccccgctgcgaaccggtcggtgcgcccctcgccgcgctcgccctggcccgggagcgccgggagcggggccgctttcctcgtccttgtaaatgtttattttttaactcttcccagtgcgaactctgctgtgagtgtgtgcggggaggcgcgcccgcgctgagtcggcggcgggtagccactccatgcccttgtccgatggtttgcaactccgattttgcacaccgctccaccgtgccccccagcgcacacccattcacactcacgccaacactctcgctgaacacttttataattgttaggcgtggccgttgggactttgggcgcagcgcggctgctactgcgtctggaggattgatatttatttttgcattgcgatggctgaaggcatttatttaacgatctttttacctggatatgtctgtgaggctcctgaaaggagacaaataaagtcaatatatttgcacagtgcagttttccaggctcttgactttttgcaccttcggggtccaggctcccaagactcggggaggtgggggaggaggtggcagggggatgtcggaccagggagccgggagtggagctacctccacaagcttcggtcaccggaacgaggttgcgccaccggtgcgcgggtcggttgcctgcctccccaagtggatccacccccggtccagtgtgctcctgcgtccctggtctattccccatcgccggcatccgggctgaagtgaagccgcaggaggggcggaggcagagctgacgatggagagctctctcctccgtacagttcacttcccagagctggggtcagggtcctcgccccgcacccgccacagaagacgcatctccctctgcgctgattcctggcggcgggtggggagatgtcggagccagcaatgcgagatgtttgggcgttgggacccgagag

SEQ ID NO: 118138 - DNA, 1294 bp, Homo sapiens
  Payload ID: 3119
  Gene Symbol: C11orf96
  Gene Name: chromosome 11 open reading frame 96
  ENST ID: ENST00000617612
  CDS Start-End: 316-684
tgggcagccgcgggctatataagccgcgagcctggccgccgcggggcagacggcgacagcagcggcggcgagcgcctcggagcgcggcggaacagcgccccccgagccccgtgccccccgacgggtccgcccgcccgcccgccctcccgaggagcgccggcccgggcccgcgagggccgccgccaccccgcagcagatttggatcccccgcccggcgagcccccggctgctgcctcccggggggccccggcgcagcggccgccctcggagagccccggcgccccgccgcccggccccgcagacgccggaggcgccatggccgccaagcccggcgagctgatgggcatctgctccagttaccaggcggtgatgccgcacttcgtgtgcctggccgacgagttcccgcagcccgtgcggcccgccaagctgcccaagggccggggccggctgcggcggccgcgccagtctcgcttcaagacgcagccggtgaccttcgacgagatccaggaggtggaggaggagggggtgtcccccatggaggaggagaaggccaagaagtcgttcctgcagagcctggagtgcctgcgccgcagcacgcagagcctgtcgctgcagcgggagcagctcagcagctgcaaactgaggaacagcctggactccagcgactccgactcggccctgtaaggggcgccgcccgcgggggggacgcgcgcgtccgcggtccgcgcggggaccggcgtgtgaaccccgagagtgcccgcgccctgctcccgggggacccgcaaggacccgggaccgccgctcctcgcgcgctcggactcccgccccgctgcgaaccggtcggtgcgcccctcgccgcgctcgccctggcccgggagcgccgggagcggggccgctttcctcgtccttgtaaatgtttattttttaactcttcccagtgcgaactctgctgtgagtgtgtgcggggaggcgcgcccgcgctgagtcggcggcgggtagccactccatgcccttgtccgatggtttgcaactccgattttgcacaccgctccaccgtgccccccagcgcacacccattcacactcacgccaacactctcgctgaacacttttataattgttaggcgtggccgttgggactttgggcgcagcgcggctgctactgcgtctggaggattgatatttatttttgcattgcgatggctgaaggcatttatttaacgatctttttacctggatatgtctgtgaggctcctgaaaggagacaaataaagtcaatatatttgcacagtgca

SEQ ID NO: 118139 - DNA, 405 bp, Homo sapiens
  Payload ID: 3120
  Gene Symbol: C11orf98
  Gene Name: chromosome 11 open reading frame 98
  Uniprot ID: E9PRG8
  ENST ID: ENST00000525675
  CDS Start-End: 23-391
gaactggagtggaatcgcgactatgggagctccggggggaaagatcaaccggccccgaacggagctgaagaagaagctgttcaaacgccggcgggtgttgaatcgggagcggcgtctgaggcaccgggtggtcggggctgtgatagaccaagggctgatcacgcggcaccacctcaagaagcgggcgtccagtgcacgtgccaacattacactgtcagggaagaagcgcagaaaactcctccagcagatccggcttgcccagaaagagaagacagccatggaaggtgaggctgggacagaggtgggtgaggggaatcctggatttatttgggataatacttccttcttccctttactcagtggaagccccttcaaagccagccaggactagtgaaccacagctca

SEQ ID NO: 118140 - DNA, 654 bp, Homo sapiens
  Payload ID: 3120
  Gene Symbol: C11orf98
  Gene Name: chromosome 11 open reading frame 98
  ENST ID: ENST00000524958
  CDS Start-End: 49-420
cggcgctgagcggaagtacggaccgtgaactggagtggaatcgcgactatgggagctccggggggaaagatcaaccggccccgaacggagctgaagaagaagctgttcaaacgccggcgggtgttgaatcgggagcggcgtctgaggcaccgggtggtcggggctgtgatagaccaagggctgatcacgcggcaccacctcaagaagcgggcgtccagtgcacgtgccaacattacactgtcagggaagaagcgcagaaaactcctccagcagatccggcttgcccagaaagagaagacagccatggaagtggaagccccttcaaagccagccaggactagtgaaccacagctcaaaaggcaaaagaagacaaaagccccccaggatgtagaaatgaaggaccttgaagatgagagctaaacctcttccactagaagattctcaactggagccagccttcagactcagtggttgtttcagaggactttgacaaaagcaaggccccttttcactctccagatttcctcctacctaatggcctactgacctcccctagagggatgtctttgggagggaagaaggtacagaagaaagattggagaagggcctctctagcagtcaactccatttgtaataaagccctagcactctgag

SEQ ID NO: 118141 - DNA, 1192 bp, Homo sapiens
  Payload ID: 3121
  Gene Symbol: C12orf10
  Gene Name: chromosome 12 open reading frame 10
  Uniprot ID: Q9HB07
  ENST ID: ENST00000267103
  CDS Start-End: 53-1183
tggcgcttcctcttccgggtcggcgctcctgcctccctgcagggagctgcttatgggacaccaattcctgcgcggcctcttaacgctgctgctgccgccgccacccctgtatacccggcaccgcatgctcggtccagagtccgtcccgcccccaaaacgatcccgcagcaaactcatggcaccgccccgaatcgggacgcacaatggcaccttccactgcgacgaggcactggcatgcgcactgcttcgcctcctgccggagtaccgggatgcagagattgtgcggacccgggatcccgaaaaactcgcttcctgtgacatcgtggtggacgtggggggcgagtacgaccctcggagacaccgatatgaccatcaccagaggtctttcacagagaccatgagctccctgtcccctgggaagccgtggcagaccaagctgagcagtgcgggactcatctatctgcacttcgggcacaagctgctggcccagttgctgggcactagtgaagaggacagcatggtgggcaccctctatgacaagatgtatgagaactttgtggaggaggtggatgctgtggacaatgggatctcccagtgggcagagggggagcctcgatatgcactgaccactaccctgagtgcacgagttgctcgacttaatcctacctggaaccaccccgaccaagacactgaggcagggttcaagcgtgcaatggatctggttcaagaggagtttctgcagagattagatttctaccaacacagctggctgccagcccgggccttggtggaagaggcccttgcccagcgattccaggtggacccaagtggagagattgtggaactggcgaaaggtgcatgtccctggaaggagcatctctaccacctggaatctgggctgtcccctccagtggccatcttctttgttatctacactgaccaggctggacagtggcgaatacagtgtgtgcccaaggagccccactcattccaaagccggctgcccctgccagagccatggcggggtcttcgggacgaggccctggaccaggtcagtgggatccctggctgcatcttcgtccatgcaagcggcttcactggcggtcaccacacccgagagggtgccttgagcatggcccgtgccaccttggcccagcgctcatacctcccacaaatctcctagtctaataaa

SEQ ID NO: 118142 - DNA, 840 bp, Homo sapiens
  Payload ID: 3121
  Gene Symbol: C12orf10
  Gene Name: chromosome 12 open reading frame 10
  ENST ID: ENST00000549488
  CDS Start-End: 171-812
cattaatcccctacccggcgacacccggcagccccttcacccctgtgtacctcgcaggatgcagagattgtgcggacccgggatcccgaaaaactcgcttcctgtgacatcgtggtggacgtggggggcgagtacgaccctcggagacaccgatatgaccatcaccagagatgtatgagaactttgtggaggaggtggatgctgtggacaatgggatctcccagtgggcagagggggagcctcgatatgcactgaccactaccctgagtgcacgagttgctcgacttaatcctacctggaaccaccccgaccaagacactgaggcagggttcaagcgtgcaatggatctggttcaagaggagtttctgcagagattagatttctaccaacacagctggctgccagcccgggccttggtggaagaggcccttgcccagcgattccaggtggacccaagtggagagattgtggaactggcgaaaggtgcatgtccctggaaggagcatctctaccacctggaatctgggctgtcccctccagtggccatcttctttgttatctacactgaccaggctggacagtggcgaatacagtgtgtgcccaaggagccccactcattccaaagccggctgcccctgccagagccatggcggggtcttcgggacgaggccctggaccaggtcagtgggatccctggctgcatcttcgtccatgcaagcggcttcactggcggtcaccacacccgagagggtgccttgagcatggcccgtgccaccttggcccagcgctcatacctcccacaaatctcctagtctaataaaaccttccatctcatactga

SEQ ID NO: 118143 - DNA, 988 bp, Homo sapiens
  Payload ID: 3121
  Gene Symbol: C12orf10
  Gene Name: chromosome 12 open reading frame 10
  ENST ID: ENST00000548632
  CDS Start-End: 61-966
ttcctgcgcggcctcttaacgctgctgctgccgccgccacccctgtatacccggcaccgcatgctcggtccagagtccgtcccgcccccaaaacgatcccgcagcaaactcatggcaccgccccgaatcgggacgcacaatggcaccttccactgcgacgaggcactggcatgcgcactgcttcgcctcctgccggagtaccgggatgcagagattgtgcggacccgggatcccgaaaaactcgcttcctgtgacatcgtggtggacgtggggggcgagtacgaccctcggagacaccgatatgaccatcaccagaggtctttcacagagaccatgagctccctgtcccctgggaagccgtggcagaccaagctgagcagtgcgggactcatctatctgcacttcgggcacaagctgctggcccagttgctgggcactagtgaagaggacagcatggtgggcaccctctatgacaaggcagggttcaagcgtgcaatggatctggttcaagaggagtttctgcagagattagatttctaccaacacagctggctgccagcccgggccttggtggaagaggcccttgcccagcgattccaggtggacccaagtggagagattgtggaactggcgaaaggtgcatgtccctggaaggagcatctctaccacctggaatctgggctgtcccctccagtggccatcttctttgttatctacactgaccaggctggacagtggcgaatacagtgtgtgcccaaggagccccactcattccaaagccggctgcccctgccagagccatggcggggtcttcgggacgaggccctggaccaggtcagtgggatccctggctgcatcttcgtccatgcaagcggcttcactggcggtcaccacacccgagagggtgccttgagcatggcccgtgccaccttggcccagcgctcatacctcccacaaatctcctagtctaataaaaccttccatctca

SEQ ID NO: 118144 - DNA, 414 bp, Homo sapiens
  Payload ID: 3121
  Gene Symbol: C12orf10
  Gene Name: chromosome 12 open reading frame 10
  ENST ID: ENST00000547864
  CDS Start-End: 1-392
gcatggtgggcaccctctatgacaaggtggacccaagtggagagattgtggaactggcgaaaggtgcatgtccctggaaggagcatctctaccacctggaatctgggctgtcccctccagtggccatcttctttgttatctacactgaccaggctggacagtggcgaatacagtgtgtgcccaaggagccccactcattccaaagccggctgcccctgccagagccatggcggggtcttcgggacgaggccctggaccaggtcagtgggatccctggctgcatcttcgtccatgcaagcggcttcactggcggtcaccacacccgagagggtgccttgagcatggcccgtgccaccttggcccagcgctcatacctcccacaaatctcctagtctaataaaaccttccatctca

SEQ ID NO: 118145 - DNA, 2919 bp, Homo sapiens
  Payload ID: 3122
  Gene Symbol: C12orf29
  Gene Name: chromosome 12 open reading frame 29
  Uniprot ID: Q8N999
  ENST ID: ENST00000356891
  CDS Start-End: 204-1181
gaaggcgccgcggccaggaagccgcttctggacgggcgttcccgcccctcgctgggcttggtagttggggcgcagccgcggtggctgggcgcggagtgtgcgtggcctgagccgtgcgggtgactgcttcagggcttctccgcgactggaccgggcgccgctcgaaagcacgccctccattcgcactgcttgttgggctcatcatgaagcgcttgggctccgtgcagcggaaaatgccgtgtgtgtttgtgacggaggtgaaagaggagccttcctccaaaagggagcatcagccatttaaagttttggcaactgaaactgtaagtcacaaggcattagatgcagatatatacagtgcaattccaacagaaaaagtggatggaacatgttgttatgttactacctataaagatcagccatacctttgggctcgactagatagaaaacccaacaaacaagctgaaaaaagatttaaaaattttctacattcaaaagaaaacccaaaagaatttttttggaacgttgaggaggacttcaaaccagctccggagtgctggataccagcaaaggagacagaacaaataaatgggaacccagtgcctgatgaaaatggacacattcctggttgggtaccagtagagaaaaacaacaaacagtattgctggcattcctctgtagttaattatgaatttgaaattgccctggtactaaaacatcatcctgatgattctggacttttggaaattagtgcagtgccactttcagatctcttagaacaaacactggaactcataggaacaaatatcaatggaaacccatatgggttagggagcaagaaacatccattacatcttcttataccacatggagcatttcaaataagaaatctaccttcattgaagcacaatgatctcgtgtcctggtttgaagattgcaaagagggtaaaattgaaggaatagtgtggcattgcagtgatggctgtttaataaaggtccatcgccatcatcttggcttatgctggccaattccagatacttacatgaattcaagaccagttattatcaacatgaacctgaacaaatgtgactctgcctttgatattaagtgtttgtttaatcattttttaaaaatagataatcagaaatttgttagactcaaagatataatatttgatgtataaaatgcaaataaaattagtttatcattatattctaatcttgaatattctaccatatttaaaaatatctcaaggtttctgttcattatgaaacatcaatatgttttctaccatttgtgaagaaatgaattttccagtttcaagtacctattcaaaattttattaaaaaccagcaaattaattttaatctctagccataaaaacataagtaatagtaagctcctaagcttggacaaaggctggattctcttcactataactgagtggtaatttaaagacaacaatttaatgtcactaattttcaaaattaaatagtttaagctcaatttaattttgctagatatttaacaaaacatacggctcaacctcataacctatatgtgtgtatgtctacatctgtgtatatatcataggatttgagaatcttaacacatgtataaataagtatatataaactccaattttaaatcttaaaattgctgaatttaccctcatattctttaaaaaacttaaagcattatgaatgtagagaaattcaccagagctcactgcctatttgatggctgtaacaagtcttcaagtatatacttttataataagttgaaaatttcatataattttatttattaagaattccaatctaagtataaaggtacaaggtagtgagaaggaaatactacagttcggagaactgcttatttccaagtatatttaacttataaagttaataaatagttaaatgaaacaaagtttataggtgacctttagtaaatggggaaattaacaggactttcttcttcatcttcaaactcttcagaagcagcaacagggctagttaattcaactcccaattgttctgaaagtttttttaccttctcttctaagagaatattcttcttcacttcttccttgtaattatacttaagatcttcaatttcttcaaaaaatgaaggatcaaaattttccagttcttttttcagcttctttatttcctcctaatggaaacattatctttaaaagttgcatataggaaatatacatattttacgtttgaacaaggagatttaattgtaaatatgaaagccaaagtattcctgaatggtcaaatacagcaataaaggcagaagaattaagatttttctttgttccattgtacagtgtaaataactaagttgttaactgtcaagtccagttatgtattctgtaagttgtgttctagtctttgactaaaatttatcatctcttataatgggacttaatctttctctaaaagcatataagagcttgtcaatagagcaatcaatcaaaaagattttgtgattcataacattgaagttagtctggttaagagttttggtttagacttcatttatattttccttactaatatctaatatttaatgaataatgatcaattttttataaagttattaatatgatcagggaaacctttgggacttctgacaggcatctggtgaagagacaattcaagccttagtgactatttagaatagccagtgatcactagctaattctcatatccatgcctttttgtcctgtttacagtcttaaaagaggtaaaacagcaaatatttttttaagggaactataaccttaggattcctgaaaagaatttcaaaaaaaaaataaagacactgttgccaatgtgacccaaaacttaagaacatactaatggcatatatttgttacaattaaaaaataaatttactacttaatccta

SEQ ID NO: 118146 - DNA, 731 bp, Homo sapiens
  Payload ID: 3122
  Gene Symbol: C12orf29
  Gene Name: chromosome 12 open reading frame 29
  Uniprot ID: Q8N999
  ENST ID: ENST00000453037
  CDS Start-End: 88-204
cgggtgactgcttcagggcttctccgcgactggaccgggcgccgctcgaaagcacgccctccattcgcactgcttgttgggctcatcatgaagcgcttgggctccgtgcagcggaaaatgccgtgtgtgtttgtgacggaggtgaaagaggagccttcctccaaaagggagcatcagatcagccatacctttgggctcgactagatagaaaacccaacaaacaagctgaaaaaagatttaaaaattttctacattcaaaagaaaacccaaaagaatttttttggaacgttgaggaggacttcaaaccagctccggagtgctggataccagcaaaggagacagaacaaataaatgggaacccagtgcctgatgaaaatggacacattcctggttgggtaccagtagagaaaaacaacaaacagtattgctggcattcctctgtagttaattatgaatttgaaattgccctggtactaaaacatcatcctgatgattctggacttttggaaattagtgcagtgccactttcagatctcttagaacaaacactggaactcataggaacaaatatcaatggaaacccatatgggttagggagcaagaaacatccattacatcttcttataccacatggagcatttcaaataagaaatctaccttcattgaagcacaatgatctcgtgtcctggtttgaagattgcaaagagggtaaaattgaaggaatagtgtgg

SEQ ID NO: 118147 - DNA, 1578 bp, Homo sapiens
  Payload ID: 3122
  Gene Symbol: C12orf29
  Gene Name: chromosome 12 open reading frame 29
  Uniprot ID: Q8N999
  ENST ID: ENST00000552121
  CDS Start-End: 114-230
gcggagtgtgcgtggcctgagccgtgcgggtgactgcttcagggcttctccgcgactggaccgggcgccgctcgaaagcacgccctccattcgcactgcttgttgggctcatcatgaagcgcttgggctccgtgcagcggaaaatgccgtgtgtgtttgtgacggaggtgaaagaggagccttcctccaaaagggagcatcagatcagccatacctttgggctcgactagatagaaaacccaacaaacaagctgaaaaaagatttaaaaattttctacattcaaaagaaaacccaaaagaatttttttggaacgttgaggaggacttcaaaccagctccggagtgctggataccagcaaaggagacagaacaaataaatgggaacccagtgcctgatgaaaatggacacattcctgggttagggagcaagaaacatccattacatcttcttataccacatggagcatttcaaataagaaatctaccttcattgaagcacaatgatctcgtgtcctggtttgaagattgcaaagagggtaaaattgaaggaatagtgtggcattgcagtgatggctgtttaataaaggtccatcgccatcatcttggcttatgctggccaattccagatacttacatgaattcaagaccagttattatcaacatgaacctgaacaaatgtgactctgcctttgatattaagtgtttgtttaatcattttttaaaaatagataatcagaaatttgttagactcaaagatataatatttgatgtataaaatgcaaataaaattagtttatcattatattctaatcttgaatattctaccatatttaaaaatatctcaaggtttctgttcattatgaaacatcaatatgttttctaccatttgtgaagaaatgaattttccagtttcaagtacctattcaaaattttattaaaaaccagcaaattaattttaatctctagccataaaaacataagtaatagtaagctcctaagcttggacaaaggctggattctcttcactataactgagtggtaatttaaagacaacaatttaatgtcactaattttcaaaattaaatagtttaagctcaatttaattttgctagatatttaacaaaacatacggctcaacctcataacctatatgtgtgtatgtctacatctgtgtatatatcataggatttgagaatcttaacacatgtataaataagtatatataaactccaattttaaatcttaaaattgctgaatttaccctcatattctttaaaaaacttaaagcattatgaatgtagagaaattcaccagagctcactgcctatttgatggctgtaacaagtcttcaagtatatacttttataataagttgaaaatttcatataattttatttattaagaattccaatctaagtataaaggtacaaggtagtgagaaggaaatactacagttcggagaactgcttatttccaagtatatttaacttataaagttaataaatagttaaatgaaacaaagtttataggtgacctttagtaaatggggaaattaacaggactttcttcttcatcttc

SEQ ID NO: 118148 - DNA, 2740 bp, Homo sapiens
  Payload ID: 3122
  Gene Symbol: C12orf29
  Gene Name: chromosome 12 open reading frame 29
  Uniprot ID: Q8N999
  ENST ID: ENST00000550333
  CDS Start-End: 145-261
ggtagttggggcgcagccgcggtggctgggcgcggagtgtgcgtggcctgagccgtgcgggtgactgcttcagggcttctccgcgactggaccgggcgccgctcgaaagcacgccctccattcgcactgcttgttgggctcatcatgaagcgcttgggctccgtgcagcggaaaatgccgtgtgtgtttgtgacggaggtgaaagaggagccttcctccaaaagggagcatcagatcagccatacctttgggctcgactagatagaaaacccaacaaacaagctgaaaaaagatttaaaaattttctacattcaaaagaaaacccaaaagaatttttttggaacgttgaggaggacttcaaaccagctccggagtgctggataccagcaaaggagacagaacaaataaatgggaacccagtgcctgatgaaaatggacacattcctggttgggtaccagtagagaaaaacaacaaacagtattgctggcattcctctgtagttaattatgaatttgaaattgccctggtactaaaacatcatcctgatgattctggacttttggaaattagtgcagtgccactttcagatctcttagaacaaacactggaactcataggaacaaatatcaatggaaacccatatgggttagggagcaagaaacatccattacatcttcttataccacatggagcatttcaaataagaaatctaccttcattgaagcacaatgatctcgtgtcctggtttgaagattgcaaagagggtaaaattgaaggaatagtgtggcattgcagtgatggctgtttaataaaggtccatcgccatcatcttggcttatgctggccaattccagatacttacatgaattcaagaccagttattatcaacatgaacctgaacaaatgtgactctgcctttgatattaagtgtttgtttaatcattttttaaaaatagataatcagaaatttgttagactcaaagatataatatttgatgtataaaatgcaaataaaattagtttatcattatattctaatcttgaatattctaccatatttaaaaatatctcaaggtttctgttcattatgaaacatcaatatgttttctaccatttgtgaagaaatgaattttccagtttcaagtacctattcaaaattttattaaaaaccagcaaattaattttaatctctagccataaaaacataagtaatagtaagctcctaagcttggacaaaggctggattctcttcactataactgagtggtaatttaaagacaacaatttaatgtcactaattttcaaaattaaatagtttaagctcaatttaattttgctagatatttaacaaaacatacggctcaacctcataacctatatgtgtgtatgtctacatctgtgtatatatcataggatttgagaatcttaacacatgtataaataagtatatataaactccaattttaaatcttaaaattgctgaatttaccctcatattctttaaaaaacttaaagcattatgaatgtagagaaattcaccagagctcactgcctatttgatggctgtaacaagtcttcaagtatatacttttataataagttgaaaatttcatataattttatttattaagaattccaatctaagtataaaggtacaaggtagtgagaaggaaatactacagttcggagaactgcttatttccaagtatatttaacttataaagttaataaatagttaaatgaaacaaagtttataggtgacctttagtaaatggggaaattaacaggactttcttcttcatcttcaaactcttcagaagcagcaacagggctagttaattcaactcccaattgttctgaaagtttttttaccttctcttctaagagaatattcttcttcacttcttccttgtaattatacttaagatcttcaatttcttcaaaaaatgaaggatcaaaattttccagttcttttttcagcttctttatttcctcctaatggaaacattatctttaaaagttgcatataggaaatatacatattttacgtttgaacaaggagatttaattgtaaatatgaaagccaaagtattcctgaatggtcaaatacagcaataaaggcagaagaattaagatttttctttgttccattgtacagtgtaaataactaagttgttaactgtcaagtccagttatgtattctgtaagttgtgttctagtctttgactaaaatttatcatctcttataatgggacttaatctttctctaaaagcatataagagcttgtcaatagagcaatcaatcaaaaagattttgtgattcataacattgaagttagtctggttaagagttttggtttagacttcatttatattttccttactaatatctaatatttaatgaataatgatcaattttttataaagttattaatatgatcagggaaacctttgggacttctgacaggcatctggtgaagagacaattcaagccttagtgactatttagaatagccagtgatcactagctaattctcatatccatgcctttttgtcctgtttacagtcttaaaagaggtaaaacagcaaatatttttttaagggaactataaccttaggattcctgaaaagaatttcaaaaaaaaaataaagacactgttgccaatgtgacccaaaacttaagaacatactaatggcatatatttgttacaattaaaaaataaatttactacttaatcc

SEQ ID NO: 118149 - DNA, 770 bp, Homo sapiens
  Payload ID: 3122
  Gene Symbol: C12orf29
  Gene Name: chromosome 12 open reading frame 29
  ENST ID: ENST00000552847
  CDS Start-End: 112-264
ggagtgtgcgtggcctgagccgtgcgggtgactgcttcagggcttctccgcgactggaccgggcgccgctcgaaagcacgccctccattcgcactgcttgttgggctcatcatgaagcgcttgggctccgtgcagcggaaaatgccgtgtgtgtttgtgacggaggtgaaagaggagccttcctccaaaagggagcatcaggtcagcaccttttggggaaaccccctaatcagccatttaaagttttggcaactgaaactgtaagtcacaaggcattagatgcagatatatacagtgcaattccaacagaaaaagtggatggaacatgttgttatgttactacctataaagatcagccatacctttgggctcgactagatagaaaacccaacaaacaagctgaaaaaagatttaaaaattttctacattcaaaagaaaacccaaaagaatttttttggaacgttgaggaggacttcaaaccagctccggagtgctggataccagcaaaggagacagaacaaataaatgggaacccagtgcctgatgaaaatggacacattcctggttgggtaccagtagagaaaaacaacaaacagtattgctggcattcctctgtagttaattatgaatttgaaattgccctggtactaaaacatcatcctgatgattctggacttttggaaattagtgcagtgccactttcagatctcttagaacaaacactggaactcataggaacaaatatcaatggaaacccatatggtgagtga

SEQ ID NO: 118150 - DNA, 3826 bp, Homo sapiens
  Payload ID: 3123
  Gene Symbol: C12orf4
  Gene Name: chromosome 12 open reading frame 4
  Uniprot ID: Q9NQ89
  ENST ID: ENST00000261250
  CDS Start-End: 89-1747
ccagtgcaggacgcgctgacagctcgagtgagcggactgcccaggacttcggaactagacgagttctgtagaaatcctgtcaaagaatatgaagaaaaacagagaaagattctgcaatagagagagagaatttgtatataaatttaaagtaggaagtcagtgcttagaactgagagtgccactcaaatttcctgttcaagagaatgccagtcatttgcatggacgtctgatgctgctgcacagtttaccgtgctttatagaaaaagacttaaaagaagctctgactcagtttatagaagaagaatccctcagcgattatgatagagatgctgaagcatccctggcagctgtgaaatcaggtgaagtagatttacatcagctggcgagtacatgggccaaagcttatgctgagaccacgttagagcatgcaaggcctgaagaacccagctgggatgaagattttgcagatgtgtaccatgacttaattcattctcctgcctctgaaactctcttaaatttggaacataattactttgttagtatctcagaactgattggtgaaagagatgtggagctgaaaaaattacgagagagacaaggtattgaaatggaaaaagtcatgcaggaattgggaaaatcactgacagatcaagatgtaaattcactggctgctcagcattttgaatcccagcaagacctagaaaataaatggtcgaatgaattaaaacaatcaactgccatccaaaaacaagagtatcaagaatgggtaataaaacttcaccaagacctaaaaaaccccaacaacagctcccttagtgaggaaattaaagttcagccaagtcagttcagagaatctgtagaagcaattggaaggatttatgaggaacagagaaagttagaagaaagttttaccattcacttaggagcccagttgaagaccatgcataatttgagattgctgagagcagatatgctggacttctgtaagcataaaagaaatcatcgaagtggtgtgaaacttcatcggctccaaacagctctgtcactttattctacatctctctgtggcctggttttactagtagataatcgaattaattcatatagtggtattaaaagagattttgccacagtttgccaagaatgcactgacttccatttcccccgaattgaagagcaattagaagttgtccaacaggtggtactttatgctagaacccagcgcaggagtaaattgaaagaatcacttgattctggaaaccaaaatggaggaaatgatgataagactaagaatgctgagaggaactatttaaatgttttacctggggaattttatattacacggcattctaatctctcagaaatccatgttgctttccatctctgtgtggatgaccatgtgaaatcgggaaacatcactgctcgtgatcctgccattatgggactccgaaatatactcaaagtttgctgtacccatgacatcacaacaataagcattcctctcttgctggtacatgatatgtcagaggaaatgactataccctggtgcttaaggagagcggaacttgtgttcaagtgtgtcaaaggtttcatgatggaaatggcttcatgggatggaggaatttctaggacagtgcaatttctagtaccacagagtatttctgaagaaatgttttatcaacttagtaacatgcttccccagatcttccgagtatcatcaacactcactctgacatccaagcactaaacccttatagattgacatgctggcagaagatgattgttaaactctccaggaacttgtgctatgctgggaatctgtcaagcaaaagatgcccagaaagagaacttgcagctcaatccacaaatcaagatacatgtgtgtgaaaccattccaaaaatttatatactgcacaaactggtgatcaacccctaacttaaacacttaaagtctctttatgaatttctctttttttcttctctgtgttacctgtgaatattagtaatctaaaactttttatttatcacacatggacacttgggaaaggaaacttgattatatttacatggaggcatttgactttttcaagaggcttgactcgtctcaggtgcaatccttaattaaacatacaaacaaaattttccttttactttctttgccaaaacaaaatgtaaaagcactgaaatatacattgcaagtacaaatttcctgtgaaaatctttttatagaaacacaaatgtataagacaaatgtgcttgttcttttaaattctcctgtttcagaatctctttttaatctactcctaaggatgtacaagttagagtcagaagacgttttggattttttccctctctctcatcctcccgctgtgcccttgcacttgcatattaataacatttcatggactgggaaatagtgttcttttttgcaagcttgatgtcaagttagtctaaaccagcacctggcagtattttagtgctcatcaacattgtgacaatcacacaaggaagatcatttctacatttctgtcctccctgcgttctcagcttgcttaaccattcctctacctcttgcatttttttgcggataaatgtatccccatttctgcttctctgtttcccctccttttccattgtttttccttatggtactactttctcaggtgctacatatcatatatttgtcccatctataacatatttaaatgctataagtagtaactccattaaacaaaggcatttacaaaagcacacaggtgtttagaaaagcaatagtttcatcaattccaagttatgtggatattgtaactggccacaagaatgaaatggagggcatttggtgtcataagatggcatgtcttgatgacaagaaacaaaacgcccttcattaatatgcctcagtgtaataactattatagaaactgttggcaagcagagtgctttcctataacagaatgtgtcttaattttctactcgagggaaaggtttgtccaggtaacaacactaaagacaaccctaagaacacccactccagcagtatgtccattagacactaaaactctccaaattatttgtcagggagcctggcgattctgccaagaaggcaggtgttttgcccttagagcctatacagttctcttggagaaattgtctttcaggcaccactgttaatcactgagactgattctaatgcaaagcagggaagacagaggcagaaaccaggagagtggtagatcagtgcagcccagatatcggaatggaggagcaaagtttcattcacggatgtttgttgaatgctgctgcccaactcttcctttgtcacctctaggctattccactaagttacttataaactggtggctttaactgagggctgtgtaaaggtactatttggcatgtgaagtcaggataaatttatcgaatgtccgttttccacatgcaactgtgttacagaagtagtaaaattggaagaatcatgtttatggtgttaccactgatggaaacacacaaacaccaagctaataataaatatataacttaaaaagctaattatatgcactgaaatggtgggaattttagtgatgcagtaattgaggagtctggagttttgtatttggaccaagaattatgagatgaggatctttttctgagtgttctaaagggcttcttgagggggagtggtttaaagcacttcatgaatgatgtgaagaaggtaccttgggctgagacagcattctaggtacagatggcactctgttcaaccaactgtggatggaaaatattctgaaaaaaaatacaataaaaattttaaaaatacaatataaca

SEQ ID NO: 118151 - DNA, 685 bp, Homo sapiens
  Payload ID: 3123
  Gene Symbol: C12orf4
  Gene Name: chromosome 12 open reading frame 4
  ENST ID: ENST00000544697
  CDS Start-End: 195-428
tgagcggactgcccaggacttcggaactagacgagacttaaaagaagctctgactcagtttatagaagaagaatccctcagcgattatgatagagatgctgaagcatccctggcagctgtgaaatcaggtgaagtagatttacatcagctggcgagtacatgggccaaagcttatgctgagacaaggtattgaaatggaaaaagtcatgcaggaattgggaaaatcactgacagatcaagatgtaaattcactggctgctcagcattttgaatcccagcaagacctagaaaataaatggtcgaatgaattaaaacaatcaactgccatccaaaaacaagagtatcaagaatgggtaataaaacttcaccaagacctaaaaaaccccaacaacagctcccttaggagcccagttgaagaccatgcataatttgagattgctgagagcagatatgctggacttctgtaagcataaaagaaatcatcgaagtggtgtgaaacttcatcggctccaaacagctctgtcactttattctacatctctctgtggcctggttttactagtagataatcgaattaattcatatagtggtattaaaagagattttgccacagtttgccaagaatgcactgacttccatttcccccgaattgaagagcaattagaagttgtccaacaggtggtac

SEQ ID NO: 118152 - DNA, 2168 bp, Homo sapiens
  Payload ID: 3123
  Gene Symbol: C12orf4
  Gene Name: chromosome 12 open reading frame 4
  Uniprot ID: Q9NQ89
  ENST ID: ENST00000545746
  CDS Start-End: 118-1776
ggtgtggaaaaagtatgtcggcaagtcagctggtttcccagtgcaggacgcgctgacagctcgagtgagcggactgcccaggacttcggaactagacgagaaatcctgtcaaagaatatgaagaaaaacagagaaagattctgcaatagagagagagaatttgtatataaatttaaagtaggaagtcagtgcttagaactgagagtgccactcaaatttcctgttcaagagaatgccagtcatttgcatggacgtctgatgctgctgcacagtttaccgtgctttatagaaaaagacttaaaagaagctctgactcagtttatagaagaagaatccctcagcgattatgatagagatgctgaagcatccctggcagctgtgaaatcaggtgaagtagatttacatcagctggcgagtacatgggccaaagcttatgctgagaccacgttagagcatgcaaggcctgaagaacccagctgggatgaagattttgcagatgtgtaccatgacttaattcattctcctgcctctgaaactctcttaaatttggaacataattactttgttagtatctcagaactgattggtgaaagagatgtggagctgaaaaaattacgagagagacaaggtattgaaatggaaaaagtcatgcaggaattgggaaaatcactgacagatcaagatgtaaattcactggctgctcagcattttgaatcccagcaagacctagaaaataaatggtcgaatgaattaaaacaatcaactgccatccaaaaacaagagtatcaagaatgggtaataaaacttcaccaagacctaaaaaaccccaacaacagctcccttagtgaggaaattaaagttcagccaagtcagttcagagaatctgtagaagcaattggaaggatttatgaggaacagagaaagttagaagaaagttttaccattcacttaggagcccagttgaagaccatgcataatttgagattgctgagagcagatatgctggacttctgtaagcataaaagaaatcatcgaagtggtgtgaaacttcatcggctccaaacagctctgtcactttattctacatctctctgtggcctggttttactagtagataatcgaattaattcatatagtggtattaaaagagattttgccacagtttgccaagaatgcactgacttccatttcccccgaattgaagagcaattagaagttgtccaacaggtggtactttatgctagaacccagcgcaggagtaaattgaaagaatcacttgattctggaaaccaaaatggaggaaatgatgataagactaagaatgctgagaggaactatttaaatgttttacctggggaattttatattacacggcattctaatctctcagaaatccatgttgctttccatctctgtgtggatgaccatgtgaaatcgggaaacatcactgctcgtgatcctgccattatgggactccgaaatatactcaaagtttgctgtacccatgacatcacaacaataagcattcctctcttgctggtacatgatatgtcagaggaaatgactataccctggtgcttaaggagagcggaacttgtgttcaagtgtgtcaaaggtttcatgatggaaatggcttcatgggatggaggaatttctaggacagtgcaatttctagtaccacagagtatttctgaagaaatgttttatcaacttagtaacatgcttccccagatcttccgagtatcatcaacactcactctgacatccaagcactaaacccttatagattgacatgctggcagaagatgattgttaaactctccaggaacttgtgctatgctgggaatctgtcaagcaaaagatgcccagaaagagaacttgcagctcaatccacaaatcaagatacatgtgtgtgaaaccattccaaaaatttatatactgcacaaactggtgatcaacccctaacttaaacacttaaagtctctttatgaatttctctttttttcttctctgtgttacctgtgaatattagtaatctaaaactttttatttatcacacatggacacttgggaaaggaaacttgattatatttacatggaggcatttgactttttcaagaggcttgactcgtctcaggtgcaatccttaattaaacatacaaacaaaa

SEQ ID NO: 118153 - DNA, 1049 bp, Homo sapiens
  Payload ID: 3123
  Gene Symbol: C12orf4
  Gene Name: chromosome 12 open reading frame 4
  ENST ID: ENST00000541014
  CDS Start-End: 438-1049
tggaaaaagtatgtcggcaagtcagctggtttcccagtgcaggacgcgctgacagctcgagtgagcggactgcccaggacttcggaactagacgagacttaaaagaagctctgactcagtttatagaagaagaatccctcagcgattatgatagagatgctgaagcatccctggcagctgtgaaatcaggtgaagtagatttacatcagctggcgagtacatgggccaaagcttatgctgagaccacgttagagcatgcaaggcctgaagaacccagctgggatgaagattttgcagatgtgtaccatgacttaattcattctcctgcctctgaaactctcttaaatttggaacataattactttgttagtatctcagaactgattggtgaaagagatgtggagctgaaaaaattacgagagagacaaggtattgaaatggaaaaagtcatgcaggaattgggaaaatcactgacagatcaagatgtaaattcactggctgctcagcattttgaatcccagcaagacctagaaaataaatggtcgaatgaattaaaacaatcaactgccatccaaaaacaagagtatcaagaatgggtaataaaacttcaccaagacctaaaaaaccccaacaacagctcccttagtgaggaaattaaagttcagccaagtcagttcagagaatctgtagaagcaattggaaggatttatgaggaacagagaaagttagaagaaagttttaccattcacttaggagcccagttgaagaccatgcataatttgagattgctgagagcagatatgctggacttctgtaagcataaaagaaatcatcgaagtggtgtgaaacttcatcggctccaaacagctctgtcactttattctacatctctctgtggcctggttttactagtagataatcgaattaattcatatagtggtattaaaagagattttgccacagtttgccaagaatgcactgacttccatttcccccgaattgaagagcaattagaagttgtccaacaggtggtactttatgctagaacc

SEQ ID NO: 118154 - DNA, 561 bp, Homo sapiens
  Payload ID: 3123
  Gene Symbol: C12orf4
  Gene Name: chromosome 12 open reading frame 4
  ENST ID: ENST00000542080
  CDS Start-End: 130-561
ggtgtggaaaaagtatgtcggcaagtcagctggtttcccagtgcaggacgcgctgacagctcgagtgagcggactgcccaggacttcggaactagacgagagaatgccagtcatttgcatggacgtctgatgctgctgcacagtttaccgtgctttatagaaaaagacttaaaagaagctctgactcagtttatagaagaagaatccctcagcgattatgatagagatgctgaagcatccctggcagctgtgaaatcaggtgaagtagatttacatcagctggcgagtacatgggccaaagcttatgctgagaccacgttagagcatgcaaggcctgaagaacccagctgggatgaagattttgcagatgtgtaccatgacttaattcattctcctgcctctgaaactctcttaaatttggaacataattactttgttagtatctcagaactgattggtgaaagagatgtggagctgaaaaaattacgagagagacaaggtattgaaatggaaaaagtcatgcaggaattgggaaaatcactgacagatcaagatgtaaat

SEQ ID NO: 118155 - DNA, 727 bp, Homo sapiens
  Payload ID: 3123
  Gene Symbol: C12orf4
  Gene Name: chromosome 12 open reading frame 4
  ENST ID: ENST00000544258
  CDS Start-End: 1-144
ctttatgctagaacccagcgcaggagtaaattgaaagaatcacttgattctggaaaccaaaatggaggaaatgatgataagactaagaatgctgagaggaactatttaaatgttttacctggaactacagaaaatacaagctgatgagatttttcttggcttgtagagctacacagaaaaaagagtgatggtaggaagcatggattttaatgtttgagaaagactgctccagcgttcagccttaaatactcattcattcaacaaatacttatcgagtaccttctacgtgccaggggaattttatattacacggcattctaatctctcagaaatccatgttgctttccatctctgtgtggatgaccatgtgaaatcgggaaacatcactgctcgtgatcctgccattatgggactccgaaatatactcaaagtttgctgtacccatgacatcacaacaataagcattcctctcttgctggtacatgatatgtcagaggaaatgactataccctggtgcttaaggagagcggaacttgtgttcaagtgtgtcaaaggtttcatgatggaaatggcttcatgggatggaggaatttctaggacagtgcaatttctagtaccacagagtatttctgaagaaatgttttatcaacttagtaacatgcttccccagatcttccgagtatcatcaacactcactctgacatccaagcactaaacccttatagat

SEQ ID NO: 118156 - DNA, 2776 bp, Homo sapiens
  Payload ID: 3124
  Gene Symbol: C12orf40
  Gene Name: chromosome 12 open reading frame 40
  Uniprot ID: Q86WS4
  ENST ID: ENST00000324616
  CDS Start-End: 155-2113
aggttgggcctcaggcggtggaccagaaggagcttactcgggccctgacgttgtcaggaggccctgggggatcctgctgaagctgcgatttggcgcagagctgagatgtctgagctctagacacagggacctcagtgtcaaaagatttgggaagatgaattgggtcggggggtcccggtccagggttctgatcaagcaggaaagaagaaagcaaaaggaatattttgaaaaacacaggttaaaatcaaaaatgaaatcactgggagttttatctcctgtcaaaaattctgctgtcagcttagacattcttaacctatatatggtaaatcagatatcttgcaagaagaaaattcctgaaactgtgagaaaaccaacccatgtgaacatgaatagagacataaaaatgcccctaagaaagcataatttagaacttacaatgtcgcctcactgtgtaccttctaaactctgccttgatgatacagaaaccaatgtaaactgtcaaagactaagtagcaaggaagatcttggcccagtccagtcacaaggcatggactcatatagtatgcttcaccctcagttcagcaaaatagagaactgcagtttcactccatcatctttttcagtggagttaccttctaacagacatatttcaaaactaaatttcacatctggaatagcacctactcctcagaaacttgcatatgaaaaaaagcagaatgaccagcgcagtactgttaactgttctgattccttgctttccaaattaaataaaagtcaagatgttttcagtccatcacataaaactacacgatttgggacattatttgaaagattaaacagtctaggaaataggaatttacttactaaaagccctgctgtaattatggatgaagattgtagaagcacggatgaaataagacagtcagactacattactgaaaaacactcaatacagcatatttgggggaaaaatggaaaggaagtttcaaattttcttgaagatgtgaaccagtctactcctaaccttctatcagagaattgtgactcttttgttagtcaaaatatgatcaatgtattaaacatagatgagcaaaggataaagaaaacatttaacaagtgtgattatgatagtatgggagatacttgtgtagtcactagttctgataaaaaccatgtcactgacagatgcattagaaacatttttacagttccagagttgacttttagtaattcgactttgaataaaacaagttatccagaaaaatgtcagccaaacaagaagtatcagagagagtataacaaaaatgaaagaaatgatcttagtacatcttttgagaacgattactacccaagcagctctgaaagaaaagaaaaatttgaaaatgattaccaagagaagacaccacagaaaagtattcagaaatatccagcaaactctatgggaaatataccttcggaagaattgcactctaagcagtcatgggactttggacttgatgagattctgatggaagaaggaggaatatattctttaaaaagcaagcgaatatctactaagaaaatctctcttgattctgcacagagtagtcggtctactagttactctccaagaccaacagacagctgtttcagttctagttcagatttgccatctgaagatgaagatcaaatatcacagcaaattgaagattcaaataggatgaccatcaaaaccaaggaaaaaatgaataatttttatgtagaaaggatggcaaaactttcaggtgacaggattgttaaaaacgatgacaaaattcacaaacagaatgagaatttctaccagttctcagtgaaaaataatacagatcagtttccacagttgcagtgcaattcagcccacattttgcaaaacaaaaccaatgataactgcgttctgcaggctgcaaggtgtgatgcagggatacaaacagagagtgaatctgtaatggaggaaaaattagatgttgccatacagtgtgatctaatttcaaaatgtacatgtagaagtgatgtttctctttgcaaccttgaaaggtgcagtggaaatattaaggcagataccactggagggcaggaaatccataagaacaactaatattctaaaatctctacctaggatgtagaatttcacttgcccttagaaaacaacagtaaatgttgaaaatttcattaacatgataagaaatgagaaaaagtagctaagcataagctgacagtgttcagggtgtatattcacggttcatgttaaaacattttaatattattaatgtatgtatttaatttgtatatagccatttccttaatagctttggtatatggtagagtttttagaaaataatatatttgtaaatgtactagcgtttttatgtgattattcagtatattacaatgatgcgctgttatttatgggttaaaatatgcttaattgcttccttccttgtagcatttattttaatattctttgcagttgcattttctggcaaaaatgttccctttcaagatatttaagatagaaaataatacctaatatattttatgtcctcattataataattttgttagctacttctctttaatattacagtcctatttaaaaattctagcattaatttgtagataacacatatcttctatttgcataacatagtttttttgttggtgctattaattcaaaggaaaatgttctgtaggattaaaagatgttttaatgtttttataaaataattgtttgaaattaaaaaatgatttatgttactaa

SEQ ID NO: 118157 - DNA, 1656 bp, Homo sapiens
  Payload ID: 3124
  Gene Symbol: C12orf40
  Gene Name: chromosome 12 open reading frame 40
  Uniprot ID: Q86WS4
  ENST ID: ENST00000405531
  CDS Start-End: 171-1604
cgcagaggctgttgggaggttgggcctcaggcggtggaccagaaggagcttactcgggccctgacgttgtcaggaggccctgggggatcctgctgaagctgcgatttggcgcagagctgagatgtctgagctctagacacagggacctcagtgtcaaaagatttgggaagatgaattgggtcggggggtcccggtccagggttctgatcaagcaggaaagaagaaagcaaaaggaatattttgaaaaacacaggttaaaatcaaaaatgaaatcactgggagttttatctcctgtcaaaaattctgctgtcagcttagacattcttaacctatatatggtaaatcagatatcttgcaagaagaaaattcctgaaactgtgagaaaaccaacccatgtgaacatgaatagagacataaaaatgcccctaagaaagcataatttagaacttacaatgtcgcctcactgtgtaccttctaaactctgccttgatgatacagaaaccaatgtaaactgtcaaagactaagtagcaaggaagatcttggcccagtccagtcacaaggcatggactcatatagtatgcttcaccctcagttcagcaaaatagagaactgcagtttcactccatcatctttttcagtggagttaccttctaacagacatatttcaaaactaaatttcacatctggaatagcacctactcctcagaaacttgcatatgaaaaaaagcagaatgaccagcgcagtactgttaactgttctgattccttgctttccaaattaaataaaagtcaagatgttttcagtccatcacataaaactacacgatttgggacattatttgaaagattaaacagtctaggaaataggaatttacttactaaaagccctgctgtaattatggatgaagattgtagaagcacggatgaaataagacagtcagactacattactgaaaaacactcaatacagcatatttgggggaaaaatggaaaggaagtttcaaattttcttgaagatgtgaaccagtctactcctaaccttctatcagagaattgtgactcttttgttagtcaaaatatgatcaatgtattaaacatagatgagcaaaggataaagaaaacatttaacaagtgtgattatgatagtatgggagatacttgtgtagtcactagttctgataaaaaccatgtcactgacagatgcattagaaacatttttacagttccagagttgacttttagtaattcgactttgaataaaacaagttatccagaaaaatgtcagccaaacaagaagtatcagagagagtataacaaaaatgaaagaaatgatcttagtacatcttttgagaacgattactacccaagcagctctgaaagaaaagaaaaatttgaaaatgattaccaagagaagacaccacagaaaagtattcagaaatatccagcaaactctatgggaaatataccttcggaagaattgcactctaagcagtcatgggactttggacttgatgagattctgatggaagaaggaggaatatattctttaaaaagcaagcgaatatctactaagaaaatctgtcagtataactgtataagttaattttactctattttaaaaactaacaattaaatagaaatcagttaaatttgaa

SEQ ID NO: 118158 - DNA, 3061 bp, Homo sapiens
  Payload ID: 3124
  Gene Symbol: C12orf40
  Gene Name: chromosome 12 open reading frame 40
  Uniprot ID: Q86WS4
  ENST ID: ENST00000468200
  CDS Start-End: 212-1396
actcgggccctgacgttgtcaggaggccctgggggatcctgctgaagctgcgatttggcgcagagctgagatgtctgagctctagacacagggacctcagtgtcaaaagatttgggaagatgaattgggtcggggggtcccggtccagggttctgatcaagcaggaaagaagaaagcaaaagaaactgtgagaaaaccaacccatgtgaacatgaatagagacataaaaatgcccctaagaaagcataatttagaacttacaatgtcgcctcactgtgtaccttctaaactctgccttgatgatacagaaaccaatgtaaactgtcaaagactaagtagcaaggaagatcttggcccagtccagtcacaaggcatggactcatatagtatgcttcaccctcagttcagcaaaatagagaactgcagtttcactccatcatctttttcagtggagttaccttctaacagacatatttcaaaactaaatttcacatctggaatagcacctactcctcagaaacttgcatatgaaaaaaagcagaatgaccagcgcagtactgttaactgttctgattccttgctttccaaattaaataaaagtcaagatgttttcagtccatcacataaaactacacgatttgggacattatttgaaagattaaacagtctaggaaataggaatttacttactaaaagccctgctgtaattatggatgaagattgtagaagcacggatgaaataagacagtcagactacattactgaaaaacactcaatacagcatatttgggggaaaaatggaaaggaagtttcaaattttcttgaagatgtgaaccagtctactcctaaccttctatcagagaattgtgactcttttgttagtcaaaatatgatcaatgtattaaacatagatgagcaaaggataaagaaaacatttaacaagtgtgattatgatagtatgggagatacttgtgtagtcactagttctgataaaaaccatgtcactgacagatgcattagaaacatttttacagttccagagttgacttttagtaattcgactttgaataaaacaagttatccagaaaaatgtcagccaaacaagaagtatcagagagagtataacaaaaatgaaagaaatgatcttagtacatcttttgagaacgattactacccaagcagctctgaaagaaaagaaaaatttgaaaatgattaccaagagaagacaccacagaaaagtattcagaaatatccagcaaactctatctggtgtacaaaatgttctgagtttaaggtgatttttacactcatccattatgtgttgatgttaaatttattccttaaaagtttgagaactgccttccaggcttttctgaataatgacctgcaattataagtaactaaagaaaactttattttagctagtagtttctagctaaaatagtcctaactttcttggggaaatataccttcggaagaattgcactctaagcagtcatgggactttggacttgatgagattctgatggaagaaggaggaatatattctttaaaaagcaagcgaatatctactaagaaaatctctcttgattctgcacagagtagtcggtctactagttactctccaagaccaacagacagctgtttcagttctagttcagatttggacacatgccgtgggtatcctgagctgccatttaagaagtctagctaccctaaagcctccatgctggagagaccatgtggagggaccacacaaagattgacagtaagatgcttgagaagtcccagctttcccagccccagcgttttgggtcttctcagcccaagcactagatgtgcagccccagcccatgcctgggaaaaacttccgctattcctttgctgactgcaggaatgcttgagatgcatggacctattcatttttaaaaatttattgagcacagggtccggttccaagatggttgaataggaacagctccagtctacagctcccagcatgagcgacgcagaagatgggtgatttctgcatttccaactgaggattggacaattaaatgaggatttttctgcccactgatactgacatgttctgcactattcaggtgtccgttattcaggtgcaaagaagacaagatataaaataaggcccagaagtgcagtccaggagtatggagtagggcagaaattgaaactgaaactgtggaacgagaaaccatggataagggaggactacagtacatcaaatggaccaatcatggctttctgcaggtcctcatattatgtagcctgtcattcagggatatgtgatctgaatgacaataagaagccagacgtatgtgaagatggtggaaggacattctatgagtaaacagcaagtgcaacgtaacgttgattacaattcacctacccattactttggaaatagaatgaggtgcatctcaccaaccatcctcctgcagaaagccctctgacctgtgaaacaggaagctgtaaatgtctggaaagtatgtggattggacacatgtcttggattaaattatcttacacgccactggaatgaacctgcctgattctccactttctctgcttcattctgagcgttcttgcctcccctgggtactggaaagagaatggagccttagaatcaatgctcccaacccacccattctttttcccggcactttccacctttacaactacgcctccaaaagtttcagtctattgcagctatggtgggagccacataggaacttctcagggatgcaaaattcatgaaccacaattccctggccagaagaaccacatagacttatctattaccaggatcggagagagcgggcccctttcttcctagatttcactttttctcttaatttattctgacaatgaggagacagaaaaagctgcatgatagtgatgtagagtctaatggtgtatctctggatacacaaagagccatctcaggtaacaactttaatccttgaaatgagactattatcttcctgttaattattccattatttcctaatgtttttaataataaaaccccccaaacaac

SEQ ID NO: 118159 - DNA, 1513 bp, Homo sapiens
  Payload ID: 3125
  Gene Symbol: C12orf42
  Gene Name: chromosome 12 open reading frame 42
  Uniprot ID: Q96LP6
  ENST ID: ENST00000378113
  CDS Start-End: 266-1348
gagcgcttggaaccacgctgcgccgcgtccccaggacccagcagagtgctccagctcccgcggaggaggctgcgggcggcgccccgggatagggaccctgcagctccaggtagacgcagggagcgcgggactcgccccctggcagggtgaggtagagccggaccgtttgctctctgctgctccccgggactccagccgcgcccgtgagaagaggcagcacggcagcaaaggccaaggagcggagggagttgaacttgtcaaattaatgtctacagtgatatgtatgaaacaaagggaagaagaattcttgctaaccatcagaccttttgcaaacaggatgcagaaatccccttgctatattcccattgtgagcagtgccaccctgtgggatagaagcacacccagtgcaaagcacatcccttgttatgaaagaacttcagtaccctgctccagattcattaatcacatgaagaatttctctgaatctcctaaatttcgtagtctacactttctgaattttccagtatttccagaaaggactcaaaattcaatggcgtgtaaaagactacttcatacttgccagtacatagtccccaggtgttctgtaagcacagtttcttttgatgaagaaagctatgaagaattccgttcctctccagcaccatccagtgaaactgatgaggccccattgatttttactgccagaggagaaactgaggagagagccagaggagcacccaagcaggcttggaacagttcatttttggaacaactggttaaaaagcctaactgggcacactcagtaaatcctgttcacctggaggctcagggcatacacatcagtagacacacaagacctaagggccagcccttgagcagtcccaagaaaaattctggttctgccgccagaccttccactgccatcggcctctgcaggaggagccagacgcccggcgctctgcagagcaccggcccgagtaacacagagctcgagccggaggagaggatggcagtcccagcaggcgctcaggcacaccccgacgacatccaaagcagactcctgggcgcgtccggaaatcccgtcggaaaaggcgcggttgccatggcgccggagatgctccccaagcatcctcataccccgcgggacaggaggcctcaggcggacacctccctccatggcaatctggcaggagcgccccttcctctgctggccggtgcttccacccatttcccctccaagaggttaataaaggtttgctcctcagcacccccccgcccaacccggcgtttccatacggtttgttcacaggccctttctaggccggtggtgaatgctcacttacattgaccgctgcgagggaattgttcggcgagtgctgcccatcttcaaatcaatgcctgctcagaacaacagaaagggcctcagatgtactggtttccacagaaccattgttaggcttttgtgaagcatttttgaacctaataaataatgtcaaaagtccctagcgcagcc

SEQ ID NO: 118160 - DNA, 2090 bp, Homo sapiens
  Payload ID: 3125
  Gene Symbol: C12orf42
  Gene Name: chromosome 12 open reading frame 42
  Uniprot ID: Q96LP6
  ENST ID: ENST00000547347
  CDS Start-End: 89-412
agagtgctccagctcccgcggaggaggctgcgggcggcgccccgggatagggaccctgcagctccagggagttgaacttgtcaaattaatgtctacagtgatatgtatgaaacaaagggaagaagaattcttgctaaccatcagaccttttgcaaacaggatgcagaaatccccttgctatattcccattgtgagcagtgccaccctgtgggatagaagcacacccagtgcaaagcacatcccttgttatgaaagaacttcagtaccctgctccagattcattaatcacatgaagaatttctctgaatctcctaaatttcgtagtctacactttctgaattttccaggaagtcaccatggacaggccacacagaaattacagggagctatggttcttcaccttgaagagtaaaatagccactatgaggagacctgctgtgagtgcatcagtctgaaactgctcacatattaacgctgactcagacccatgaagtcatcagatgtcaccactcctagaagccctttcctgcacttcctggctcctcaggtttcctgcttcatcctgcacctgccttcttgaaagaaaacaagacatcagatacttattcaaataatggaatagctgatcaactgggtctccacacaaaagagagttatccatgataaaagaacaactttttcatgcattatatgtgacacatgcatgctttctcttaagatttatgaacccatgactattagtattgttaatataatcaaaccttttacagcctcactccaaagcttaaacttattatcaattgccttctagaggggagtcaatcaatttcataagtgcttaaacacctgcactctctttgaatcggggaaaaatcaataccaagtcctcattttctccaagtatataatgcaaccaaatcttgcttacaagttcaggaggatttgtgattcaacagtcacactttaaagacgtcatgagcttgatcctgagtggtggcggttttttttttaatgaaaaattattaattcatttctggatgctaatgaaaaaacaggtcactgtcggggaaaaataaaacagactctgctaatactgcttaggattaagtcccctgtttgtgttctgcataggtgtgttttgcaacaaacacaaatcacatacctattaaccaggcatggtgccagtctctgaatatacagatgtggctgagacaggacccctgccttcaggatgctcatgatctattaatggaagaagatgtataaacagcttactccaattgttatacaaaacaataatttaattgcgtgtagggggataaagaagaggagacagagaaaaggaaagaaataagaaaagaaaaaaaaaggacagtgtattagatgcttattgctaccagccaggctagaacttccaattctataatcactcttgatttttacaatatgttgtaaaaacaaagaggaaggtgtattttcaaaatactattaatttcttttttgttatatgtttttcttctttgttattttgatacgattttgaaaagtagagtctaatataggaaggactatttattcatcacaataacaactaaagtttatgtttttccttctctgcttcagattttgtttaaatataagaactggaaaaccaaagctttgtcatctctaaaacaccttcactgagaaacgaagtgtccttctcatcccatggggctgttctgggtatcaagtgactgtttagcttggccatttgctgctcctacctcaaatagaaggtttcctgtgactttctttgtccaacggaacatgatagaactaacgtagcaccagttaccaccttggtcctcaagaggccttccaccctttagctctcttggaatccttccttccccaaaggaacaagtctgcactaaccaatgaaggatgagaaagcacaaggaggagagccaaggcaccccagtaactgcagaagcagagctgttgacagatgcatgggggagtccagccaagaccagaattgccatgctgagtgcagtctaaattgccaaatttcagattcaggaataaacaaatgaatttttattgca

SEQ ID NO: 118161 - DNA, 831 bp, Homo sapiens
  Payload ID: 3125
  Gene Symbol: C12orf42
  Gene Name: chromosome 12 open reading frame 42
  ENST ID: ENST00000552578
  CDS Start-End: 209-831
ccgcggaggaggctgcgggcggcgccccgggatagggaccctgcagctccaggtagacgcagggagcgcgggactcgccccctggcagggtgaggtagagccggaccgtttgctctctgctgctccccgggactccagccgcgcccgtgagaagaggcagcacggcagcaaaggccaaggagcggagggagttgaacttgtcaaattaatgtctacagtgatatgtatgaaacaaagggaagaagaattcttgctaaccatcagaccttttgcaaacaggatgcagaaatccccttgctatattcccattgtgagcagtgccaccctgtgggatagaagcacacccagtgcaaagcacatcccttgttatgaaagaacttcagtaccctgctccagattcattaatcacatgaagaatttctctgaatctcctaaatttcgtagtctacactttctgaattttccagtatttccagaaaggactcaaaattcaatggcgtgtaaaagactacttcatacttgccagtacatagtccccaggtgttctgtaagcacagtttcttttgatgaagaaagctatgaagaattccgttcctctccagcaccatccagtgaaactgatgaggccccattgatttttactgccagaggagaaactgaggagagagccagaggagcacccaagcaggcttggaacagttcatttttggaacaactggttaaaaagcctaactgggcacactcagtaaatcctgttcacctggaggctcagggcatacacatcagtagacacacaagacctaagggccagcccttgagcagtcccaagaa

SEQ ID NO: 118162 - DNA, 1336 bp, Homo sapiens
  Payload ID: 3125
  Gene Symbol: C12orf42
  Gene Name: chromosome 12 open reading frame 42
  Uniprot ID: Q96LP6
  ENST ID: ENST00000548883
  CDS Start-End: 89-1171
agagtgctccagctcccgcggaggaggctgcgggcggcgccccgggatagggaccctgcagctccagggagttgaacttgtcaaattaatgtctacagtgatatgtatgaaacaaagggaagaagaattcttgctaaccatcagaccttttgcaaacaggatgcagaaatccccttgctatattcccattgtgagcagtgccaccctgtgggatagaagcacacccagtgcaaagcacatcccttgttatgaaagaacttcagtaccctgctccagattcattaatcacatgaagaatttctctgaatctcctaaatttcgtagtctacactttctgaattttccagtatttccagaaaggactcaaaattcaatggcgtgtaaaagactacttcatacttgccagtacatagtccccaggtgttctgtaagcacagtttcttttgatgaagaaagctatgaagaattccgttcctctccagcaccatccagtgaaactgatgaggccccattgatttttactgccagaggagaaactgaggagagagccagaggagcacccaagcaggcttggaacagttcatttttggaacaactggttaaaaagcctaactgggcacactcagtaaatcctgttcacctggaggctcagggcatacacatcagtagacacacaagacctaagggccagcccttgagcagtcccaagaaaaattctggttctgccgccagaccttccactgccatcggcctctgcaggaggagccagacgcccggcgctctgcagagcaccggcccgagtaacacagagctcgagccggaggagaggatggcagtcccagcaggcgctcaggcacaccccgacgacatccaaagcagactcctgggcgcgtccggaaatcccgtcggaaaaggcgcggttgccatggcgccggagatgctccccaagcatcctcataccccgcgggacaggaggcctcaggcggacacctccctccatggcaatctggcaggagcgccccttcctctgctggccggtgcttccacccatttcccctccaagaggttaataaaggtttgctcctcagcacccccccgcccaacccggcgtttccatacggtttgttcacaggccctttctaggccggtggtgaatgctcacttacattgaccgctgcgagggaattgttcggcgagtgctgcccatcttcaaatcaatgcctgctcagaacaacagaaagggcctcagatgtactggtttccacagaaccattgttaggcttttgtgaagcatttttgaacctaataaataatgtcaaaagtccctagcgcagcc

SEQ ID NO: 118163 - DNA, 1532 bp, Homo sapiens
  Payload ID: 3125
  Gene Symbol: C12orf42
  Gene Name: chromosome 12 open reading frame 42
  ENST ID: ENST00000548048
  CDS Start-End: 498-1379
agtgctccagctcccgcggaggaggctgcgggcggcgccccgggatagggaccctgcagctccagggagttgaacttgtcaaattaatgtctacagtgatatgtatgaaacaaagggaagaagaattcttgctaaccatcagaccttttgcaaacaggatgcaggtagtgaccttcagtttataagaagaaaagagttttgaggtgtgattatggtctcctaatgtctctgagacacagtttcccaatctagaaaatggaaataatggtatctccctggatgaatgctgaaatccccttgctatattcccattgtgagcagtgccaccctgtgggatagaagcacacccagtgcaaagatcaagctattgaagcttagggaggtgaagtaattttcctgggatcacatagccagtaaatggtagaggcaggattccaactcagcacatcccttgttatgaaagaacttcagtaccctgctccagattcattaatcacatgaagaatttctctgaatctcctaaatttcgtagtctacactttctgaattttccagtatttccagaaaggactcaaaattcaatggcgtgtaaaagactacttcatacttgccagtacatagtccccaggtgttctgtaagcacagtttcttttgatgaagaaagctatgaagaattccgttcctctccagcaccatccagtgaaactgatgaggccccattgatttttactgccagaggagaaactgaggagagagccagaggagcacccaagcaggcttggaacagttcatttttggaacaactggttaaaaagcctaactgggcacactcagtaaatcctgttcacctggaggctcagggcatacacatcagtagacacacaagacctaagggccagcccttgagcagtcccaagaaaaattctggttctgccgccagaccttccactgccatcggcctctgcaggaggagccagacgcccggcgctctgcagagcaccggcccgagtaacacagagctcgagccggaggagaggatggcagtcccagcaggcgctcaggcacaccccgacgacatccaaagcagactcctgggcgcgtccggaaatcccgtcggaaaaggcgcggttgccatggcgccggagatgctccccaagcatcctcataccccgcgggacaggaggcctcaggcggacacctccctccatggcaatctggcaggagcgccccttcctctgctggccggtgcttccacccatttcccctccaagaggttaataaaggtttgctcctcagcacccccccgcccaacccggcgtttccatacggtttgttcacaggccctttctaggccggtggtgaatgctcacttacattgaccgctgcgagggaattgttcggcgagtgctgcccatcttcaaatcaatgcctgctcagaacaacagaaagggcctcagatgtactggtttccacagaaccattgttaggcttttgtgaagcatttttgaacctaataaataatgtcaaaagtc

SEQ ID NO: 118164 - DNA, 1557 bp, Homo sapiens
  Payload ID: 3125
  Gene Symbol: C12orf42
  Gene Name: chromosome 12 open reading frame 42
  ENST ID: ENST00000551134
  CDS Start-End: 227-499
agcagagtgctccagctcccgcggaggaggctgcgggcggcgccccgggatagggaccctgcagctccaggtagacgcagggagcgcgggactcgccccctggcagggtgaggtagagccggaccgtttgctctctgctgctccccgggactccagccgcgcccgtgagaagaggcagcacggcagcaaaggccaaggagcggagggagttgaacttgtcaaattaatgtctacagtgatatgtatgaaacaaagggaagaagaattcttgctaaccatcagaccttttgcaaacaggatgcagaaatccccttgctatattcccattgtgagcagtgccaccctgtgggatagaagcacacccagtgcaaagcacatcccttgttatgaaagaacttcagtaccctgctccagattcattaatcacatgaagaatttctctgaatctcctaaatttcgtagtctacactttctgaattttccaggaccatttcactgacctgaaaggatatatttaaatgtgcctgtccaatttactacctaagagataatgaagtttttaggacaactgataaagcagtatttccagaaaggactcaaaattcaatggcgtgtaaaagactacttcatacttgccagtacatagtccccaggtgttctgtaagcacagtttcttttgatgaagaaagctatgaagaattccgttcctctccagcaccatccagtgaaactgatgaggccccattgatttttactgccagaggagaaactgaggagagagccagaggagcacccaagcaggcttggaacagttcatttttggaacaactggttaaaaagcctaactgggcacactcagtaaatcctgttcacctggaggctcagggcatacacatcagtagacacacaagacctaagggccagcccttgagcagtcccaagaaaaattctggttctgccgccagaccttccactgccatcggcctctgcaggaggagccagacgcccggcgctctgcagagcaccggcccgagtaacacagagctcgagccggaggagaggatggcagtcccagcaggcgctcaggcacaccccgacgacatccaaagcagactcctgggcgcgtccggaaatcccgtcggaaaaggcgcggttgccatggcgccggagatgctccccaagcatcctcataccccgcgggacaggaggcctcaggcggacacctccctccatggcaatctggcaggagcgccccttcctctgctggccggtgcttccacccatttcccctccaagaggttaataaaggtttgctcctcagcacccccccgcccaacccggcgtttccatacggtttgttcacaggccctttctaggccggtggtgaatgctcacttacattgaccgctgcgagggaattgttcggcgagtgctgcccatcttcaaatcaatgcctgctcagaacaacagaaagggcctcagatgtactggtttccacagaaccattgttaggcttttgtgaagcatttttgaacctaataaataatgtcaaaagtc

SEQ ID NO: 118165 - DNA, 4469 bp, Homo sapiens
  Payload ID: 3126
  Gene Symbol: C12orf43
  Gene Name: chromosome 12 open reading frame 43
  Uniprot ID: Q96C57
  ENST ID: ENST00000288757
  CDS Start-End: 14-802
gcggtggttcaagatggcggcgcccagtggcacagtgagcgattcggaaagtagtaacagcagtagcgatgcggaggagctggagcggtgccgcgaggcggcaatgccggcttggggcttggagcaacgcccgcacgtggcagggaagccaagagccggtgctgcaaatagccagttgtcaacctcccaaccgagcctcaggcataaggtgaatgagcatgaacaagatggcaacgagcttcagaccacccctgaattccgagcccacgtagccaagaagctgggagccctgctggacagcttcattaccatctcagaagcagcaaaggagccagcaaaagctaaggtacagaaagtcgctttggaggatgatggtttccgccttttcttcacatctgtccctggaggccgtgagaaggaagagtctccccaaccccgccgaaagcgacagccctccagctccagtgaggacagtgacgaggagtggcggcggtgccgggaggcagctgtgtcggcgtccgacatcctacaggagtcagccatccacagccctggaacagtggagaaggaggcaaagaagaaaaggaagttgaaaaagaaagccaagaaggtggccagtgtcgactcggctgtcgctgccaccacccccaccagcatggccacagtccagaagcagaagtcaggtgagctcaacggggaccaggtgtcgcttgggaccaaaaagaagaaaaaggcaaagaaggccagcgagacctctccattcccaccagcaaagagtgctacagctatacctgcaaactgaacccagccatgggcacagggctcagccagctccaaggacaaggtgtcccccccaccctggggacaaggcatttccaagccccacctccctctccaagttcaaggactgggctggcaaacccagactgcccatgagaccctgatggtgatgaaggcttgctcgagagttgggccaaaaaagtggctgtagggtgagaagaccaatcaaggcctgcccctctgtgctcccacggagggctggcgggggcgctgtggttccagaacatttcatgacctcaggaaaaaaggaaccttccagttatttgagactagtggccaagtggtgaaacctccatctccctagaactgtctgaggtgggcaggggaagggagaccttccccaccacctccttagcctggtgtgagaaacagtttttagaaaatgagagaagggatccccaagaggccaaggcccagagaaacttttgttcttctctccttagcccacatagacttcacagaatcgtctgagaaaggagagctttttcacccctggctttctagaattttctttgtctgcatttgtgaatataccacacatgatggtgtctctgagccgaccagattatggaaactcaattgtcagaggacccaaaacaaaacttagagtgatttggatattgcctctctgtcaatgctgaaccttaagacattttaagtaaacatcctcctcctctctacacccccaggatttgtgcgttcaccccacccaagacttcaggaagtgtcatagcactcgtggactaggtttcatgggacaaaggcattctgcaagaagtagaagcttgtggccgggtgcagtggctcatgcctgtaatccaagcattttgagaggccaaggaggtggatcaattgaggccaggagtttgagaccagcctggccaacatggcgagaccccatctctactaaaaatacaaaaattagctgagcatgttgacacacgcccgtaatcccagctactcaggaggctgaggtgggagaatcgcttgaacccaggaggtgcaggttgcagtgagccgagattgcgccactgcactctagcctaagcaatggagcaagaccctatctcaaaaaaaaaaaaagaaaaagaaaaagaaaagaagtagaagctcatggccagggatggtggctcacacctgtaatcccagcactttgggaggccgaggcaggtggatcacttgagccgagttccagaccagcctaggcaacatggtgaaacctcgtctctataaaaaaaagaatacaaaaattagttgggcatggtagtgagcgcctgtgaggctgcttgtgaggctgaggtgggaggatccctttagtccaggagttcaaggctgcagtgagctgtataatgccactgcagtccagcctgggtgacagtgagaccctgtctccaaaacaaaatttttttaaaaagtagaagcttgaggttaagatgaaatctggctttgtcattagagtctcagcagagcaagaaaagcagagatgtggggtgtgagagcgtgggtgctggagcctgtctcctcttcgcaggcctctggcctgccccagcctcccgctacctgcccaaaccccatctgaatgatttgtggacaagcaagaagtttccaccgcatttctccttgactttactaaaagttaaataaacgtgccactcgccccggctggctacaagctgcagggggtgccgggtcaccccaggccttttcctgaatcccagggtagacgcggtacactgaaggccaggttctcagcagcaggcccagggatgtgggaccatgcttgtcctgggttcacaggctcctttgtccctcctggcagtgctcaggacctcagactcctcagggtggctgcgaactgccctcagccagccaggcccccaggcttctgagtgttagtcctgtccacacaggtagctcctgtgccctggggtcacctctttcttctcctgggcacctcagcttggccagttccccggccctgctcagctgctcgggccttgctgccttgtgagctcagctactcctgccccaaacaagggcagggtctgcagggcgctcgagacagaggagctgccccaccaggacctggacttggcacgggttgcgaggctcccacaggagtaaggacgacttcccagccccgaagtagccttcccagtagaggcaggaggccaggctggcctcagaggcatgatgctcttgggaacaaatacaggaaagctggaggtcatggggcctgggagagggaatcgctggggatgggaagccaggagagccctgcctgccttccctgttagcttcggcctccctgggctcaggcgttagagccccaggctctggcacagagtagccacccaggaaatgcctgtgtgagtaggtgatggggtcagtacaaatggcatgtgggtcactagctggaaggagttggggcaggaaggagtggcccggtgggtacattggtgacagaacaaggccacgctgatccagggcctctcagagctcagcaggtcacagctacacaggcctgtgtcctgagaagtgtggctgccagagtggtgtagcggtcccagggctctccataggcccaggctgggggtgcccaagtcataggccgcccccttcagttccaagtaagaagactgtatcccacgaagcagcgacagtccctcctacatctgccatgaacaggctttgctcctagctctccacgaccccctcctgtgcaccccgagcagcctccacgggttggggcgcctcagagccctccctttctgatgcatcagagcagagtggggagcgaggcacagctgtccaggaagggccacggttgctcggcaggctcaggtcctccaggcagggctggctgctgccctcatcaccccccaagcaggcagtacaggccccagggcccaggtgccgtggttactgggaggaagaggccatctgggtggagatgaaggtctcgatgacgctgtggttggatggcagcaggtggctctggccattgctggagtctgagctctggtacagcaccaggctgctggaggacactgcagaggcaaacaaggctgctagccacccaccaggcacccacacccaccccacctgcctgtccctaggggtactcaggatggggaggcagggccacacctcctggatcacagcagataacaggaaccccaaagtcacacctctaccctcggttcttcaaagggagcctcccagccagggtccacggccgcccatggagtggcctgagtacatcttagtgtgaacactggagaagccccggtgagatgccgaggtaggtagttgtacgtgttggcttggctaggctgagtcaaacactaatctaggcgctgctgtgaatgcaggtgctttgtagatgtggttaatgccacaatcagttggctttgagtgaaggagattaccctgaaaatatgggtgggcctcctacatcagtggaaggccgtaagagcaaaaaccggtttcccagagaaggaattctgcctcaaggctgcagaattcactccccagagctgccagcaacagatttcaggcctgccagccccccgcagacacgggccaagtccttcaaataaatctgttggttctgtgttcctggagaa

SEQ ID NO: 118166 - DNA, 2397 bp, Homo sapiens
  Payload ID: 3126
  Gene Symbol: C12orf43
  Gene Name: chromosome 12 open reading frame 43
  ENST ID: ENST00000445832
  CDS Start-End: 1-666
atgttctgtcaaaacccaggtgctgcaaatagccagttgtcaacctcccaaccgagcctcaggcataaggtgaatgagcatgaacaagatggcaacgagcttcagaccacccctgaattccgagcccacgtagccaagaagctgggagccctgctggacagcttcattaccatctcagaagcagcaaaggagccagcaaaagctaaggtacagaaagtcgctttggaggatgatggtttccgccttttcttcacatctgtccctggaggccgtgagaaggaagagtctccccaaccccgccgaaagcgacagccctccagctccagcagtgaggacagtgacgaggagtggcggcggtgccgggaggcagctgtgtcggcgtccgacatcctacaggagtcagccatccacagccctggaacagtggagaaggaggcaaagaagaaaaggaagttgaaaaagaaagccaagaaggtggccagtgtcgactcggctgtcgctgccaccacccccaccagcatggccacagtccagaagcagaagtcaggtgagctcaacggggaccaggtgtcgcttgggaccaaaaagaagaaaaaggcaaagaaggccagcgagacctctccattcccaccagcaaagagtgctacagctatacctgcaaactgaacccagccatgggcacagggctcagccagctccaaggacaaggtgtcccccccaccctggggacaaggcatttccaagccccacctccctctccaagttcaaggactgggctggcaaacccagactgcccatgagaccctgatggtgatgaaggcttgctcgagagttgggccaaaaaagtggctgtagggtgagaagaccaatcaaggcctgcccctctgtgctcccacggagggctggcgggggcgctgtggttccagaacatttcatgacctcaggaaaaaaggaaccttccagttatttgagactagtggccaagtggtgaaacctccatctccctagaactgtctgaggtgggcaggggaagggagaccttccccaccacctccttagcctggtgtgagaaacagtttttagaaaatgagagaagggatccccaagaggccaaggcccagagaaacttttgttcttctctccttagcccacatagacttcacagaatcgtctgagaaaggagagctttttcacccctggctttctagaattttctttgtctgcatttgtgaatataccacacatgatggtgtctctgagccgaccagattatggaaactcaattgtcagaggacccaaaacaaaacttagagtgatttggatattgcctctctgtcaatgctgaaccttaagacattttaagtaaacatcctcctcctctctacacccccaggatttgtgcgttcaccccacccaagacttcaggaagtgtcatagcactcgtggactaggtttcatgggacaaaggcattctgcaagaagtagaagcttgtggccgggtgcagtggctcatgcctgtaatccaagcattttgagaggccaaggaggtggatcaattgaggccaggagtttgagaccagcctggccaacatggcgagaccccatctctactaaaaatacaaaaattagctgagcatgttgacacacgcccgtaatcccagctactcaggaggctgaggtgggagaatcgcttgaacccaggaggtgcaggttgcagtgagccgagattgcgccactgcactctagcctaagcaatggagcaagaccctatctcaaaaaaaaaaaaagaaaaagaaaaagaaaagaagtagaagctcatggccagggatggtggctcacacctgtaatcccagcactttgggaggccgaggcaggtggatcacttgagccgagttccagaccagcctaggcaacatggtgaaacctcgtctctataaaaaaaagaatacaaaaattagttgggcatggtagtgagcgcctgtgaggctgcttgtgaggctgaggtgggaggatccctttagtccaggagttcaaggctgcagtgagctgtataatgccactgcagtccagcctgggtgacagtgagaccctgtctccaaaacaaaatttttttaaaaagtagaagcttgaggttaagatgaaatctggctttgtcattagagtctcagcagagcaagaaaagcagagatgtggggtgtgagagcgtgggtgctggagcctgtctcctcttcgcaggcctctggcctgccccagcctcccgctacctgcccaaaccccatctgaatgatttgtggacaagcaagaagtttccaccgcatttctccttgactttactaaaagttaaataaacgtgccactcgccccggctggctacaagctgcagggggtgccgggtca

SEQ ID NO: 118167 - DNA, 1033 bp, Homo sapiens
  Payload ID: 3126
  Gene Symbol: C12orf43
  Gene Name: chromosome 12 open reading frame 43
  ENST ID: ENST00000539736
  CDS Start-End: 14-772
gcggtggttcaagatggcggcgcccagtggcacagtgagcgattcggaaagtagtaacagcagtagcgatgcggaggagctggagcggtgccgcgaggcggcaatgccggcttggggcttggagcaacgcccgcacgtggcagggaagccaagagccggtgctgcaaatagccagttgtcaacctcccaaccgagcctcaggcataaggtgaatgagcatgaacaagatggcaacgagcttcagaccacccctgaattccgagcccacgtagccaagaagctgggagccctgctggacagcttcattaccatctcagaagcagcaaaggagccagcaaaagctaaggtacagaaagtcgctttggaggatgatggccgtgagaaggaagagtctccccaaccccgccgaaagcgacagccctccagctccagcagtgaggacagtgacgaggagtggcggcggtgccgggaggcagctgtgtcggcgtccgacatcctacaggagtcagccatccacagccctggaacagtggagaaggaggcaaagaagaaaaggaagttgaaaaagaaagccaagaaggtggccagtgtcgactcggctgtcgctgccaccacccccaccagcatggccacagtccagaagcagaagtcaggtgagctcaacggggaccaggtgtcgcttgggaccaaaaagaagaaaaaggcaaagaaggccagcgagacctctccattcccaccagcaaagagtgctacagctatacctgcaaactgaacccagccatgggcacagggctcagccagctccaaggacaaggtgtcccccccaccctggggacaaggcatttccaagccccacctccctctccaagttcaaggactgggctggcaaacccagactgcccatgagaccctgatggtgatgaaggcttgctcgagagttgggccaaaaaagtggctgtagggtgagaagaccaatcaaggcctgcccctctgtgctcccacggagggctggcgggggcgctgtggttccaga

SEQ ID NO: 118168 - DNA, 645 bp, Homo sapiens
  Payload ID: 3126
  Gene Symbol: C12orf43
  Gene Name: chromosome 12 open reading frame 43
  ENST ID: ENST00000535367
  CDS Start-End: 81-645
gggaagccaagagccggtagggtactatgtttggggagactggctgaggggcgtgggatcttcccctggagcctgagaggatggatggtgctgcaaatagccagttgtcaacctcccaaccgagcctcaggcataaggtgaatgagcatgaacaagatggcaacgagcttcagaccacccctgaattccgagcccacgtagccaagaagctgggagccctgctggacagcttcattaccatctcagaagcagcaaaggagccagcaaaagctaaggtacagaaagtcgctttggaggatgatggtttccgccttttcttcacatctgtccctggaggccgtgagaaggaagagtctccccaaccccgccgaaagcgacagccctccagctccagcagtgaggacagtgacgaggagtggcggcggtgccgggaggcagctgtgtcggcgtccgacatcctacaggagtcagccatccacagccctggaacagtggagaaggaggcaaagaagaaaaggaagttgaaaaagaaagccaagaaggtggccagtgtcgactcggctgtcgctgccaccacccccaccagcatggccacagtccagaagcagaagtcaggtgagctcaacggggaccaggtgtcgcttg

SEQ ID NO: 118169 - DNA, 585 bp, Homo sapiens
  Payload ID: 3126
  Gene Symbol: C12orf43
  Gene Name: chromosome 12 open reading frame 43
  ENST ID: ENST00000538296
  CDS Start-End: 1-585
agcagtagcgatgcggaggagctggagcggtgccgcgaggcggcaatgccggcttggggcttggagcaacgcccgcacgtggcagggaagccaagagccggtgctgcaaatagccagttgtcaacctcccaaccgagcctcagcttcattaccatctcagaagcagcaaaggagccagcaaaagctaaggtacagaaagtcgctttggaggatgatggtttccgccttttcttcacatctgtccctggaggccgtgagaaggaagagtctccccaaccccgccgaaagcgacagccctccagctccagcagtgaggacagtgacgaggagtggcggcggtgccgggaggcagctgtgtcggcgtccgacatcctacaggagtcagccatccacagccctggaacagtggagaaggaggcaaagaagaaaaggaagttgaaaaagaaagccaagaaggtggccagtgtcgactcggctgtcgctgccaccacccccaccagcatggccacagtccagaagcagaagtcaggtgagctcaacggggaccaggtgtcgcttgggaccaaaaagaagaaaaaggcaaag

SEQ ID NO: 118170 - DNA, 1270 bp, Homo sapiens
  Payload ID: 3126
  Gene Symbol: C12orf43
  Gene Name: chromosome 12 open reading frame 43
  ENST ID: ENST00000537817
  CDS Start-End: 29-910
tctccacaatcctttgcggtggttcaagatggcggcgcccagtggcacagtgagcgattcggaaagtagtaacagcagtagcgatgcggaggagctggagcggtgccgcgaggcggcaatgccggcttggggcttggagcaacgcccgcacgtggcagggaagccaagagccggtgctgcaaatagccagttgtcaacctcccaaccgagcctcaggtactatgcactttgggttcaagtttcacttattcaacaaatactgatcccctgcgtgtgccagatgctaggcttcacgcctggcatttccaggcataaggtgaatgagcatgaacaagatggcaacgagcttcagaccacccctgaattccgagcccacgtagccaagaagctgggagccctgctggacagcttcattaccatctcagaagcagcaaaggagccagcaaaagctaaggtacagaaagtcgctttggaggatgatggtttccgccttttcttcacatctgtccctggaggccgtgagaaggaagagtctccccaaccccgccgaaagcgacagccctccagctccagtgaggacagtgacgaggagtggcggcggtgccgggaggcagctgtgtcggcgtccgacatcctacaggagtcagccatccacagccctggaacagtggagaaggaggcaaagaagaaaaggaagttgaaaaagaaagccaagaaggtggccagtgtcgactcggctgtcgctgccaccacccccaccagcatggccacagtccagaagcagaagtcaggtgagctcaacggggaccaggtgtcgcttgggaccaaaaagaagaaaaaggcaaagaaggccagcgagacctctccattcccaccagcaaagagtgctacagctatacctgcaaactgaacccagccatgggcacagggctcagccagctccaaggacaaggtgtcccccccaccctggggacaaggcatttccaagccccacctccctctccaagttcaaggactgggctggcaaacccagactgcccatgagaccctgatggtgatgaaggcttgctcgagagttgggccaaaaaagtggctgtagggtgagaagaccaatcaaggcctgcccctctgtgctcccacggagggctggcgggggcgctgtggttccagaacatttcatgacctcaggaaaaaaggaaccttccagttatttgagactagtggccaagtggtgaaacctccatctccctagaactgtctgaggtgggca

SEQ ID NO: 118171 - DNA, 1339 bp, Homo sapiens
  Payload ID: 3126
  Gene Symbol: C12orf43
  Gene Name: chromosome 12 open reading frame 43
  ENST ID: ENST00000546272
  CDS Start-End: 14-214
gcggtggttcaagatggcggcgcccagtggcacagtgagcgattcggaaagtagtaacagcagtagcgatgcggaggagctggagcggtgccgcgaggcggcaatgccggcttggggcttggagcaacgcccgcacgtggcagggaagccaagagccgtagagatggggtttcaccatgttgaccaggatggtctcgatctcttgacctcgtgatccgcctgcctcagcctcccaaagtgctgggattacaggcgtgagccaccgcgcccggccttgactccatcttaaaagtgcatctatctggagttcacccacttctcaccacatcaattactgcagcagactccgtgttcctgcctttgccccaacagtctcacgctgcacagcagccaaagatgttctgtcaaaacccaggtgctgcaaatagccagttgtcaacctcccaaccgagcctcaggcataaggtgaatgagcatgaacaagatggcaacgagcttcagaccacccctgaattccgagcccacgtagccaagaagctgggagccctgctggacagcttcattaccatctcagaagcagcaaaggagccagcaaaagctaaggtacagaaagtcgctttggaggatgatggtttccgccttttcttcacatctgtccctggaggccgtgagaaggaagagtctccccaaccccgccgaaagcgacagccctccagctccagcagtgaggacagtgacgaggagtggcggcggtgccgggaggcagctgtgtcggcgtccgacatcctacaggagtcagccatccacagccctggaacagtggagaaggaggcaaagaagaaaaggaagttgaaaaagaaagccaagaaggtggccagtgtcgactcggctgtcgctgccaccacccccaccagcatggccacagtccagaagcagaagtcaggtgagctcaacggggaccaggtgtcgcttgggaccaaaaagaagaaaaaggcaaagaaggccagcgagacctctccattcccaccagcaaagagtgctacagctatacctgcaaactgaacccagccatgggcacagggctcagccagctccaaggacaaggtgtcccccccaccctggggacaaggcatttccaagccccacctccctctccaagttcaaggactgggctggcaaacccagactgcccatgagaccctgatggtgatgaaggcttgctcgagagttgggccaaaaaagtggctgtagggtgagaagaccaatcaaggcctgcccctctgtgctcccacggagggctggcgggggcgctgtggttccagaacatttcatgacctca

SEQ ID NO: 118172 - DNA, 459 bp, Homo sapiens
  Payload ID: 3127
  Gene Symbol: C12orf45
  Gene Name: chromosome 12 open reading frame 45
  ENST ID: ENST00000280749
  CDS Start-End: 15-218
ggcttgagggaagcatggaggtccatggcaagcccaaggctagcccgagttgttcgtcgcccacccgggattcctcaggagtcccagtgtccaaggagctgctgacggcgggaagcgacggccgcggaggtatatgggacaggttgctcatcaactcccaacctaagtccagaaagacctccactcttcaaacagttcggatagagaggagtccctgatgtggctttgtttgagatgaatcagtcggattcaaaagaagtggacagttcagaagagagttcacaagacagttcagagaacagttcagaatcagaagacgaagatgacagcatcccatctgaagtcaccatagataacattaagcttcccaattctgaaggtggaaaaggcaagattgaagttttggacagtccagcaagtaaaaaaaagaaatagtcaaataaattatctgaaaagaaa

SEQ ID NO: 118173 - DNA, 1131 bp, Homo sapiens
  Payload ID: 3127
  Gene Symbol: C12orf45
  Gene Name: chromosome 12 open reading frame 45
  Uniprot ID: Q8N5I9
  ENST ID: ENST00000552951
  CDS Start-End: 44-601
tttttcctgcatccgggcctgagagtgcaggcttgagggaagcatggaggtccatggcaagcccaaggctagcccgagttgttcgtcgcccacccgggattcctcaggagtcccagtgtccaaggagctgctgacggcgggaagcgacggccgcggaggtatatgggacaggttgctcatcaactcccaacctaagtccagaaagacctccactcttcaaacagttcggatagagaggagtcccttattggaccaggtacagacatttctcccacagatggcacgggcaaatgaaaagctaagaaaagaaatggcagctgcaccacctggtcgtttcaatattgaaaacattgatgggcctcatagtaaagttatacaaatggatgtggctttgtttgagatgaatcagtcggattcaaaagaagtggacagttcagaagagagttcacaagacagttcagagaacagttcagaatcagaagacgaagatgacagcatcccatctgaagtcaccatagataacattaagcttcccaattctgaaggtggaaaaggcaagattgaagttttggacagtccagcaagtaaaaaaaagaaatagtcaaataaattatctgaaaagaaacaggtgacatatgtctgcaaattctgtgaaaaagaatgtgattcacgggttcttttgcttttcaggcacctatggtgcttttatatgttaaaaactttagacaagttaaatttgacagagtttctttgggcaaagaatgattaatgagttaggtagcattgtaaactgaaaggggttcagagacctccgctctacagcaaggaaagtgtgcttttatcagctgaacacagaagtagagtacaggaataacttgatgggttacagctaggtgtttgcctaaataaggcaaagaggagacctaaggctgcctgatgtcccataggtatggtctgatctaaggagatctaaggctgccttgtccgatgggctgaggcttggctgtttgtgattggccagacttggctatttgttataaaaatacactcctgagttaggttttggtgtgtagagtacaggaataacttgatgggttacagctaggtgtttgcctaaataaggcaaagagg

SEQ ID NO: 118174 - DNA, 588 bp, Homo sapiens
  Payload ID: 3127
  Gene Symbol: C12orf45
  Gene Name: chromosome 12 open reading frame 45
  ENST ID: ENST00000622317
  CDS Start-End: 17-580
caggcttgagggaagcatggaggtccatggcaagcccaaggctagcccgagttgttcgtcgcccacccgggattcctcaggagtcccagtgtccaaggagctgctgacggcgggaagcgacggccgcggaggtatatgggacaggttgctcatcaactcccaacctaagtccagaaagacctccactcttcaaacagttcggatagagaggagtcccttattggaccaggtacagacatttctcccacagatggcacgggcaaatgaaaagctaagaaaagaaatggcagctgcaccacctggtcgtttcaatattgaaaacattgatgggcctcatagtaaagttatacaaatggatgtggctttgtttgagatgaatcagtcggattcaaaagaagtggacagttcagaagagagttcacaagacagttcagagaacagttcagaatcagaagacgaagatgacagcatcccatctgaagtcaccatagataacattaagcttcccaattctgaaggtggaaaaggcaagattgaagttttggacagtccagcaagtaaaaaagaaatagtcaaataaattatctg

SEQ ID NO: 118175 - DNA, 8404 bp, Homo sapiens
  Payload ID: 3128
  Gene Symbol: C12orf49
  Gene Name: chromosome 12 open reading frame 49
  Uniprot ID: Q9H741
  ENST ID: ENST00000261318
  CDS Start-End: 162-779
gggctgcgcccaaggctgccgggagcagactgggctgcgggcggcggggccggcgcctgcctggagggatggggctgccgggcgcgtaggggccatgccgcccgggacccgggcctgccgcgttccgcgccccggccgccgcgccccacgtccgcgccgggatggtgaacctggcggccatggtgtggcgccggcttctgcggaagaggtgggtgctcgccctggtcttcgggctgtcgctcgtctacttcctcagcagcaccttcaagcaggaggagagggcagtgagagataggaatctcctccaggttcatgaccataatcagcccatcccgtggaaagtgcagtttaacttgggcaatagcagtcgtccgagcaatcagtgccgcaactccattcaagggaagcacctcatcacggatgaactcggctacgtttgcgagaggaaggatttgctggtaaatggctgctgtaatgtcaacgtccctagcacgaagcagtactgctgtgatggctgctggcccaacggctgctgcagcgcctatgagtactgtgtctcctgctgcctgcagcccaacaagcaacttctcctggagcgcttcctcaaccgggcagccgtggcattccagaacctcttcatggcagtcgaagatcactttgagttgtgcctggccaaatgcaggacctcatctcagagcgtgcagcatgagaacacctaccgggaccccatagcaaagtattgctatggagaaagcccgcccgagctcttccccgcttgacgggtgcagcggacttgctccagcctgggtgaggaggccccgctgaagaactcgcctcctgggacccagcttcagccatcgggccaggctgcaggaagaagacaaaggcagcgtgaggaaaccttggctttgaccccttctcgtgttgtcatctttggcttcgctcaccacccgggcttaccagatggaactcttctgtaaagcagcttggcccctccagccagtcccattcgggaaagatgaaaccggaggccgggctcacggtggtggtggagttcttggatgactcagccctgggacctgcacagggacctgtgacttgtgttcatcgggggccggtgtcacttccagttttgatccaggctctttcactgtaaaattatttattggattcctttggagtaatgggaacattctaatgttttatgtaggaaaatgccttgccattctagttgaatatgttcaaggaaattatttttgttgttgttctgtgttctcgagtttcaggagttaaatcattcttccacccagatacaacattttctcttttaggacgtgaatattctctctaggcagttatttttgtttgtatttcgacagtatcaagcataggccctgaacgtgacctgttagccatatcctgacgtgtaaaattatctaaaaactcagacactcttccattctaatctaactgcacgatttctaacagtgggcaccatgtgcctgccctcaggttattttccagtggtagtcgaatgtgctcatataccctatggagagcactgttttagcagaaatctaatttctcttcctggaggaatttgttctcatttcttttgccacttaaaattaactgtgggctactcagccagggtacagtgggagcctcaggaaggtcagaggcaacctcctcccctgttctatcaatagaaacccaacgttgaggcaattcctaaacagacgcacctcgtagcttgctgtatgtgtttattctttattgctttcagctttggggctgtaacaggtacaaatatttggtttccctatgatttatagagaagaagaagaaacccagctttctatcagagcactgcaagagaagagtcttacacctgccctcagtgggagatgagaatggtcattatgacttagagaatgctacacgtgtaggttgctggtgtgtcctgaatccacaggcataaagcactccccatttttcctactgtaatgcagattctccggctcaaggtctagaatatttgatcctaagatcaagacatcatgcccttcgaatagtactgctctttgttttcaggagtcacgtgaacacacaactctcctatattcctcacgaacctcaggattgagcaaggtctttgtaatttttttggttcactttattgacctgggagcaaggtgctaattctgtggtcagtattcaatgtttttttcagtggagctttttctttgggccatatttgccttctaatacattcctgcaatatgtagtggtgatttcccttagcttcctcctactacctcttatactcatctccccaaattatttgcctcccttaaataagttttcctagaaggtaagctggtcaggcaatttgaaaaatattagatcccaagaaatctattccgtttgcattggacttctcggattccatgtgtttgcagcaggactacatcgaactctgatgtgccggattgtggcatgtctgcatgtctcatccatctattgtttttggtaactcagtttggaatttcagtgtctgtcttccctgggttgacattggaatcagcctctcctttgagcttattttaactcttgagcaacataacatagatttaatgtgaacagtttataccaaagggcagcctgtgcctgtttatggatcctctctgcctttgtacttgaagagcgcattttacatttccagtcctttcacagacaggagctccaaccttacgatggagaattaaacttgcttgtatttccactttgtggatgaggaactatgagaggtggagtgacttcctgggtccccgctgagacttagtgacagatcccagacaagaacttcatctctgactccaggtctagtcctcttccccctgtctcttgccaactccagccctgacaccgtgggcgtctcccctgagagcagatatatttcaattgtccaggccaaaagaggggcgaggcggcataaacacccaaattaggtggaggatccaaaagtcattttcatttggctgtggaatatgttttttgtatttcaatcagctaggggtgtgttcactgtttttggaaattcacagcgcttgagcctccataatgaagctgggctgcagagcacctggcacgtgctccaggctcccagctcccaacctaggacctctccctgccctccactctggttggtttgtggttccctcgaccgagggtttctagaatcagggaccttgtctaagttttgtttgcccagagcccagcgaagtgtgtgatacaccttgggagtttaggagatcacaaaagggatgaaaacacctttagaaaacatttcattggtggggcgtggtggcttatgcctgtaatcccagcactttggaaggctgaggcaggtggatcacctgaaggcaggagttcagaccagcctgaccaatatggtgaaaccccatctatactaaaaatacaaaaattagccgggtgtgggggcgtgtgcctgtttttgtgagactctgtctcaaaaaaaagaaaaaaatattgttaataagtgagtgttttcggctcaagggaattgagtcatacgttgcatctcccccagttctgcatcttatttgctgcgcttgctggagttgtaaagattggtcctaacagggaaagaagcacacaagagactgtgaaaagggctctgagacaagcaaggacaaaagagggagggaaataccttccacagggcctgggatctggcaatgctagagccttttttttttttttttttttttgcgatggagtcttgctctgttgctcaggctggagtgcaatggcgtgatctcagctcactgcaacctccccctcctgggttcaagcaattctcctgcctcagcctcctgagtagctgggatcacaggcgtacaccaccacacccagctaagtttttgtacttttagtagagacggggtttcaccatgttggccaggctggtcacggactcctgacctcagatgatctgcccgcctgagcctccgaaagtgctgggattacaggcgtgagccactgcgcccggcatggagctgctattgatgggtgagctccacagcttttgcagaagcagaggatatgacttgagagcagtgctgtcacctctcagcatgtccccaagcccaactggggcctcctggagatgcctcagtcggcactggccccaagggaatcgtggggaacagttgcacaatttgcaagtttctgagtgcagcttttcccatccttgggatcagcagataagttgtaaacacagggaggtactgcttattggatatacttttcataagtaggacagaattcttttgggactctagagttgggaactaccacttactagcggcgtggctgaggcagtcttcctcctctgtggctcaggcccttcatctgtgaaatggggtcacagcatctgcctctcagggtcactgtgaggtgtcgatgtgagcaaggcctgaggcttggcaagaagtcaatgtctgcaactcagcagggagcaatggcaggggcagtcaggggtcggctcggataggggtgggtgggctcctgaggttggaagggtaggaattacagagctcttgttactattgttgttactgtttttaaagatacgatatttcagataattcaggagcacgtaaggatgaaacttaggataacctaaaatcacacaacctagagagaagcgcatttttgtcttcccccattttctaggcaaaaatgaaagtactttgtcctcttgaaaaacaattctctaatgaatatcctatgttacatagaggcctgtgtaatgcatttgtgtggccacatggtgtcaatttcatgaatatacaataatattattaattccctgctgaggacattaactggtttccaaggctgcttgttgtttttgctactacaaataatgcattgatgataaatacttttacatacatggttgtatgtttatctgaactattttcaccaatatattcacctagtgtgtatggaagtgtccatttttgtcatacccctggtaaccctgtgatattatttttaaacattttgctaatggatctctgttcttgtttgaatgtatttaatttccagcagaatgagccccattccttattttgattggccatttatcatgtacatatggtgaaatgcctattcgtgacttagccaatgttgtttctttttcttactgattactacagtacatttttatatgaaagcagcctttgtccccttctcttgtttttcagccctgtgttagaaacaactaagctcacatattcacaaaccaacttttccagttcatctagggcagtggtgctcaacaggggcaattttgccccccagggaacatttggcaatgtctggagacatttttgtcacaggtggggaggagggcagtactgtgggcactcgtggagggaggccagggatggtgcccaacagcccccacgacacagaattacctggctggaagtgggagccgggtggagggagggaagccctgctctggggtcatatctccccgttagattgaacagaggagctcctggtagctgagtgctgacttcattatttttccccgcccttgctttctaccctgctgaagtgctgctgattaaattaccctgaaatccccacaggacacattacttcctcacaggtctctactagcccagcgctgcctcaaggaatggcattattcctttgccactgtgtcctcaccgcactcttggactccgccgaatgcagacaccctcctgtctgcagaaggatctggaggggtagaacgcttcccctctacgacggattgactccccagcacctcaccagcagttctttgaatggagtggctttggaggtgggagttgaggaagaaatgtgagcctgtcattacaggttctgtttagaaaactagtcattctactaaaaaggtatcacataagtaagtaggagcaataaaaacaaagaagatagtgggactccgagaagctttccccgcctctggcctgttagtctatcgttcgttgggcaaggctcttccagtgtgtgaccttttgcgtgttatcacagcatgagtgcagttttgtgtacaggcatccctatattcagcatgtatctgcaacatgccttacctcgtctgctgtcacagagcaaagtggagcaagtggtcgccgttggtctgcacctgagctgggagccgagtggtgacgtgcatatgggccgactgcgtctccacagaacctactcagtgatcttcctgtgtacgactcagtccctgatgttggagttgaactgtaggactgtctgtaaaatgaaagtgcagactttaatgtagtaaagagaatgacttgccagttacaaccaatgagcaaagcagttaattattcaaatattttaccaagagtccaggtttattttttctcaggactacacattctgtgagaccagagggaccaagacatatcactaccagaaatgtgttttcatcagcactgccagaggttttcatagggtagtttactcttggaatttttaaattcatacttttttttatgcaacgtggggtaggtaagcttctgatcactgtgcacccagattatcccaaaatcgaaagtggtgttggcagccgggtgtggtggctcacacctgtaatcccagcactttgggaggccaaggtgagaggattgcttgagcccagaattcgagaccagcctgagcaacatagggagaccctgtctctacaaaaaataaaaaaaaggagccaggcatggtagtgcacacctgtagtcccagctactcaggaggctgaggcgggaggatggcttgagtccaggaggtcaaggctgcagtgagccgtcattgcgccagtgtgctccaacctgggccacagagtgagaccctgtctgaggaggggaaaaaagtgttgtctaaatgagaaatcaccattatcagtaatttaagattccaggctatgttggtcacatctcactattcttttttttttgaaacggattctcgttccatcgcccaggctggagtgcagtggcacgatctgggctcgctgcaagctctgcctcctgggttcacgccattctcctgcctcagcctcccgagtagctgggactacaggcgcccgccaccgtgcccagctaatttttgtatttttagtagagacggggtttcaccgtgttagtagccaggatggtctcgatctcctgacctcgtgatccgcccacctcggcctcccaaagtgctgggattacaggagtgagccaccgcgcctggccacatctcactattcttaaggaagagagagagcgagagagagtgttgtcctgtcctgtggggattggggcattgtattaagttgtactgggggatgtcaagatagaaatgttgagtaagttactacctgaataaatatttgaccagttgatgctaatttgaatagtaaatgtgatgacattatatattctcagggatgtttccatacattggctctgtgtgtgcgtgtgtgtgtgtgtgtgtgtgtaacaaaagcagtatgaagtatgtgagcaatatcctaattttattgacaagagcactgaccttaatgaccttgagtaaattaccctctccggctttggtttcctcatttgtcaattaagggtgatggctagcgtatcttgcagatccaaattccaatttttgtaacaagccaaaagtccccctggctgttaaagcaagaccagagccctcgtatcccagcggctgggtcccaggcttttgattttcacaggacaaatgtagcccagccatctggagcccgtttttctccaaaccagggcttcctccttctctcttgcagatttcaactggggctcaccattttctgcctcttcctcctccagttttaaagagacaccatatccttctctgctgggaccaacttcccatgtactgctgccctgcacctgtgaaaacagctgctgtgttttctgtcataaaaatagctgccttttggcagagaagcacacaacggtactacgtttctgagccttaatgcagtgctcaattatttaggtgtgcttcacctgagatacacagagcatcttggaactcctactaagcagggcttctacaggcattgctcagctcagtaaaaggttttcctttctctgcttttgtgattaccaggcagaaaccttaaaatgtatgaacttacaaagaaattaaattgtgccaaattagattcccagcccctagagataaccactaattaaagttccgctggagcgttttgcctgtattttgtatataaacgtggattttgtatttgtatgtaaataaaggtaggaccctgctgtccata

SEQ ID NO: 118176 - DNA, 1371 bp, Homo sapiens
  Payload ID: 3128
  Gene Symbol: C12orf49
  Gene Name: chromosome 12 open reading frame 49
  ENST ID: ENST00000547630
  CDS Start-End: 171-314
ggtcacgtggggctgcgcccaaggctgccgggagcagactgggctgcgggcggcggggccggcgcctgcctggagggatggggctgccgggcgcgtaggggccatgccgcccgggacccgggcctgccgcgttccgcgccccggccgccgcgccccacgtccgcgccgggatggtgaacctggcggccatggtgtggcgccggcttctgcggaagaggtgggtgctcgccctggtcttcgggctgtcgctcgtctacttcctcagcagcaccttcaagcaggctacgtttgcgagaggaaggatttgctggtaaatggctgctgtaatgtcaacgtccctagcacgaagcagtactgctgtgatggctgctggcccaacggctgctgcagcgcctatgagtactgtgtctcctgctgcctgcagcccaacaagcaacttctcctggagcgcttcctcaaccgggcagccgtggcattccagaacctcttcatggcagtcgaagatcactttgagttgtgcctggccaaatgcaggacctcatctcagagcgtgcagcatgagaacacctaccgggaccccatagcaaagtattgctatggagaaagcccgcccgagctcttccccgcttgacgggtgcagcggacttgctccagcctgggtgaggaggccccgctgaagaactcgcctcctgggacccagcttcagccatcgggccaggctgcaggaagaagacaaaggcagcgtgaggaaaccttggctttgaccccttctcgtgttgtcatctttggcttcgctcaccacccgggcttaccagatggaactcttctgtaaagcagcttggcccctccagccagtcccattcgggaaagatgaaaccggaggccgggctcacggtggtggtggagttcttggatgactcagccctgggacctgcacagggacctgtgacttgtgttcatcgggggccggtgtcacttccagttttgatccaggctctttcactgtaaaattatttattggattcctttggagtaatgggaacattctaatgttttatgtaggaaaatgccttgccattctagttgaatatgttcaaggaaattatttttgttgttgttctgtgttctcgagtttcaggagttaaatcattcttccacccagatacaacattttctcttttaggacgtgaatattctctctaggcagttatttttgtttgtatttcgacagtatcaagcataggccctgaacgtgacctgttagccatatcctgacgtgtaaaattatctaaaaactcagacactcttccattctaatctaactgcacgatttctaacagtgggcaccatgtgcctgccctcaggttattt

SEQ ID NO: 118177 - DNA, 492 bp, Homo sapiens
  Payload ID: 3128
  Gene Symbol: C12orf49
  Gene Name: chromosome 12 open reading frame 49
  ENST ID: ENST00000547606
  CDS Start-End: 1-131
tcttcgggctgtcgctcgtctacttcctcagcagcaccttcaagcagagcgtgcagcatgagaacacctaccgggaccccatagcaaagtattgctatggagaaagcccgcccgagctcttccccgcttgacgggtgcagcggacttgctccagcctgggtgaggaggccccgctgaagaactcgcctcctgggacccagcttcagccatcgggccaggctgcaggaagaagacaaaggcagcgtgaggaaaccttggctttgaccccttctcgtgttgtcatctttggcttcgctcaccacccgggcttaccagatggaactcttctgtaaagcagcttggcccctccagccagtcccattcgggaaagatgaaaccggaggccgggctcacggtggtggtggagttcttggatgactcagccctgggacctgcacagggacctgtgacttgtgttcatcgggggccggtgtcacttccagttttgatcca

SEQ ID NO: 118178 - DNA, 923 bp, Homo sapiens
  Payload ID: 3128
  Gene Symbol: C12orf49
  Gene Name: chromosome 12 open reading frame 49
  ENST ID: ENST00000548356
  CDS Start-End: 309-449
gttcccagttgcttgaatggttcttttgcagaatggatcattgtattgctaatcacatatctaatgaataagatacccagggtgttttggcatgcacgtgtgtgcacgcgtgtgtcctttcccctccctccttttctcctcctcttccccccttccctgtatcagcattctcttagtttaggagagatagccaaggtcaccttgtgctggcttaggtaatttattacaggcactaacttttgtttccatagcaacttctcctggagcgcttcctcaaccgggcagccgtggcattccagaacctcttcatggcagtcgaagatcactttgagttgtgcctggccaaatgcaggacctcatctcagagcgtgcagcatgagaacacctaccgggaccccatagcaaagtattgctatggagaaagcccgcccgagctcttccccgcttgacgggtgcagcggacttgctccagcctgggtgaggaggccccgctgaagaactcgcctcctgggacccagcttcagccatcgggccaggctgcaggaagaagacaaaggcagcgtgaggaaaccttggctttgaccccttctcgtgttgtcatctttggcttcgctcaccacccgggcttaccagatggaactcttctgtaaagcagcttggcccctccagccagtcccattcgggaaagatgaaaccggaggccgggctcacggtggtggtggagttcttggatgactcagccctgggacctgcacagggacctgtgacttgtgttcatcgggggccggtgtcacttccagttttgatccaggctctttcactgtaaaattatttattggattcctttggagtaatgggaacattctaatgttttatgtaggaaaatgccttgccattctagttgaatatgttcaaggaaatta

SEQ ID NO: 118179 - DNA, 1722 bp, Homo sapiens
  Payload ID: 3129
  Gene Symbol: C12orf50
  Gene Name: chromosome 12 open reading frame 50
  Uniprot ID: Q8NA57
  ENST ID: ENST00000298699
  CDS Start-End: 182-1426
aggaaaattctagaagtttgagtttgtgtgcttactagcaaccactttcagcgtttctgcaaagctagagaagggttcccagtgccgattccgacactgtgaagaggcccttggcagtgacactgtgtgctcattatggagagagaggaaatgtttagatccactttgcagatttagacacatggaaatgcagcaaaactgcagcatttcatgcttctgggaaactcagcctcttggttgtgtgaagatcagctgtatcttttatcacagcaaacctcgaaatatcaatggattatttttgccaccaagtagcaatatcacactacagaaagaaattcaggaaggaattccactccagtcccagagtcaagaacctctgaaacctcaggaaaatatatcacgacccatccaccatcctttagttttaaaaactaattttgaggaagaagaggaagtagatgaacaaaatgatgcttctagtttatggacaaagacccctgaagaaattgaagaaaaaagagcaataaaggagatgtgttataaatctggggaatactacagatttcatactcctccagatattttgtcatcaaaaagcatgacacctacagcagaaaaacagttagaaaagcctttggaaaatggcagtgaattgcaagaaggagatagtcttacagttccgacaaaacttagccaatatgaaaggcaaggtgaaataaaaacatcattgcatgggaaaccaaagactgacattgctgcttttgaaaatggaggaggtgactgttatgttccacagagggtcatatttcttggagtcgatgaaagtgaagctttaactgaagagaaagaaatcaccatatcaaaatgttcaaatactaaagataacaaggacagtcctcatccaaagcattccctaactacccgactagtacctacaacgcatgtattaaatgctactgagaatatcagtatgaagtgcagagaggacccctcttcaatgaatgatgtccagccagtgaagaagcctcattttaaaggtgtgaagaaaagaaaatggatttatgatgaaccacagaactttcctaactctggaatgcagagagcagtacaggccccaagaccccaaaataaaatgagttatcaccgcaataataaaaatcgaaatgcggagaatgcatcctatatccacgttcaaagagatgctgtcaggactgtcgcgttgaatgcaccttcccgcagcaggcccacgcatgggtcctacaataaagtccatgctaacagggaacccaaacccaacctcagtccagacaaatatacgtcaacatcatataatgattcagcctggcgaaaacgaattcctttttcaaaaacatattcaaaaagtgaaaagatatatccagagccaagaagaaatgggagcaagtaaacctggaggttgagagagagaaaaatgagaaaaaattgccagacatcatctgatttacaatcaaaaatgaaaattcaaagaatgagatactcaagtactccatgttatgtagtggatagccaaagatgataaaaatgcaaattctgaaaataagatgcaggaagtacattgtgctctttcaaaactgataaaaatgcaaattaccaacagctgccagtgtatttatgtaggtctggaattcattccgtgcattactccaaacattttaataaaatttaaaagtttgacaattaaaa

SEQ ID NO: 118180 - DNA, 1525 bp, Homo sapiens
  Payload ID: 3129
  Gene Symbol: C12orf50
  Gene Name: chromosome 12 open reading frame 50
  ENST ID: ENST00000550553
  CDS Start-End: 189-1316
aacaatgaggaaaattctagaagtttgagtttgtgtgcttactagcaaccactttcagcgtttctgcaaagctagagaagggttcccagtgccgattccgacactgtgaagaggcccttggcagtgacactgtgtgctcattatggagagagaggaaatgtttagatccactttgcagatttagacacatggaaatgcagcaaaactgcagcatttcatgcttctgggaaactcagcctcttggttgtgtgaagatcagctgtatcttttatcacagcaaacctcgaaatatcaatggattatttttgccaccaagtagcaatatcacactacagaaagaaattcaggaaggaattccactccagtcccagagtcaagaacctctgaaacctcaggaaaatatatcacgacccatccaccatcctttagttttaaaaactaattttgaggaagaagaggaagtagatgaacaaaatgatgcttctagtttatggacaaagacccctgaagaaattgaagaaaaaagagcaataaaggagatgtgttataaatctggggaatactacagatttcatactcctccagatattttgtcatcaaaaagcatgacacctacagcagaaaaacagttagaaaagcctttggaaaatggcagtgaattgcaagaaggagatagtcttacagttccgacaaaacttagccaatatgaaaggcaaggtgaaataaaaacatcattgcatgggaaaccaaagactgacattgctgcttttgaaaatggaggaggtgactgttatgttccacagagggtcatatttcttggagtcgatgaaagtgaagctttaactgaagagaaagaaatcaccatatcaaaatgttcaaatactaaagtgaatgatgtccagccagtgaagaagcctcattttaaaggtgtgaagaaaagaaaatggatttatgatgaaccacagaactttcctaactctggaatgcagagagcagtacaggccccaagaccccaaaataaaatgagttatcaccgcaataataaaaatcgaaatgcggagaatgcatcctatatccacgttcaaagagatgctgtcaggactgtcgcgttgaatgcaccttcccgcagcaggcccacgcatgggtcctacaataaagtccatgctaacagggaacccaaacccaacctcagtccagacaaatatacgtcaacatcatataatgattcagcctggcgaaaacgaattcctttttcaaaaacatattcaaaaagtgaaaagatatatccagagccaagaagaaatgggagcaagtaaacctggaggttgagagagagaaaaatgagaaaaaattgccagacatcatctgatttacaatcaaaaatgaaaattcaaagaatgagatactcaagtactccatgttatgtagtggatagccaaagatgataaaaatgcaaattctgaaaataagatgcaggaagtacattgtgctctttcaaaactgataaaaatgcaaattaccaaca

SEQ ID NO: 118181 - DNA, 597 bp, Homo sapiens
  Payload ID: 3129
  Gene Symbol: C12orf50
  Gene Name: chromosome 12 open reading frame 50
  ENST ID: ENST00000551163
  CDS Start-End: 309-597
agtttattgacttgaaaacccctgcctactaacccgtgctatgagagtatatggatctactttaacaagggggagagagtgaagatggaagtaggagagagataaaagataaagaacaaccatggaacatgtgtcaaaagagggaagaatgttatccacctctcttcccacacaacaggggcttgtagtttttaccaaatggttcccagtgccgattccgacactgtgaagaggcccttggcagtgacactgtgtgctcattatggagagagaggaaatgtttagatccactttgcagatttagacacatggaaatgcagcaaaactgcagcatttcatgcttctgggaaactcagcctcttggttgtgtgaagatcagctgtatcttttatcacagcaaacctcgaaatatcaatggattatttttgccaccaagtagcaatatcacactacagaaagaaattcaggaaggaattccactccagtcccagagtcaagaacctctgaaacctcaggaaaatatatcacgacccatccaccatcctttagttttaaaaactaattttgaggaagaagaggaagtagatgaacaaaatg

SEQ ID NO: 118182 - DNA, 887 bp, Homo sapiens
  Payload ID: 3130
  Gene Symbol: C12orf54
  Gene Name: chromosome 12 open reading frame 54
  Uniprot ID: Q6X4T0
  ENST ID: ENST00000314014
  CDS Start-End: 132-515
gagatggggctcaaataggaaaaagtctaggggtgaaggagtggggcaaagtgtaatttggggaaccaagcaggggcctggagctatctccatcttcagctccagagtccttggtttctgtctgagaacaaatggcacagcatccctgccaggatcaggaacaaaaggtagaaatgacctccaagcagcagagaagcacatccatagaagagacaatgagaccacaggaaaaacaggtaaccatcactgaaaccctgtgggaccaggtgctgacagtttttaaggatatacaaaaggagctgcaggaagatgctcggattcgagggatgagcaactgctccatgacacccatgacatcagcacccaggactggaagcataaggcctccagattccttgatgaccccaaagttgagaagattgcagttcagctctggagagcagccatcaggaggccgtatccacaacctgaagacacagctcttcagtcaatcagcttactaccctggaccctaactctacaatcaaggaagaaggacatctctgcttccgccagcacagcttcagttggggaagatattagcagacatcatcactgaacccagaagagagggtggtgcccatgagtggagatgccagggtctatggctgaaactgggaacttggaaatcaagtgagacccaagcaaggaaaccaactgccaaagcaaggaaaccagcttggtttggcaaacagctgatgaaataaatgtgacgtagaagacttgccttcctggttcttcctgggctgtggaatgggtagtgatagaatttccaagtatgatagtgcatttggttcaaagaacagcactgtagcatgggagaacctgcactataatgtcataaactc

SEQ ID NO: 118183 - DNA, 820 bp, Homo sapiens
  Payload ID: 3130
  Gene Symbol: C12orf54
  Gene Name: chromosome 12 open reading frame 54
  ENST ID: ENST00000380491
  CDS Start-End: 37-342
tcagctccagagtccttggtttctgtctgagaacaaatggcacagcatccctgccaggatcaggaacaaaaggtagaaatgacctccaagcagcagagaagcacatccatagaagagacaatgagaccacaggaaaaacaggtaaccatcactgaaaccctgtgggaccaggtgctgacagtttttaaggatatacaaaaggagagtaccactgacttgtcagtccaggcggctaaggcaagaagatgcctaacagttcccttgaggaaatgtgataatacaaacagaaaattgtatctgctagaacttgtctcagcaagaatactctatgtggttgtatgaaatgctgataatgactaagctggggagaatcccctagtgatgtagtaaactgccttattagctgcaggaagatgctcggattcgagggatgagcaactgctccatgacacccatgacatcagcacccaggactggaagcataaggcctccagattccttgatgaccccaaagttgagaagattgcagttcagctctggagagcagccatcaggaggccgtatccacaacctgaagacacagctcttcagtcaatcagcttactaccctggaccctaactctacaatcaaggaagaaggacatctctgcttccgccagcacagcttcagttggggaagatattagcagacatcatcactgaacccagaagagagggtggtgcccatgagtggagatgccagggtctatggctgaaactgggaacttggaaatcaagtgagacccaagcaaggaaaccaactgccaaagcaaggaaacca

SEQ ID NO: 118184 - DNA, 685 bp, Homo sapiens
  Payload ID: 3130
  Gene Symbol: C12orf54
  Gene Name: chromosome 12 open reading frame 54
  Uniprot ID: Q6X4T0
  ENST ID: ENST00000548364
  CDS Start-End: 58-441
ggcctggagctatctccatcttcagctccagagtccttggtttctgtctgagaacaaatggcacagcatccctgccaggatcaggaacaaaaggtagaaatgacctccaagcagcagagaagcacatccatagaagagacaatgagaccacaggaaaaacaggtaaccatcactgaaaccctgtgggaccaggtgctgacagtttttaaggatatacaaaaggagctgcaggaagatgctcggattcgagggatgagcaactgctccatgacacccatgacatcagcacccaggactggaagcataaggcctccagattccttgatgaccccaaagttgagaagattgcagttcagctctggagagcagccatcaggaggccgtatccacaacctgaagacacagctcttcagtcaatcagcttactaccctggaccctaactctacaatcaaggaagaaggacatctctgcttccgccagcacagcttcagttggggaagatattagcagacatcatcactgaacccagaagagagggtggtgcccatgagtggagatgccagggtctatggctgaaactgggaacttggaaatcaagtgagacccaagcaaggaaaccaactgccaaagcaaggaaaccagcttggtttggcaaacagctgatgaaataaatgtgacgtagaa

SEQ ID NO: 118185 - DNA, 506 bp, Homo sapiens
  Payload ID: 3130
  Gene Symbol: C12orf54
  Gene Name: chromosome 12 open reading frame 54
  ENST ID: ENST00000549398
  CDS Start-End: 1-216
ctgcaggaagatgctcggattcgagggatgagcaactgctccatgacacccatgacatcagcacccaggactggaagcataaggcctccagattccttgatgaccccaaagttgagaagattgcagttcagctctggagagcagccatcaggaggccgtatccacaacctgaagacacagctcttcagtcaatcagcttactaccctggaccctaactctacaatcaaggaagaaggacatctctgcttccgccaggctcatctgacacctaacccacctggagaagaagactgtctcagcacagcttcagttggggaagatattagcagacatcatcactgaacccagaagagagggtggtgcccatgagtggagatgccagggtctatggctgaaactgggaacttggaaatcaagtgagacccaagcaaggaaaccaactgccaaagcaaggaaaccagcttggtttggcaaacagctgatgaaataaatgtgacgtagaaga

SEQ ID NO: 118186 - DNA, 3936 bp, Homo sapiens
  Payload ID: 3131
  Gene Symbol: C12orf56
  Gene Name: chromosome 12 open reading frame 56
  Uniprot ID: Q8IXR9
  ENST ID: ENST00000333722
  CDS Start-End: 127-1515
cgcgcctggagaggaggcgacgcgtggccggcggctttgtggcgcgcgggttccagcgcgggggcggggagagggcgagctgagggcctcgagtcccagcactccgccacgctgcgggcgccgggcatggccagccccttgccgtccggcttccccgcgcgcaggaacagccgcctggatgtgttcctgcggcggcatctgccgcccgaggtctacgacgcggtccgcgcctacgagccatgcatcgtggtgtccaactctgagaaccacatcctcaagtatgtggtgctaagcgaccggctcgtctacctaaccgagaacccgcccaagtccatccggcgggtagtggctctgcgggacgtcgtggccattgacctgattgatgattacccggaatttttgagttcgccagatagagaaatcagccaacacattcgtatcatctattcttcaaccgttttgaaaaaagagtgtaaaaagtcaaacagtgtcaggaaattcctatttccatttcatcatactaaagctaacaacaagaaagtcaaggaagaaaagaacggccttgccttttggagaagcaaagagtccagaagtctgaaagaatctcctctcaggtctgaggagaaaattaagcacttcagtcaacttaaatctgaactttttcttaaagacaattctttgaggaggatactttctttacttatggaacttaaagtagcagcccagaaaaacttcattctgaaaaggcttttctggaagaccagtgaccttttctatttcatagtaaacaaacttcatgagtacttgccggagtctagggataagaatgcactacaaaatcaaagccaaagggttgatgagctggtggcatgcattgaaattatacagaccctagtattgatgttcagagaaacagaaaccgagtcatcacgcctgaacacattggcagctaagaagggagcactatttaatctcttggtaattttaattagtgagcctcagattccaaaatcttgtcctgtgtttgatatccagttggtggctgattcagctttagtcagaatgtcttttgacgctgagttacagaagcttattctggagtatacaaatactgctacagcacttttatatgagatacttctggtctttcagcagggaaatctcggattgggatccacaaagtttgctattagctggataatgtcctttctacaaagctgtcctcccatcattacttttgtggccagtattgtgaaacaagtggtgaggggtctttcagcttcatttcagctgctaagtccctgccaagcagttctgttgtaccagcaattttacatcctcaagagctgtctgcggcacagcaggactctagctgagtatattaggaataactacagagaagaattcaggtactttattcacatgccagccttgcagaaaaggctcccattgtgttaccccatcactcaacctaccattcaactttttcatgaagttctgaaattggttgaatagaaacaaacaatgtacgcaatgttaataagagtataaaatgttaatcaagagtcaacttgatattcacgagaaacatttttttatttgtttaatatctggctatctctgagtcctataaacaaagattttaattgaatgttccatcaatacctctctatgagaagtttaaaattttaaaaaataaatttgatttattataagtgtgcaaagatctttatgccattgggcaaaagagccatttctttattagagtagttcttcaaactcactcttgccacaaaataaacgactatccatcaagacacaggaaaaaggaatgcagggatttaggaaagctgtactcacttctcttccaccttagcagcaaaagcaagaaggttctcaaaattctcctgataatagttctgttgcttaagcaataggatgccggggagtgtgggggcctgaggcatgggcattcaagttcttctcaaggtgttttatcttctcagcttgggcacagtgttctcggtgaaaccatgccaggcacaggagcatgctcttcacccgattctgtactcagagccatccaaaaaccattatttcgactaggttcttggagtccactatgtccaccaccagcagggcctggcgcatccacgccacttctggaattacagcttggtctgggcctaaggtcactcactcaagatctcatccgccagccacgcctccaggtagaacaccaaagggtctctcagttcctgcaccagaaaccaccaaggccggaggccagagttttaaaatctgctacaaagaaacctacatccattctgacatacataaagtggtgctaaacagtagcgtttctccagaaaaaaaggttctaagacaaaaatctatcaagggaacagaagcctatggagagtgaacacagaaaatataatctggtgagtttcactggtgtaataatggtgagtggtgtgaagccacgaaacatcctgagataaactgttgtggggagtataagctacagagtgattatttgggaaatgctgagcaataggatgacaccctcctcctccacctatacaaattctagtgacaaaagtattcctggaagaatgagcagaacacaggcatagctgtatagaatgtcacttcctcttttatcatagagaaagaagcttggacttcaacaaaattaagtgcatggtgccactctgtttcaggcatctgtgggctaatttgtgtagtcccatagagtctctatgaaagataaattgtctacgagcagttatggctctcccacaaccatttaaaaacttgtctttactatattttatgccataaactaatttaattccacaaatacttaactttggcatcaccgtgaggtgttgaatttggacttctaagaacataggaactggactctccattcaacttattatgacttgagggaggatcagagaaaaatctacttccaaagaaagagttcctaagccagattcgcctgtgttgggcagtggagataattactaggacattttattccaggttctgacagagccaaatgaccagctatttgacttcaagcaagtcaggccccctttccaggccacatctgtttcttcctgggcttcctctgctaggtggaagggtgggactagatgttctccaagttctcttccagctcttacattctctgcctgtgacaagacatttaacactctgaaatggagtagtgtgtttctctgctatctcggctcagtggatgattttgcactaacttcaagtaatcctcctttctttttacccaaagtttccctttcagctgtcaccagccatcaccccataaagtgtccaagtcttttccttcattacccaatgaggagtccacattttctaccctcaattttgggggcagagagagaggagcaaaatggtgtttttgagtgtcctggctgttagatgggggattattttcaagagacggtcaatcaaaggaatatgaaaagattcttggaacataggcaagtattacctcaaaccggacaaagaatgtactgatgaacccgcaggatgacaacgagaggatcaactcagctctgccttagcttctccgcagtgccctggatctgggctagtagtcatgcaggctctagtgagggcttggggtttctctcccacatgatttctgcatgcctctcccactcctctctttgccctgggatcttactttaatctctgggagcaaaatctctgtcaaaatatatctgaatctttttatgtggggctaaagtcagtggttttttggagagttaatggttgaatatttgtcaccctgattttcttcagtctactctgtataactcatgtctattcatttgcacagtctgggatcagaaactaataattcgaaggattgtccaaccacta

SEQ ID NO: 118187 - DNA, 553 bp, Homo sapiens
  Payload ID: 3131
  Gene Symbol: C12orf56
  Gene Name: chromosome 12 open reading frame 56
  ENST ID: ENST00000543259
  CDS Start-End: 1-553
aacagccgcctggatgtgttcctgcggcggcatctgccgcccgaggtctacgacgcggtccgcgcctacgagccatgcatcgtggtgtccaactctgagaaccacatcctcaagtatgtggtgctaagcgaccggctcgtctacctaaccgagaacccgcccaagtccatccggcgggtagtggctctgcgggacgtcgtggccattgacctgattgatgattacccggaatttttgagttcgccagatagagaaatcagccaacacattcgtatcatctattcttcaaccgttttgaaaaaagagtgtaaaaagtcaaacagtgtcaggaaattcctatttccatttcatcatactaaagctaacaacaagaaagtcaaggaagaaaagaacggccttgccttttggagaagcaaagagtccagaagtctgaaagaatctcctctcagaaagctactcttttacaagatcccttctatgctagtgagttcagtcctgctattggaagtcaaaagccatataggtctgaggagaaaattaagcacttcagtca

SEQ ID NO: 118188 - DNA, 3242 bp, Homo sapiens
  Payload ID: 3131
  Gene Symbol: C12orf56
  Gene Name: chromosome 12 open reading frame 56
  Uniprot ID: Q8IXR9
  ENST ID: ENST00000543942
  CDS Start-End: 628-2496
agaaaaaaaaaatccctttctcactggttggagaaagaagacctatgtttacactccgacaatatcagaaagctgtgccaggccatgttataaccaaaagctaaatctgtgtgattgggtttaataggtttctagggttgttaaaaataaatcggtaaattaaactctttcaagtttctaacaggaaaccagattgaagctggcttccattaccaataaagtttgtattggatggtgtgatccgcaacagagtacgcagtggtggggactggcattaggggtgggcgggagagaccctaaaaatccaccgcccttcggccgcaggggacttcacggtgatgagcccgaggtgcccatcaactcgggcctgaaggaccagcgtcttgccccgcccatcgccgtctgaggttaggacaaagatcgagaggctggacagggctggggagggcgctccagggaagccgacctagcgtcgattcctgcagttgcggcccgggtccccgcgcctggagaggaggcgacgcgtggccggcggctttgtggcgcgcgggttccagcgcgggggcggggagagggcgagctgagggcctcgagtcccagcactccgccacgctgcgggcgccgggcatggccagccccttgccgtccggcttccccgcgcgcaggaacagccgcctggatgtgttcctgcggcggcatctgccgcccgaggtctacgacgcggtccgcgcctacgagccatgcatcgtggtgtccaactctgagaaccacatcctcaagtatgtggtgctaagcgaccggctcgtctacctaaccgagaacccgcccaagtccatccggcgggtagtggctctgcgggacgtcgtggccattgacctgattgatgattacccggaatttttgagttcgccagatagagaaatcagccaacacattcgtatcatctattcttcaaccgttttgaaaaaagagtgtaaaaagtcaaacagtgtcaggaaattcctatttccatttcatcatactaaagctaacaacaagaaagtcaaggaagaaaagaacggccttgccttttggagaagcaaagagtccagaagtctgaaagaatctcctctcagggaccagcaggagagcagtacaccatccaaggactcaactctctgtcctcgtccaggcctcaaaaagctgtcccttcatggccaaggtgcctttcgacccctaccttccccctccaggaggagctctcagtctgcaccaacaactggcaaggctgtcagcgagccatcttgcacaacaaacacaaaagaaccccagggacttccagatcacaactccataagtgaaattcctttcaagtgcaatgggaatggaaatgagttttacttaggaaattccctcttagattccccttcacagagcaactcaaatttagagaaaaaggagtcagaacttcatttgtatgttatttccacaacctcatcaatatttctgcacttaaaaagttcatggaacaattatattataaaagctactcttttacaagatcccttctatgctagtgagttcagtcctgctattggaagtcaaaagccatataggtctgaggagaaaattaagcacttcagtcaacttaaatctgaactttttcttaaagacaattctttgaggaggatactttctttacttatggaacttaaagtagcagcccagaaaaacttcattctgaaaaggcttttctggaagaccagtgaccttttctatttcatagtaaacaaacttcatgagtacttgccggagtctagggataagaatgcactacaaaatcaaagccaaagggttgatgagctggtggcatgcattgaaattatacagaccctagtattgatgttcagagaaacagaaaccgagtcatcacgcctgaacacattggcagctaagaagggagcactatttaatctcttggtaattttaattagtgagcctcagattccaaaatcttgtcctgtgtttgatatccagttggtggctgattcagctttagtcagaatgtcttttgacgctgagttacagaagcttattctggagtatacaaatactgctacagcacttttatatgagatacttctggtctttcagcagggaaatctcggattgggatccacaaagtttgctattagctggataatgtcctttctacaaagctgtcctcccatcattacttttgtggccagtattgtgaaacaagtggtgaggggtctttcagcttcatttcagctgctaagtccctgccaagcagttctgttgtaccagcaattttacatcctcaagagctgtctgcggcacagcaggactctagctgagtatattaggaataactacagagaagaattcaggtactttattcacatgccagccttgcagaaaaggctcccattgtgttaccccatcactcaacctaccattcaactttttcatgaagttctgaaattggttgaatagaaacaaacaatgtacgcaatgttaataagagtataaaatgttaatcaagagtcaacttgatattcacgagaaacatttttttatttgtttaatatctggctatctctgagtcctataaacaaagattttaattgaatgttccatcaatacctctctatgagaagtttaaaattttaaaaaataaatttgatttattataagtgtgcaaagatctttatgccattgggcaaaagagccatttctttattagagtagttcttcaaactcactcttgccacaaaataaacgactatccatcaagacacaggaaaaaggaatgcagggatttaggaaagctgtactcacttctcttccaccttagcagcaaaagcaagaaggttctcaaaattctcctgataatagttctgttgcttaagcaataggatgccggggagtgtgggggcctgaggcatgggcattcaagttcttctcaaggtgttttatcttctcagcttgggcacagtgttctcggtgaaaccatgccaggcacaggagcatgctcttcacccgattctgtactcagagccatccaaaaaccattatttcgactaggttcttggagtccactatgtccaccaccagcagggcctggcgcatccacgccacttctggaattacagcttggtctgggcctaaggtcactcactcaagatctcatccgccagccacgcctccaggtagaacaccaaagggtctctcagttcctg

SEQ ID NO: 118189 - DNA, 560 bp, Homo sapiens
  Payload ID: 3132
  Gene Symbol: C12orf57
  Gene Name: chromosome 12 open reading frame 57
  Uniprot ID: Q99622
  ENST ID: ENST00000229281
  CDS Start-End: 100-480
ctttccgctcccaggggcgttgggaacggttgtaggacgtggctctttattcgtgagttttccatttacctccgctgaacctagagcttcagacgccctatggcgtccgcctcgacccaaccggcggccttgagcgctgagcaagcaaaggtggtcctcgcggaggtgatccaggcgttctccgccccggagaatgcagtgcgcatggacgaggctcgggataacgcctgcaacgacatgggtaagatgctgcaattcgtgctgcccgtggccacgcagatccagcaggaggttatcaaagcctatggcttcagctgcgacggggaaggtgtccttaagtttgctcgcttggtcaagtcctacgaagcccaggatcctgagatcgccagcctgtcaggcaagctgaaggcgctgtttctgccgcccatgaccctgccaccccatgggcctgctgctggtggcagcgtggccgcctcctgagagttggccctcccttgtgccactgccaggggaggaaaggccttgatgttccagacaataataaatgcgcctgtgactta

SEQ ID NO: 118190 - DNA, 556 bp, Homo sapiens
  Payload ID: 3132
  Gene Symbol: C12orf57
  Gene Name: chromosome 12 open reading frame 57
  Uniprot ID: Q99622
  ENST ID: ENST00000545581
  CDS Start-End: 177-556
gacaacggcttttgctctgggcctttactgccgaatccaggtctccgggcttaacaacaacgaaggggctgtgactggctgctttctcaaccaatcagcaccgaactcatttgcatgggctgagaacaaatgttcgcgaactctagaaatgaatgacttaaagcttcagacgccctatggcgtccgcctcgacccaaccggcggccttgagcgctgagcaagcaaaggtggtcctcgcggaggtgatccaggcgttctccgccccggagaatgcagtgcgcatggacgaggctcgggataacgcctgcaacgacatgggtaagatgctgcaattcgtgctgcccgtggccacgcagatccagcaggaggttatcaaagcctatggcttcagctgcgacggggaaggtgtccttaagtttgctcgcttggtcaagtcctacgaagcccaggatcctgagatcgccagcctgtcaggcaagctgaaggcgctgtttctgccgcccatgaccctgccaccccatgggcctgctgctggtggcagcgtggccgcctcctg

SEQ ID NO: 118191 - DNA, 662 bp, Homo sapiens
  Payload ID: 3132
  Gene Symbol: C12orf57
  Gene Name: chromosome 12 open reading frame 57
  ENST ID: ENST00000537087
  CDS Start-End: 289-582
agaatttgtctagtaggctttctggctttttaccggaaagcccctcttatgatgtttgttgccaatgatagattgttttcactgtgcaaaaattatgggtagttttggtggtcttgatgcagttgtaagcttggggtatgaaggtttgggccacgcctgggcgcttccggctgcgccggatgctgtttcctttccgctcccaggggcgttgggaacggttgtaggacgtggctctttattcgtgagttttccatttacctccgctgaacctagagcttcagacgccctatggcgtccgcctcgacccaaccggcggccttgagcgctgagcaagcaaaggtggtcctcgcggaggtgatccaggcgttctccgccccggagaatgcagtgcgcatggacgaggctcgggataacgcctgcaacgacatgggtgtccttaagtttgctcgcttggtcaagtcctacgaagcccaggatcctgagatcgccagcctgtcaggcaagctgaaggcgctgtttctgccgcccatgaccctgccaccccatgggcctgctgctggtggcagcgtggccgcctcctgagagttggccctcccttgtgccactgccaggggaggaaaggccttgatgttccagacaataataaatgcgcctgtgactta

SEQ ID NO: 118192 - DNA, 980 bp, Homo sapiens
  Payload ID: 3132
  Gene Symbol: C12orf57
  Gene Name: chromosome 12 open reading frame 57
  ENST ID: ENST00000544681
  CDS Start-End: 306-617
agtgttacagctcttttagaatttgtctagtaggctttctggctttttaccggaaagcccctcttatgatgtttgttgccaatgatagattgttttcactgtgcaaaaattatgggtagttttggtggtcttgatgcagttgtaagcttggggtatgaaggtttgggccacgcctgggcgcttccggctgcgccggatgctgtttcctttccgctcccaggggcgttgggaacggttgtaggacgtggctctttattcgtgagttttccatttacctccgctgaacctagagcttcagacgccctatggcgtccgcctcgacccaaccggcggccttgagcgctgagcaagcaaaggtggtcctcgcggaggtgatccaggcgttctccgccccggagaatgcagtgcgcatggacgaggctcgggataacgcctgcaacgacatgggtaagatgctgcaattcgtgctgcccgtggccacgcagatccagcaggaggttatcaaagcctatggcttcagctgcgacggggaaggtgggtcagacgcgggaaggcgggtcagacgcgggaaggcgggagttgggtcgggagagggcgccggatctgtgggcccatgagcggttgtcccctttctcgccacacggcggcagccacaatctgactaacattcttggcactcagagcccagggtctaccctgagcttgtgcgtccgagttgcgttttgtacagtagaggttctgtatcccttacccgaaatggttgggaccggaagtgtttcgggttttttcagatttcggaatatttacatatacatggatatcttgggggatgggacctaaatctgaacacgaaattgttttgtttcatatacacgcaccttatgcacatagcctgagggtaattttatataatagtctgaataattttgtgcatgagacaaagttttgactgcgttttgactacagtctcccccaccccc

SEQ ID NO: 118193 - DNA, 551 bp, Homo sapiens
  Payload ID: 3132
  Gene Symbol: C12orf57
  Gene Name: chromosome 12 open reading frame 57
  ENST ID: ENST00000540506
  CDS Start-End: 202-477
atggcgtccgcctcgacccaaccggcggccttgagcgctgagcaagcaaaggcctcaatccactaattccttgcgctctccgctgggcccgctgtctgttctccgacgcctacccgggacgcctccctgggatgcttctggcgcgcagtggtcctcgcggaggtgatccaggcgttctccgccccggagaatgcagtgcgcatggacgaggctcgggataacgcctgcaacgacatgggtaagatgctgcaattcgtgctgcccgtggccacgcagatccagcaggaggttatcaaagcctatggcttcagctgcgacggggaaggtgtccttaagtttgctcgcttggtcaagtcctacgaagcccaggatcctgagatcgccagcctgtcaggcaagctgaaggcgctgtttctgccgcccatgaccctgccaccccatgggcctgctgctggtggcagcgtggccgcctcctgagagttggccctcccttgtgccactgccaggggaggaaaggccttgatgttccagacaataataaatgcgcctgt

SEQ ID NO: 118194 - DNA, 1684 bp, Homo sapiens
  Payload ID: 3133
  Gene Symbol: C12orf60
  Gene Name: chromosome 12 open reading frame 60
  Uniprot ID: Q5U649
  ENST ID: ENST00000330828
  CDS Start-End: 205-942
tccaggaccagagtctcttccggttccatacaatactcaattggttggttgtcggctaagagcccgcctcattgcgctcatctagtacaataggaattagaagaagatagctgctaactgagtggctgacggtcctgtctctcgagttggaggcatcttgacttagttgctgggagcctgtgttggaacttatttgttggagaaatgtcttcagagtcagaaaaggataaagagagactgattcaagctgccaaaatgttcttctttcatgtacaagatcttgcttctgtcataaacacactgactgaattgtttagccgcagtatgaatactcaaatccttttgatggctgtgaaaaacaatagttacattaaggatttttttgagcaaatgctcaaaatttttaaggagatgcaatctgtagtggatgcaagacatgacaaaattcaaaaggagtctttatgttccaaggttgcaatggccatgtgctctgtggttcagaagagtaccaatgtagaggagttgcatcagtcagctaaagaagtattcaaaagtgcccatacgccagtcatcatctctgtgctaaacagcagtaacatccttgggagtctggaatcttctctttcacacttgatgaaattccccatcatgaatcttcaattaagtgacttctatacagaagacaccaaagagcaatcagatgtcaccacatctgagagaaccagaagtcctccaggttcttccaaaaccactatgatagacaccttgaaaaaactgcaggatgtactaaaaactgaggattccaaaaatcccacaaagtcagcagcagatttgttggaacaaattgtcaaggctatgggaccaatcttagagatcctccaaaaagcgataaagactatggaaatgaatatttctgtgtttaagaaagccagtgacaagtagggatgcaacagaaatgttcatttctgtcagaaaactacttaaaatcttatggtttttcatagtagtttctaagatcttttggtgccaaacatgtgctatgttagaacataagtacacaaaagtcatctggcaaaacatttacctgtagttttgctttattaaaataaaaagaaataattaagaaagcctgtttgaaatgtcagtcactaagaagaatatattgttgaaaaaaacaaagtggtattacatttgaggatgtttctaaatattgtgtttcatcttaaagcataattaaaacaaccctaaagtagttcccactcttaactattctatttccagtgagaaatccaggtaaactgtaaatattatcattagatagaaaatctaggcctgggaaacaaaataaactccatttttgtcactcatataccaatttctatatacttcagtaccttgacgatcagaagccatcactaaatattttaaatatgattcataagtaagtgagaacagtgaatgagcaataatagacttttcttgcttatgtgagtaagaccagaacagatagttcattctcacttgtctcctgaggtcttatgattagaaaatactagaggtggaaaaatggaagtactctagcctttcacaaagaaaagactttcacaaggaaaacacttgcagaagtaggatatctgagatgtgctttatttaaagaaatgagatagggcagtctctttgtcta

SEQ ID NO: 118195 - DNA, 2073 bp, Homo sapiens
  Payload ID: 3134
  Gene Symbol: C12orf65
  Gene Name: chromosome 12 open reading frame 65
  Uniprot ID: Q9H3J6
  ENST ID: ENST00000253233
  CDS Start-End: 645-1145
cacacgccgaagggctccgagggggtcaggccaatcggcagccgtcaccccacaccccagcccatcaccacactcaaggggccgctaagacagtgtctcctaagtctcgtctcctgtccccagcggcctacagctccctgcaggctggtggccgcttacctggccgccgctcccgctgccgatgtcagggtcatgcaagcggcctctcgcgaccgttacccgagggagcgcgcgcgcgcccggcgtctctccagtgattggctgcccggaaggaggcggagacagcctcgcatggcgcgcgcgtccacctcgccgttccccctcgcgcagctccaaccaaagagagacatccaaccccgggggagtgacaagggggcgggattgctgtgaaactctcttctctgattggctctctgggagccagccgctgccacgagggaaagaagcttcagtttctcgcatgcgcagtgagtaaacatgagcctctggtagataagagaaaccgcgatcggagtacggcgcgtgcgcagatcagggatcgcgattgcgaatcctccgctgaggtgatttggatatccctagaacgttgagggcacgagtcgggtcctgagaccaggtcctcagccagcagagccacgttccttatgagcaccgtgggtttatttcattttcctacaccactgacccgaatatgcccggcgccatggggactccggctttgggagaagctgacgttgttatccccaggaatagctgtcactccggtccagatggcaggcaagaaggactaccctgcactgctttccttggatgagaatgaactcgaagagcagtttgtgaaaggacacggtccagggggccaggcaaccaacaaaaccagcaactgcgtggtgctgaagcacatcccctcaggcatcgttgtaaagtgccatcagacaagatcagttgatcagaacagaaagctagctcggaaaatcctacaagagaaagtagatgttttctacaatggtgaaaacagtcctgttcacaaagaaaaacgagaagcggcgaagaaaaaacaagaaaggaaaaaaagagcaaaggaaaccctggaaaaaaagaagctacttaaagaactgtgggagtcaagtaaaaaggtccactgagaaaagaattagagattccaactgacagaatctgccagaagctcccagggaataatggtggcgagttccatcaccagcattattatagtgcttcaaaagaaatatttttgatgaacttaaaagacaacaaatttatttaaatggtgcactaaactgtagtgaacagagacatgcacgattcaagaataaaactcggctgggcacggtggacggtgcctcacatctgtaatcccagcactttgggaggccgaggcgggcggatcacttgaggtcaggagtttgagaccagcctggccaacatggtgaaaccccgtctctactaaaaatacaaaaaattagccaggcatggtggcgggcacctgtaatcccagctactcgggaggccgaggcaggagaattgcgtgaacctgggaggcggaggttgcagtgagctgagatcgcgccactgcactcaagcctgggcaacacctgggtgacagagcgagaccccatctcaaaaaaaaaataaaactagttcaagtgcaatgacacacgcctataatcccagcaccttgggaggctaagacaggaagatcacctgagcccaggagctcaagattgcagtgagctatgaacaccactgcactccacctgtccacttgttcttgtgtgacagaacaagaccctgtctctaaaaaataagataaaaccataaagaaacacagtcagtactatacaagaataatggctacttctagagggaaggagttgtcattgtgatgaggcacttggaggggttctggggtgcctgacaaagttctgtttcttcacctgggtggtagttagaagggtgtccccgtatttcaaattgtacctttgtgagattgtatgttttgtaataataaaattttttttgtaattagtaaagtcaatttttatggagaactgg

SEQ ID NO: 118196 - DNA, 1901 bp, Homo sapiens
  Payload ID: 3134
  Gene Symbol: C12orf65
  Gene Name: chromosome 12 open reading frame 65
  Uniprot ID: Q9H3J6
  ENST ID: ENST00000366329
  CDS Start-End: 473-973
gatttggatatccctagaacgttgagggcacgagtcgggtcctgagaccaggtaagcatctgcggagaagccaggtaaccctacggctgccgacgactgtcaaaggctccggagagaggactgcgagccgggacgcctgggtttttcccgacttgcgaccccgagtggcgcagccagtttacctgaggccgcgctggcggtggggtggggccggccgtgacacccgagctcagttttctcgggacctggtttacgctaggtgctgtgggtcggccctggggctgttcaggcactcagggcaggggagaggagagactaccgtcctggagataacggttccacggaggcccaaggcgaaacggaaggatcctcatgtacaaaactgagcggaatggagctgtgagcacgcatcaggtgctgtttcaggcctggcacgtagtagaggtcctcagccagcagagccacgttccttatgagcaccgtgggtttatttcattttcctacaccactgacccgaatatgcccggcgccatggggactccggctttgggagaagctgacgttgttatccccaggaatagctgtcactccggtccagatggcaggcaagaaggactaccctgcactgctttccttggatgagaatgaactcgaagagcagtttgtgaaaggacacggtccagggggccaggcaaccaacaaaaccagcaactgcgtggtgctgaagcacatcccctcaggcatcgttgtaaagtgccatcagacaagatcagttgatcagaacagaaagctagctcggaaaatcctacaagagaaagtagatgttttctacaatggtgaaaacagtcctgttcacaaagaaaaacgagaagcggcgaagaaaaaacaagaaaggaaaaaaagagcaaaggaaaccctggaaaaaaagaagctacttaaagaactgtgggagtcaagtaaaaaggtccactgagaaaagaattagagattccaactgacagaatctgccagaagctcccagggaataatggtggcgagttccatcaccagcattattatagtgcttcaaaagaaatatttttgatgaacttaaaagacaacaaatttatttaaatggtgcactaaactgtagtgaacagagacatgcacgattcaagaataaaactcggctgggcacggtggacggtgcctcacatctgtaatcccagcactttgggaggccgaggcgggcggatcacttgaggtcaggagtttgagaccagcctggccaacatggtgaaaccccgtctctactaaaaatacaaaaaattagccaggcatggtggcgggcacctgtaatcccagctactcgggaggccgaggcaggagaattgcgtgaacctgggaggcggaggttgcagtgagctgagatcgcgccactgcactcaagcctgggcaacacctgggtgacagagcgagaccccatctcaaaaaaaaaataaaactagttcaagtgcaatgacacacgcctataatcccagcaccttgggaggctaagacaggaagatcacctgagcccaggagctcaagattgcagtgagctatgaacaccactgcactccacctgtccacttgttcttgtgtgacagaacaagaccctgtctctaaaaaataagataaaaccataaagaaacacagtcagtactatacaagaataatggctacttctagagggaaggagttgtcattgtgatgaggcacttggaggggttctggggtgcctgacaaagttctgtttcttcacctgggtggtagttagaagggtgtccccgtatttcaaattgtacctttgtgagattgtatgttttgtaataataaaattttttttgtaattagtaaagtcaatttttatggagaactgg

SEQ ID NO: 118197 - DNA, 1326 bp, Homo sapiens
  Payload ID: 3134
  Gene Symbol: C12orf65
  Gene Name: chromosome 12 open reading frame 65
  Uniprot ID: Q9H3J6
  ENST ID: ENST00000429587
  CDS Start-End: 286-786
cttggaagatatttttggtctattgcaagaaaatatgtattagctggcagggcatgtcctggtaacatggcagacagtgcaaggctgaggagaggggcgtcttgctgaataatgtgtctctactcatttcctaaattccctcggtaacagatgggtcatcatttgaattgctttataaaaagctgtctttgaatctgaagcataatcttgagggcagatgcctcttactgaaagctctccttattcatctaacccaggtcctcagccagcagagccacgttccttatgagcaccgtgggtttatttcattttcctacaccactgacccgaatatgcccggcgccatggggactccggctttgggagaagctgacgttgttatccccaggaatagctgtcactccggtccagatggcaggcaagaaggactaccctgcactgctttccttggatgagaatgaactcgaagagcagtttgtgaaaggacacggtccagggggccaggcaaccaacaaaaccagcaactgcgtggtgctgaagcacatcccctcaggcatcgttgtaaagtgccatcagacaagatcagttgatcagaacagaaagctagctcggaaaatcctacaagagaaagtagatgttttctacaatggtgaaaacagtcctgttcacaaagaaaaacgagaagcggcgaagaaaaaacaagaaaggaaaaaaagagcaaaggaaaccctggaaaaaaagaagctacttaaagaactgtgggagtcaagtaaaaaggtccactgagaaaagaattagagattccaactgacagaatctgccagaagctcccagggaataatggtggcgagttccatcaccagcattattatagtgcttcaaaagaaatatttttgatgaacttaaaagacaacaaatttatttaaatggtgcactaaactgtagtgaacagagacatgcacgattcaagaataaaactcggctgggcacggtggacggtgcctcacatctgtaatcccagcactttgggaggccgaggcgggcggatcacttgaggtcaggagtttgagaccagcctggccaacatggtgaaaccccgtctctactaaaaatacaaaaaattagccaggcatggtggcgggcacctgtaatcccagctactcgggaggccgaggcaggagaattgcgtgaacctgggaggcggaggttgcagtgagctgagatcgcgccactgcactcaagcctgggcaacacctgggtgacagagcgagaccccatctcaaaaaaaaaataaaactagttcaagtgcaatgacacacgcctata

SEQ ID NO: 118198 - DNA, 573 bp, Homo sapiens
  Payload ID: 3134
  Gene Symbol: C12orf65
  Gene Name: chromosome 12 open reading frame 65
  ENST ID: ENST00000546132
  CDS Start-End: 284-573
gcgaatcctccgctgaggtgatttggatatccctagaacgttgagggcacgagtcgggtcctgagaccaggtgctgtgggtcggccctggggctgttcaggcactcagggcaggggagaggagagactaccgtcctggagataacggttccacggaggcccaaggcgaaacggaaggatcctcatgtacaaaactgagcggaatggagctgtgagcacgcatcaggtgctgtttcaggcctggcacgtagtagaggtcctcagccagcagagccacgttccttatgagcaccgtgggtttatttcattttcctacaccactgacccgaatatgcccggcgccatggggactccggctttgggagaagctgacgttgttatccccaggaatagctgtcactccggtccagatggcaggcaagaaggactaccctgcactgctttccttggatgagaatgaactcgaagagcagtttgtgaaaggacacggtccagggggccaggcaaccaacaaaaccagcaactgcgtggtgctgaagcacatcccctcaggcatcgttgtaaaggtagatca

SEQ ID NO: 118199 - DNA, 604 bp, Homo sapiens
  Payload ID: 3134
  Gene Symbol: C12orf65
  Gene Name: chromosome 12 open reading frame 65
  ENST ID: ENST00000536130
  CDS Start-End: 496-604
gattgcgaatcctccgctgaggtgatttggatatccctagaacgttgagggcacgagtcgggtcctgagaccaggtaagcatctgcggagaagccaggtaaccctacggctgccgacgactgtcaaaggctccggagagaggactgcgagccgggacgcctgggtttttcccgacttgcgaccccgagtggcgcagccagtttacctgaggccgcgctggcggtggggtggggccggccgtgacacccgagctcagttttctcgggacctggtttacgctaggtgctgtgggtcggccctggggctgttcaggcactcagggcaggggagaggagagactaccgtcctggagataacggttccacggaggcccaaggcgaaacggaaggatcctcatgtacaaaactgagcggaatggagctgtgagcacgcatcaggtgctgtttcaggcctggcacgtagtagaggtcctcagccagcagagccacgttccttatgagcaccgtgggtttatttcattttcctacaccactgacccgaatatgcccggcgccatggggactccggctttgggagaagctgacgttgttatccccaggaatag

SEQ ID NO: 118200 - DNA, 3733 bp, Homo sapiens
  Payload ID: 3134
  Gene Symbol: C12orf65
  Gene Name: chromosome 12 open reading frame 65
  ENST ID: ENST00000543139
  CDS Start-End: 3319-3733
gctgaacataggaccccaatcccttctagcttgtagtgtttctcctgagaaatctgctgttaatctgataggttttcctttataggttacctggtgcttctgtctcacagactcttaaaattctttctttcattttaactttgtccggaattggtgggttcttggtcttgctgacttcaagaatgaagccacggaccctcatggtgagtattacagctcttaaagatggtgtgtccagagtttgttccttcagatgttcagatgcatccagagtttcttccttctggtgggtttgtggtctcgctgacttcaggagtgaacctgcagaccttcgcagtgagtgttgcagctcttaaaggcagcacagacccaaggagtgagcagcagtaacatttaccacaaagaccaaaagaacaaagcttccacagtgtggaaggtgacccgaacgggttgcactgctggctcaggcagcctgcgtttattcccttatctgaccccacccacatcctgctgattggtccattttacagagagctgattggcccattttacagacagctgattggtctgttttgacagggtgctgattggtgcgtttataaaccttgagctagacacagagtgctgactggtgcatttacaatcctttagctagacacaaaagttctccaagtccctagatttagctagacacagcactgattgatgtgtttacaaaccttcagctagacacagagtgctgattggtgcatttacaatcctttagctagacacaaaagttctccaagtccccactagattagctagacatagagcactgattggtgcatttacaaaccttgagctagacacagggtgctgattggtgtatttacaaaccttgagctagacacaaagtgctgactggtgtatttataaacctttagctagacataaaagttctccaagtccccacccgactcaggagtccagctagctttgcctactggatcccatgctggggccgtgggtggagctgcctgctagtcccacaccatgcccccgcactcctcagcccttgggcggtcaatgggactggttgcagagcagggggcggcgcccgtccgggaggctctggccatgagggagcagggcagggggagggggggactcaggcatggcgggttgcaagtcccacgccctgctccacggggaggcagctgaggcccagcgagaattcaagcacagcccgggtgagctggcagtgctgggggacccggcacaccctccacagctgctggccggggtgctaagcccctcactgcctggggccggcggcaccagccggccactcctaggtcggggcccgccaagccctcactggcccgcgagctctccctccacacctccccacaagcggagggagcccgctttggccttggccagtccagagaggggcttccacagtgcagcggcgggctgaagggctcctcaagcacagccagagtggatgccgaggccaaggaggcgccgagagcgagtgagggctactagcacattgtcacctctcatttggataacctgatgacaatatgcctagatgaagatctttttgcaatggatttctcaggtgttctttgtgcttctcgtatttggatgtctaggtctctagcaaggccggggaagttttcctcgattattcccccaaatatgttttccaagcttttagatttctcttcttcctcaggaacaccaattattcttaggtttggtcgtttaacacaatcccagacttcttggaggctttgttcatattttcttattcttttttgtctttgttggattgggttaatttgaagaccttgtcttcgagctctgaatttctttattctacttgttgaattctattgctgagactttccagagcattttgcatttctaaaaatgtgtccaaagtttcctgaattttttattgttttttctttaagctatctatttccctgagtgatttctcccttcacttcttgtatcattttttggatttccttacattgggcttcacctttctctggtccttccctgattaataactaacctcctgaattctttttcaggtaaatcaggtatttcttcttggtttggatccattgccagtgaactagtatgttttttggggggtgttgaagcgtcttgttttgtcatattaccagggtttgttcatttgggtaggctctgtcagagggaaggtctagggctgaaggctgttcagattcttttgtcccatggggtgttctcttcatgtagtactctgccccttttcctatggatgtggcttcctatgagccaaacttgcagtgattgttgtctctcttctgggtctagccacccagcgaatcttcccagttccaggctggtactggaggttatctgcagagtcctgtgatgtgaaccatctatgggtctctcagccatggctaccagtgcctgttcggtggaggtggcagagggtacaatggagctttggtgggttaatggtctattttttttgctggttggcctcctgccaggaggtggtcctttccagaaagcatcagctgtggtaatatggggaggaaccagcagtgggcggggccctagaactcccaagatttatttgccctttgtcttcctgccagggtgcatagggaaggaccatcaggtgggggtggagctaggcgtgtctgagctcagactctccttgggcgggtcttgctgcggctgctgtagggaatgtgggtgagattcccaggtcactggagtcgtgtacctaggagagttatggctgcctctgctgagtcatgcaggttgtcagggaagtgggggaaagctggcagtcacaggcctcacccagctcccacacaaacccaagggccggtcttactcccaccgtgttcccccacaactgccccgagtctgtttccaggcagagggtgagactggcttgaaaatttgccccaaggctgtgcccctcccagcagcgaaagaaaagggctgtagttcttcccccacctgtgaagtctgcatgctggattcgtgcagttgcccaagttctggccaggaggcttctcaccctgtttaaattgttacgaagttcgactagagaattcttctccctgtggagttttatcccttgctcctctggccaccctcccgatggatccctgtggtgccaggcaggaatgggccttctggggacccagcgagctcccacggcctttctgctgcttcctctacccctgtagttcgctctgctgagtctgacttagctccaggtcctcagccagcagagccacgttccttatgagcaccgtgggtttatttcattttcctacaccactgacccgaatatgcccggcgccatggggactccggctttgggagaagctgacgttgttatccccaggaatagctgtcactccggtccagatggcaggcaagaaggactaccctgcactgctttccttggatgagaatgaactcgaagagcagtttgtgaaaggacacggtccagggggccaggcaaccaacaaaaccagcaactgcgtggtgctgaagcacatcccctcaggcatcgttgtaaagtgccatcagacaagatcagttgatcagaacagaaagctagctcggaaaatcctacaagagaaagtagatgttttctacaatggtgaaaacagtcctgttcacaaagaaaaacgagaagcggcgaagaaaaaac

SEQ ID NO: 118201 - DNA, 2698 bp, Homo sapiens
  Payload ID: 3135
  Gene Symbol: C12orf66
  Gene Name: chromosome 12 open reading frame 66
  ENST ID: ENST00000311915
  CDS Start-End: 29-1435
acgtgggtcgagctggggcgcagctcgcatgggggagtctatcccgctggccgccccggtcccggtggaacaggcggtgctggagacgttcttctctcacctgggtatcttctcttacgacaaggctaaggacaatgtggagaaggaacgagaggccaacaagagcgcggggggcagctggctgtcgctgctggcggccttggcgcacctggccgcggccgagaaggtctatcacagcctcacctacctggggcagaaactagggggccagtctttcttcagcaggaaggattccatccgcaccatctatacttcattgcataatgagctgaagaaggtggtgactggccgtggtgccctgggtgggactgctcctcacgtggaagaactcctttcccacctgtcagagcagctctgcttctttgttcaggctcggatggagatagcagacttctatgagaagatgtacaccctcagcacacagaagttcatcaatgctgaagagctcgttggccttttggatgccatcatgaaaaaatacagctccagatttcaccacccaatcctcagtcctttggaaagcagtttccagctggaagttgacgtcctgtgtcatctcctgaaagcccaggcccaggtctcagagtggaagttcctcccatctctggttaatttacacagtgcgcacaccaaactgcagacgtggggccagatctttgagaaacagcgggagaccaagaaacatctgtttggagggcagtctcagaaggccgtgcagcctccacaccttttcctttggctgatgaaactcaaaaacatgcttcttgccaagtttagcttttactttcatgaggctctgagccgacaaacgactgcttcagaaatgaaaacgttgacagcaaaagctaacccagacttttttggaaagatttccagcttcatcagaaaatatgatgctgccaatgtgtccttaatttttgacaacagaggttctgagagttttcagggtcatggttatcaccacccccattcctacagagaggcccccaagggtgtggaccagtatccagctgtagtgtctctgcccagcgacaggccagtcatgcactggcccaatgtcatcatgatcatgacggaccgcacatctgatctgaacagcttggagaaagtggtccacttctatgatgacaaagttcagagtacctacttcctaacccgcccggaacctcactttaccattgtcatcatttttgagtcaaagaaatctgagagagactcccactttatttccttcctcaatgaggtctcacttgcccttaagaaccccaaagtgtttgcaagtctgaaacctggagccaaaggttcctgttaccaatgcaattatttcgtggccttttgcctgaattattctaagctgcttctccagaggaaatgagtcagaagaaataggcttgatgtgcatttctgcctttggagacttctcttgatatggtgtaaatccgtaaggtttcattaatgccttgtctgcatattttttcaatctgcttttgataacaaggtctgtttctagggtacttcaaatttaaaaccgtagggtatgtgtaaaatatcaccactagaaaatggagagatgcaaatgggttcccccttctgtagtccctcctaatgtcagaatctggggttagggttctaagtgatggtagcactcaggagagggtcacaagaggcaatgacatgggactgcatcctgaaagatgactgcttagacgtgcggcgagaatggccggaaaacggaggatggcgcttgacattgatctaggaaaggaagacagtcattgggacttttgctaactttgtccctagagagtgaattctgcttttgctggtcctaaaaactgtagagtaattctacaatccagttaaatttgtaaatctaatgcctgattcagtctgagatttatgactcagccggttgatccagcttaggtctagactcatttcacttttgttatgacaagatacgacaatgtagggcacaccctttaccccccagggtcatcctgatgtcagtcatttcaggctaggccagtgtcagagcagtccctgaagcagaagtggatggaaagaggtgaatgatttctaatattcaacattcattaatttaacatcaactatgttaagggtaatgatatagcagttaaccaagaccaacatggtgtctgcttggttgatgcttgaaataaggtgacctggccccagccacccgggtggccaggagctgaaagggctgtaacaagtaggcagtgaatagtcttcaaacttgttacttgcatacctccctacaaattttggaaaaaccatgagactctgattgattttttaaaagaatatctaaaatcattatgtttaaatagcctcaaaagaagcattttattatgtattgtaaatattggcattttaaaatgttattcggtcttttaaatgtatccagtgaaatgttggtacaatagagttttgatagctaccattttccatttttaaaaatactttaacacgctttgtaacagttggaaatattgtttgattccttttgctccctgaactccattcttcttcttctgaagaattttatcctaaaatgaatttattttttgcttaacagtcttattggttaccttattaaatattactcagtata

SEQ ID NO: 118202 - DNA, 4151 bp, Homo sapiens
  Payload ID: 3135
  Gene Symbol: C12orf66
  Gene Name: chromosome 12 open reading frame 66
  Uniprot ID: Q96MD2
  ENST ID: ENST00000398055
  CDS Start-End: 55-1392
ccggaagtgcgaggccgaggagagccacgtgggtcgagctggggcgcagctcgcatgggggagtctatcccgctggccgccccggtcccggtggaacaggcggtgctggagacgttcttctctcacctgggtatcttctcttacgacaaggctaaggacaatgtggagaaggaacgagaggccaacaagagcgcggggggcagctggctgtcgctgctggcggccttggcgcacctggccgcggccgagaaggtctatcacagcctcacctacctggggcagaaactagggggccagtctttcttcagcaggaaggattccatccgcaccatctatacttcattgcataatgagctgaagaaggtggtgactggccgtggtgccctgggtgggactgctcctcacgtggaagaactcctttcccacctgtcagagcagctctgcttctttgttcaggctcggatggagatagcagacttctatgagaagatgtacaccctcagcacacagaagttcatcaatgctgaagagctcgttggccttttggatgccatcatgaaaaaatacagctccagatttcaccacccaatcctcagtcctttggaaagcagtttccagctggaagttgacgtcctgtgtcatctcctgaaagcccaggcccaggtctcagagtggaagttcctcccatctctggttaatttacacagtgcgcacaccaaactgcagacgtggggccagatctttgagaaacagcgggagaccaagaaacatctgtttggagggcagtctcagaaggccgtgcagcctccacaccttttcctttggctgatgaaactcaaaaacatgcttcttgccaagtttagcttttactttcatgaggctctgagccgacaaacgactgcttcagaaatgaaaacgttgacagcaaaagctaacccagacttttttggaaagatttccagcttcatcagaaaatatgatgctgccaatgtgtccttaatttttgacaacagaggttctgagagttttcagggtcatggttatcaccacccccattcctacagagaggcccccaagggtgtggaccagtatccagctgtagtgtctctgcccagcgacaggccagtcatgcactggcccaatgtcatcatgatcatgacggaccgcacatctgatctgaacagcttggagaaagtggtccacttctatgatgacaaagttcagagtacctacttcctaacccgcccggaacctcactttaccattgtcatcatttttgagtcaaagaaatctgagagagactcccactttatttccttcctcaatgaggtctcacttgcccttaagaaccccaaagtgtttgcaagtctgaaacctggagccaaaggttagcaggtgatttgcgtggaggggtttcaagactagaaactgttcttaattgccctaatgatctacggtggtctgtgaatagagtttacatccattcatgcctctttcagaactaaattaaagacaaatcctccctgtgttgcacactttataagcaattaaggccaattgaattaagtttccaaagagtaatctaggaagtggtcatgggctaccatgtgtctccatggtacagcaaagtagtttcagtattttcccctattttgctatatttcttgtagattgaatatttattgggcttttttttttcccatatgtttttctgttgttctaaacattgtgttctactgcaattccaaacagcctctctgtttccctccttcttggaagagtaatagggatgagatattaaatggcctttttagaattaagaactatatgttttctgtctcataaattagcaaatgaatatggagttagtagatttatgattctgatctacaaattaacatttttgatgccaaaattagggtcttggtaagaaatttctatcagttattgaaactgaaagtgagtcagattggtagcatgacgtaaggttttaacagttcagaagatcctcatggcagctttaatagccatgggttcttttggggtaatgtacacacctaactgcatttgttttgacttctttaatgtttgaatgtttcactctgttgtaaagtcagcataagccatcatgtgggctttcttcattcttcagcatattatccgcttcgctttctgtttatcacttttctgctgaaatgtacatgtttggctctactccttggttatttttaggcttaaaagcatgcagtcggtttttcagccacttttagatactcatgcaacatagcctacttttataaaatcaaaatgaaggtcttcatacgctgtacttgctaaaaatcaactgtgcgcttgaaagacctcttcatagttgagtaatcacctcagtacttaagcacttctgaacttgggtttcatgcctgccccccacaaattatgtttagaagcagcactgcatcttagcacatgctgccttatttctttccttcggcaggtgttcatgggaagtaggtggatcagtgaaggcataatgggctgtggagaccttcacttctagattattgattcaaaataaaaagaagccacaaagagtaattgagttgttactggtttgatggttcctttgaagcttgtgtgaaatgtaatggtcatattcgtcttttttcccatgattgtgtggagccactgttttactgggtgtccacagcaggtatgccagcaacatcagcagagaccagagagcccctcagagtccatgtaggaagcctgcccacctagggtggactgcctggcagaagaaagaagaaccggccaggcacggtggcacacgcctgtaatcccagtactttgggaggctgagacgcgtggatcacttgaggtcaggagttcgagatcagcgtggccaacatggtgaaaccccatctctactaaaaatacaaaagttggccggttgtagtgacgggtgactgtaatcccagttactctggaggctgaggcaggagaattgcttgaacctgggaggtggaggatgcagtgagctgagactgtgcagctgcactccagcctgggtgaaagagcgagacctgtctcaaaaaaaaaaaaagaagaagaagaaccaagaatctactggcctattttttattttctgggaagaacatgtgtttttcctttttttttttttttttttttgagacagggtcttgtctgttttccaggctggagtacagtggcacaatcacaactcactgcagcctcaacctcctgggctcaagtgatcctcccacatcagcatcccgagtaggtgggattacaggcatgagccatcacacctgggtctcactatgttgctcgggctggactcaaactcctggactcacatgagcctcccgcctcggcctcccaaagcactgggtttataagcatgtgccactgcacctggcctcctttctttttctttaaaaatggtcataagctttgtaaaaagctagtttgctttaaatagaaagtagtgatttacctctgcattttattcactcaggttctataaaaaaagtctcagcagattttacaacattgaccttacctaagaaattgaaagcaattggagctaaaaagtcaaatcacttttcctctctattgtgttctgccaagaaactgaaaaatattccttggtatgcatgtatttttttcctcttagattaaaccaccattagccttaatgacacagtcccccaaatacctagaagaatatatacttcagtggaaccccgagagaggtgtaagtaaagcatatatatgttatttaaataaccagtcctcacctagaacatatttgaattgtatatctatttttaaacataaacacaaaaagaatttcaaagaacagaaggcagatgtgaatattaagaaaatctaagacaatatgtattactgtgcagctgtcatagactgtactggaagagtttttgaagattgaatattgatacttaaattatttctgaagctcttcaataaagttttctaattataaaaactccacataatttggttcaagccaagaaacaaagtcattttactctaagatttattctctaaatatagtaatgagatctgtaaagtctgtgttttgctaattaaaagagtaaatctgc

SEQ ID NO: 118203 - DNA, 2441 bp, Homo sapiens
  Payload ID: 3135
  Gene Symbol: C12orf66
  Gene Name: chromosome 12 open reading frame 66
  ENST ID: ENST00000544871
  CDS Start-End: 60-1238
agaacccggaagtgcgaggccgaggagagccacgtgggtcgagctggggcgcagctcgcatgggggagtctatcccgctggccgccccggtcccggtggaacaggcggtgctggagacgttcttctctcacctggggggccagtctttcttcagcaggaaggattccatccgcaccatctatacttcattgcataatgagctgaagaaggtggtgactggccgtggtgccctgggtgggactgctcctcacgtggaagaactcctttcccacctgtcagagcagctctgcttctttgttcaggctcggatggagatagcagacttctatgagaagatgtacaccctcagcacacagaagttcatcaatgctgaagagctcgttggccttttggatgccatcatgaaaaaatacagctccagatttcaccacccaatcctcagtcctttggaaagcagtttccagctggaagttgacgtcctgtgtcatctcctgaaagcccaggcccaggtctcagagtggaagttcctcccatctctggttaatttacacagtgcgcacaccaaactgcagacgtggggccagatctttgagaaacagcgggagaccaagaaacatctgtttggagggcagtctcagaaggccgtgcagcctccacaccttttcctttggctgatgaaactcaaaaacatgcttcttgccaagtttagcttttactttcatgaggctctgagccgacaaacgactgcttcagaaatgaaaacgttgacagcaaaagctaacccagacttttttggaaagatttccagcttcatcagaaaatatgatgctgccaatgtgtccttaatttttgacaacagaggttctgagagttttcagggtcatggttatcaccacccccattcctacagagaggcccccaagggtgtggaccagtatccagctgtagtgtctctgcccagcgacaggccagtcatgcactggcccaatgtcatcatgatcatgacggaccgcacatctgatctgaacagcttggagaaagtggtccacttctatgatgacaaagttcagagtacctacttcctaacccgcccggaacctcactttaccattgtcatcatttttgagtcaaagaaatctgagagagactcccactttatttccttcctcaatgaggtctcacttgcccttaagaaccccaaagtgtttgcaagtctgaaacctggagccaaaggttagcaggtgatttgcgtggaggggtttcaagactagaaactgttcttaattgccctaatgatctacggtggtctgtgaatagagtttacatccattcatgcctctttcagaactaaattaaagacaaatcctccctgtgttgcacactttataagcaattaaggccaattgaattaagtttccaaagagtaatctaggaagtggtcatgggctaccatgtgtctccatggtacagcaaagtagtttcagtattttcccctattttgctatatttcttgtagattgaatatttattgggcttttttttttcccatatgtttttctgttgttctaaacattgtgttctactgcaattccaaacagcctctctgtttccctccttcttggaagagtaatagggatgagatattaaatggcctttttagaattaagaactatatgttttctgtctcataaattagcaaatgaatatggagttagtagatttatgattctgatctacaaattaacatttttgatgccaaaattagggtcttggtaagaaatttctatcagttattgaaactgaaagtgagtcagattggtagcatgacgtaaggttttaacagttcagaagatcctcatggcagctttaatagccatgggttcttttggggtaatgtacacacctaactgcatttgttttgacttctttaatgtttgaatgtttcactctgttgtaaagtcagcataagccatcatgtgggctttcttcattcttcagcatattatccgcttcgctttctgtttatcacttttctgctgaaatgtacatgtttggctctactccttggttatttttaggcttaaaagcatgcagtcggtttttcagccacttttagatactcatgcaacatagcctacttttataaaatcaaaatgaaggtcttcatacgctgtacttgctaaaaatcaactgtgcgcttgaaagacctcttcatagttgagtaatcacctcagtacttaagcacttctgaacttgggtttcatgcctgccccccacaaattatgtttagaagcagcactgcatcttagcacatgctgccttatttctttccttcggcaggtgttcatgggaagtaggtggatcagtgaaggcataatgggctgtggagaccttcacttctagattattgattcaaaataaaaagaagccacaaagagtaa

SEQ ID NO: 118204 - DNA, 957 bp, Homo sapiens
  Payload ID: 3136
  Gene Symbol: C12orf71
  Gene Name: chromosome 12 open reading frame 71
  Uniprot ID: A8MTZ7
  ENST ID: ENST00000429849
  CDS Start-End: 32-841
aagttgagagaaatttgtgcctttgaactccatggcatattcatcctctaacagcgacatagaggacgacagctccaaatccaattccaacctgagcctctctgtgggctatttcccctgtgaggacaccccctgtgaggacacaacctcctgggaagatgcaccttccaagggtccttccatccactttctgcctcccgtccaaggggcatgggggactgaaaggatagggagacgcatgaagagacaagaccaaattcaggatgaaccagagcagttttgcaaactaagcatcttcctggcctgggacgtggacattggctccgataacacagactcaagagctaataggcttctaaatggagacaacctgtggatagacaagttaccaaaagagagaacaaaactgtctgttggcaaactgaataatcttgtgcaagagtttcagatatttctagaaaatctgaaagatgatgacgctgtatttcctgaaactgctcagcaagatttccagctatccagcggctcccctccggaaatggttcagatgataagccaggcaaccgccagccaaaggacaagcgctccagagatctcctcaatcctgtcagagcagccagagaaggatgacactccttcacacacacaggcccagtgctgcctgaactttgggtgggccttcagctggctgaggcagcgtatcctcccctctctgctgaggagggatcaccctgtgaatgccaccaaaagtccccatcggtcagcaccaacgaaaagactctttcacagaggcaagagaattcaacctcaagaaacccttgaattaggacatcccatatagacagatttttaaactttttggaaagtttaaaataatccataataaggattccattaataatccccatcagtttgttttttcctcaataaacaaaataaatgctcttgttaccccac

SEQ ID NO: 118205 - DNA, 1738 bp, Homo sapiens
  Payload ID: 3137
  Gene Symbol: C12orf73
  Gene Name: chromosome 12 open reading frame 73
  Uniprot ID: Q69YU5
  ENST ID: ENST00000378090
  CDS Start-End: 207-422
tgcgccggcagcgctcccactttcctgtccggtgcggccccgggtccctgtattttgggtccggcctgctcgccgtccgctccgtccgcccttagacctgttgcccagcatccctgcagttcgcggtacagtctctagtagagcgcgtgtatagaggcagagaggagtgaagtccacagttcctctcctccaagagcctgccgaccatgcccgcgggcgtgcccatgtccacctacctgaaaatgttcgcagccagtctcctggccatgtgcgcaggggcagaagtggtgcacaggtactaccgaccggacctgacaatacctgaaattccaccaaagcgtggagaactcaaaacggagcttttgggactgaaagaaagaaaacacaaacctcaagtttctcaacaggaggaacttaaataactatgccaagaattctgtgaataatataagtcttaaatatgtatttcttaatttattgcatcaaactacttgtccttaagcacttagtctaatgctaactgcaagaggaggtgctcagtggatgtttagccgatacgttgaaatttaattacggtttgattgatatttcttgaaaactgccaaagcacatatcatcaaaccatttcatgaatatggtttggaagatgtttagtcttgaatataacgcgaaatagaatatttgtaagtctactatatgggttgtctttatttcatataaattaagaaattatttaaaactatgaactagtttcattaattgaatttgctaagtggagttatttctcattgctaaactgttttttttcaaattctagatctctgctaactttagtaaatgaacactaaagtggtgagctttgataatgcattttgtggatacaaaatcatcgcctcatcactttctagaatgaaaggctgggggcattgctcaccttttgcgtgaagaaaagacctgtcccttagagccagtttttgcttaaggggaggacagaccgtcgtcacccagtggaccacgtgaatgaatggatgcagtgcatgctttagaagcaccgcatacctccttttacaggtacagagtaagtggtctggctactgagggaaagagtcatgatttgaatccgagtcttctgtaagacaatgacttcatgaaggtgaaaaatcagttttatggttattaaagtaaaaatttaccttgggtaaaaatgccatctttatttcattaagtactggttctaagtgacttccaataagatacattttcttcctgttttgaagttgatccccattgtgaaaaatatacattgtagtggtcatggaaatgcgccatccatactccctaaggcaggcttgttgccctagtatcaagcatgccagcagctttcaatggtcagcttctagaaggattgcctcggctatggtggccttgctcaaagccatgcctcctgaaggggcccaaatccagtgactgttggaggtgagaatagaaaggcctggccacttcagcacgtgagtggtgggcaactctgctgggcccaccacaactccctatggggtttagggacactgtctttggatctgcattgcaactcaacttatacctctgctcagtcctgtttcctttctcaggtgttgatcgaagggtgtgccttcatagaccccctgctaaactgcacctcagtgtttcttggagaaccaaatctgtaacatatatgcattaaaaattaaaggcagtacta

SEQ ID NO: 118206 - DNA, 660 bp, Homo sapiens
  Payload ID: 3137
  Gene Symbol: C12orf73
  Gene Name: chromosome 12 open reading frame 73
  Uniprot ID: Q69YU5
  ENST ID: ENST00000553183
  CDS Start-End: 204-419
cagaagacggggactaggagcgctctgccgacgtcagcttttgtctccagtattttcgggggctggtggacgcgtgggcgatagggtgctgtccttggggtgctgtgtatatgggatgatgacgcttatcagcattatctagtcctttccaccccgaaattcgccccgattaaagactgtgttgcattatcagcctgccgaccatgcccgcgggcgtgcccatgtccacctacctgaaaatgttcgcagccagtctcctggccatgtgcgcaggggcagaagtggtgcacaggtactaccgaccggacctgacaatacctgaaattccaccaaagcgtggagaactcaaaacggagcttttgggactgaaagaaagaaaacacaaacctcaagtttctcaacaggaggaacttaaataactatgccaagaattctgtgaataatataagtcttaaatatgtatttcttaatttattgcatcaaactacttgtccttaagcacttagtctaatgctaactgcaagaggaggtgctcagtggatgtttagccgatacgttgaaatttaattacggtttgattgatatttcttgaaaactgccaaagcacatatcatcaaaccatttcatgaatatggtttggaagatgtttagtcttgaata

SEQ ID NO: 118207 - DNA, 582 bp, Homo sapiens
  Payload ID: 3137
  Gene Symbol: C12orf73
  Gene Name: chromosome 12 open reading frame 73
  ENST ID: ENST00000546819
  CDS Start-End: 158-319
gtattttgggtccggcctgctcgccgtccgctccgtccgcccttagacctgttgcccagcatccctgcagttcgcggtacagtctctagtagagcgcgtgtatagaggcagagaggagtgaagtccacagttcctctcctccaagagcctgccgaccatgcccgcgggcgtgcccatgtccacctacctgaaaatgttcgcagccagtctcctggccatgtgcgcaggggcagaagtggtgcacaggtactaccgaccggacctgatgagaaacaggttgagaagagtgaagttgatttctcaaagtcacatagcttagtgagacgatttgaggatctgaagcccaagctttctgtttggtatgtctcttttttgctcctgttcataaaataatccaatactcttgtaaaacattcaaattgagttcaagtatgtagagtaaaaagtgaaaatcccccctcttataacctcctttctcctgtctgctcacgacacgttaactactgtttcttgtttggtgaatatcctttactacttctcactgttgttgaatgtccactgatacgggttggatatttgtct

SEQ ID NO: 118208 - DNA, 1243 bp, Homo sapiens
  Payload ID: 3137
  Gene Symbol: C12orf73
  Gene Name: chromosome 12 open reading frame 73
  ENST ID: ENST00000547975
  CDS Start-End: 124-303
gtccgcccttagacctgttgcccagcatccctgcagttcgcggtacagtctctagtagagcgcgtgtatagaggcagagaggagtgaagtccacagttcctctcctccaagagcctgccgaccatgcccgcgggcgtgcccatgtccacctacctgaaaatgttcgcagccagtctcctggccatgtgcgcaggggcagaagtggtgcacaggtactaccgaccggacctgcaaaactggatcacaagtctttcggtcggagaactggaaggtctgggcagagtcgagcagaggagaccatgatgactgcctagacttgtgctcagtgctgtgttggggagaactgctacagacaatacctgaaattccaccaaagcgtggagaactcaaaacggagcttttgggactgaaagaaagaaaacacaaacctcaagtttctcaacaggaggaacttaaataactatgccaagaattctgtgaataatataagtcttaaatatgtatttcttaatttattgcatcaaactacttgtccttaagcacttagtctaatgctaactgcaagaggaggtgctcagtggatgtttagccgatacgttgaaatttaattacggtttgattgatatttcttgaaaactgccaaagcacatatcatcaaaccatttcatgaatatggtttggaagatgtttagtcttgaatataacgcgaaatagaatatttgtaagtctactatatgggttgtctttatttcatataaattaagaaattatttaaaactatgaactagtttcattaattgaatttgctaagtggagttatttctcattgctaaactgttttttttcaaattctagatctctgctaactttagtaaatgaacactaaagtggtgagctttgataatgcattttgtggatacaaaatcatcgcctcatcactttctagaatgaaaggctgggggcattgctcaccttttgcgtgaagaaaagacctgtcccttagagccagtttttgcttaaggggaggacagaccgtcgtcacccagtggaccacgtgaatgaatggatgcagtgcatgctttagaagcaccgcatacctccttttacaggtacagagtaagtggtctggctactgagggaaagagtcatgatttgaatccgagtcttctgtaagacaatgacttcatgaaggtgaaaaatcagttttatggttattaaagtaaaaatttaccttgggtaaaaa

SEQ ID NO: 118209 - DNA, 590 bp, Homo sapiens
  Payload ID: 3137
  Gene Symbol: C12orf73
  Gene Name: chromosome 12 open reading frame 73
  ENST ID: ENST00000546540
  CDS Start-End: 156-296
attttgggtccggcctgctcgccgtccgctccgtccgcccttagacctgttgcccagcatccctgcagttcgcggtacagtctctagtagagcgcgtgtatagaggcagagaggagtgaagtccacagttcctctcctccaagagcctgccgaccatgcccgcgggcgtgcccatgtccacctacctgaaaatgttcgcagccagtctcctggccatgtgcgcaggggcagaagtggtgcacaggtactaccgaccggacctggtgagtgcgggagggctactattttatttttgagctaaatatacctcatttctttgtaaattacccagccttaggcattcctttatagcaatgcagatgctcctggaccactccattctcctcgtggcagcaaaagtgatcttgaacgaaattaggatcacatttgccctgggcccaaaacctttggatggcatcccattgcatctagggcaatgcatggcctgtgaggtcttacacagtctggccgctgcctacctgtggcctatctgccaccattttaccagttctttcccctgttaacattcacgcctgcttccttgctgtttc

SEQ ID NO: 118210 - DNA, 1446 bp, Homo sapiens
  Payload ID: 3137
  Gene Symbol: C12orf73
  Gene Name: chromosome 12 open reading frame 73
  Uniprot ID: Q69YU5
  ENST ID: ENST00000549478
  CDS Start-End: 453-668
gtccgctccgtccgcccttagacctgttgcccagcatccctgcagttcgcggtacagtctctagtagagcgcgtgtatagaggcagagaggagtgaagtccacagttcctctcctccaagaggtagaaggggcgcggggaaacgacctggtatcggttttccgcttgctgatcaagagctccctttaatgccgcacgcaggccggcgcccctcactgataaacgattggggctgggcctcggcctggagggcgttcgtcctctcagtgccctcagctcgtaaaggaggaaaccgaggcgtggggttgggcgagaacccaggggtcctcctgcacccccgccgccgtgtgtctcgtgtccagcgctggctggagcgcctcagccctggcgcggtgtagtcgtgagctggaacttctgacactgccccttccttccccgtccagcctgccgaccatgcccgcgggcgtgcccatgtccacctacctgaaaatgttcgcagccagtctcctggccatgtgcgcaggggcagaagtggtgcacaggtactaccgaccggacctgacaatacctgaaattccaccaaagcgtggagaactcaaaacggagcttttgggactgaaagaaagaaaacacaaacctcaagtttctcaacaggaggaacttaaataactatgccaagaattctgtgaataatataagtcttaaatatgtatttcttaatttattgcatcaaactacttgtccttaagcacttagtctaatgctaactgcaagaggaggtgctcagtggatgtttagccgatacgttgaaatttaattacggtttgattgatatttcttgaaaactgccaaagcacatatcatcaaaccatttcatgaatatggtttggaagatgtttagtcttgaatataacgcgaaatagaatatttgtaagtctactatatgggttgtctttatttcatataaattaagaaattatttaaaactatgaactagtttcattaattgaatttgctaagtggagttatttctcattgctaaactgttttttttcaaattctagatctctgctaactttagtaaatgaacactaaagtggtgagctttgataatgcattttgtggatacaaaatcatcgcctcatcactttctagaatgaaaggctgggggcattgctcaccttttgcgtgaagaaaagacctgtcccttagagccagtttttgcttaaggggaggacagaccgtcgtcacccagtggaccacgtgaatgaatggatgcagtgcatgctttagaagcaccgcatacctccttttacaggtacagagtaagtggtctggctactgagggaaagagtcatgatttgaatccgagtcttctgtaagacaatgacttcatgaaggtgaaaaatcagttttatggttattaaagtaaaaatttaccttgggt

SEQ ID NO: 118211 - DNA, 685 bp, Homo sapiens
  Payload ID: 3137
  Gene Symbol: C12orf73
  Gene Name: chromosome 12 open reading frame 73
  ENST ID: ENST00000552940
  CDS Start-End: 410-589
agttcgcggtacagtctctagtagagcgcgtgtatagaggcagagaggagtgaagtccacagttcctctcctccaagaggtagaaggggcgcggggaaacgacctggtatcggttttccgcttgctgatcaagagctccctttaatgccgcacgcaggccggcgcccctcactgataaacgattggggctgggcctcggcctggagggcgttcgtcctctcagtgccctcagctcgtaaaggaggaaaccgaggcgtggggttgggcgagaacccaggggtcctcctgcacccccgccgccgtgtgtctcgtgtccagcgctggctggagcgcctcagccctggcgcggtgtagtcgtgagctggaacttctgacactgccccttccttccccgtccagcctgccgaccatgcccgcgggcgtgcccatgtccacctacctgaaaatgttcgcagccagtctcctggccatgtgcgcaggggcagaagtggtgcacaggtactaccgaccggacctgcaaaactggatcacaagtctttcggtcggagaactggaaggtctgggcagagtcgagcagaggagaccatgatgactgcctagacttgtgctcagtgctgtgttggggagaactgctacagacaatacctgaaattccaccaaagcgtggagaactcaaaacggagct

SEQ ID NO: 118212 - DNA, 463 bp, Homo sapiens
  Payload ID: 3137
  Gene Symbol: C12orf73
  Gene Name: chromosome 12 open reading frame 73
  Uniprot ID: Q69YU5
  ENST ID: ENST00000547945
  CDS Start-End: 145-360
tcacgtgcctgcgccggcagcgctcccactttcctgtccggtgcggccccgggtccctgtattttgggtccggcctgctcgccgtccgctccgtccgcccttagacctgttgcccagcatccctgcagttcgcgcctgccgaccatgcccgcgggcgtgcccatgtccacctacctgaaaatgttcgcagccagtctcctggccatgtgcgcaggggcagaagtggtgcacaggtactaccgaccggacctgacaatacctgaaattccaccaaagcgtggagaactcaaaacggagcttttgggactgaaagaaagaaaacacaaacctcaagtttctcaacaggaggaacttaaataactatgccaagaattctgtgaataatataagtcttaaatatgtatttcttaatttattgcatcaaactacttgtccttaagcacttagtctaatgctaactgca

SEQ ID NO: 118213 - DNA, 620 bp, Homo sapiens
  Payload ID: 3137
  Gene Symbol: C12orf73
  Gene Name: chromosome 12 open reading frame 73
  ENST ID: ENST00000549960
  CDS Start-End: 77-238
gtctctagtagagcgcgtgtatagaggcagagaggagtgaagtccacagttcctctcctccaagagcctgccgaccatgcccgcgggcgtgcccatgtccacctacctgaaaatgttcgcagccagtctcctggccatgtgcgcaggggcagaagtggtgcacaggtactaccgaccggacctgatgagaaacaggttgagaagagtgaagttgatttctcaaagtcacatagcttagtgagacgatttgaggatctgaagcccaagctttctgtttgcaaaactggatcacaagtctttcggtcggagaactggaaggtctgggcagagtcgagcagaggagaccatgatgactgcctagacttgtgctcagtgctgtgttggggagaactgctacagacaatacctgaaattccaccaaagcgtggagaactcaaaacggagcttttgggactgaaagaaagaaaacacaaacctcaagtttctcaacaggaggaacttaaataactatgccaagaattctgtgaataatataagtcttaaatatgtatttcttaatttattgcatcaaactacttgtccttaagcacttagtctaatgctaactgcaagaggaggtg

SEQ ID NO: 118214 - DNA, 540 bp, Homo sapiens
  Payload ID: 3137
  Gene Symbol: C12orf73
  Gene Name: chromosome 12 open reading frame 73
  ENST ID: ENST00000552460
  CDS Start-End: 1-114
atgcccgcgggcgtgcccatgtccacctacctgaaaatgttcgcagccagtctcctggccatgtgcgcaggggcagaagtggtgcacaggtactaccgaccggacctggtgtgaatagtggtttggagcacaatgttgggagcagtcatttctgtttggactctgcctggacagatgagaaacaggttgagaagagtgaagttgatttctcaaagtcacatagcttagtgagacgatttgaggatctgaagcccaagctttctgtttgcaaaactggatcacaagtctttcggtcggagaactggaaggtctgggcagagtcgagcagaggagaccatgatgactgcctagacttgtgctcagtgctgtgttggggagaactgctacagacaatacctgaaattccaccaaagcgtggagaactcaaaacggagcttttgggactgaaagaaagaaaacacaaacctcaagtttctcaacaggaggaacttaaataactatgccaagaattctgtgaataatataagtcttaaatatgta

SEQ ID NO: 118215 - DNA, 1856 bp, Homo sapiens
  Payload ID: 3138
  Gene Symbol: C12orf74
  Gene Name: chromosome 12 open reading frame 74
  Uniprot ID: Q32Q52
  ENST ID: ENST00000397833
  CDS Start-End: 452-1024
agccgttgtttacctgacttgttcttaggctgccttagattctgagctggcttccctttaggctttttcataaacaaataactggaaatgtctctaaggaggggagagaccagttcctcattgcagctggtagcaaggttgctttcactcagccaggaggacgcattgttacaggtgtggaacttgttgctccgagccctcgcctggcagctcactctggatctgcgggttctgaggagcctcgggacccacctgggtgcagttgccttcagggacagaccatcttacagatgcaataacctgcttgacattctcctctggaaaaggaaaagaactacgagaggaagcatggcacttggatgcagaaattgagcaccctccatgtgatccagagaacagcaactcatacgtcttctggaaccttctaccaacagtagaacctcttagctttatggagaaaacagagtcattctgtccagaggtgccaccccaagactgtggagcctctcctcggccctcgctgaggagcctgccaaagaaccaggggagtctcctccagtttgaccggcaagccccaggccgcatctccacctcgcccactttgaggagattaaggacccgtggctgtgggacaaggcaggatgcctggcaggtgaccacctggggaagctggggagctcctgtgggcttcccatgttacctttcgaagagcctgccaggaagcccaaaggattcttcacacttgctgtcacccttgagactccactcaagattgacctctgaacctgaaagggccctgaatgcagctgactcactggagccccaaacccggcccactgacaagtatctccctcctgagcttcagcctgtcaatgaagggtcccttcaccaggcctctcttcggcagcaagaaggccacttcctgcccagccccaccctacgacaccctagtcctcagggagaagaattgcacccatccaggtgtgtatgcatttattttctccggtgctatgacatctgttgactatttactattagatttttatttctgtcctgacataacaaagctgacggtgtgttaaccagtgcactttgttttatagcactcaagtcactcttcgcatttataggtgcacgagttttcatttcaagagtctccctttaagagcacagcatttgggggcaggatacaatgccatatgcagtcatagttttcattttgaattgtcaatgtcttggccctgtggcttaattaacatccacttagtaataggttttgtctggtagagaaaatagaaaggccagagatatgcaacagcttttcaaagaaaaatttggaggataaaagaaaggaacaagatgtcctggttaaatctagggtgacctttaaaataacctgttatgacagactgtgcccttatccagaatgaagtagactgtgtcatttccaaaaccagctctgaactttcagcacggccccctggttgtagcaatggatctgccatctctgacagggatgaagagtttctgcagcagcaagggaaagatccatgcccaattttatcttcctgacttgtgggattggcaggaaagccctcatttcatttgaaaagtcacagaggatttttttggagaaatagctgctgttttattactggacctcaatcctcaagcaatagtttgatattcatagcagtaaggataacatccatgtacacattctttgttgattttaatccttgttggcctaattgtaccaacaaaggtagaagatacttaccaagccatagggaaatgcaaattgttatgtctgtgtatcagctagctgttgctagataaaaaaccacttaaagtaa

SEQ ID NO: 118216 - DNA, 2184 bp, Homo sapiens
  Payload ID: 3138
  Gene Symbol: C12orf74
  Gene Name: chromosome 12 open reading frame 74
  Uniprot ID: Q32Q52
  ENST ID: ENST00000544406
  CDS Start-End: 267-788
gttgctccgagccctcgcctggcagctcactctggatctgcgggttctgaggagcctcgggacccacctgggtgcagttgccttcagggacagaccatcttacagatgcaataacctgcttgacattctcctctggaaaaggaaaagaactacgagaggaagcatggcacttggatgcagaaattgagcaccctccatgtgatccagagaacagcaactcatacgtcttctggaaccttctaccaacagtagaacctcttagctttatggagaaaacagagtcattctgtccagaggtgccaccccaagactgtggagcctctcctcggccctcgctgaggagcctgccaaagaaccaggggagtctcctccagtttgaccggcaagccccaggccgcatctccacctcgcccactttgaggagattaaggacccgtggctgtgggacaaggcaggatgcctggcaggtgaccacctggggaagctggggagctcctgtgggcttcccatgttacctttcgaagagcctgccaggaagcccaaaggattcttcacacttgctgtcacccttgagactccactcaagattgacctctgaacctgaaagggccctgaatgcagctgactcactggagccccaaacccggcccactgacaagtatctccctcctgagcttcagcctgtcaatgaagggtcccttcaccaggcctctcttcggcagcaagaaggccacttcctgcccagccccaccctacgacaccctagtcctcaggtaacacagctctaagcctccggcctctcagttgctgaaccacaaagcaaaatagatctcagagttgcttagttcccccaagggccagtagatcctaaaaaggagacagcacaggaagtcacactgaggggacacattctctttaggaagcattggctcttaagtgaaaggagggcagcaatctggggaggaaagaaaatgatctcgctcactttcttctgtccttagaggcactttgagaaaggatgcaccaaggccaggcttaccgatggtctgtcaggtacccgagagcaatgggggccctcttgcaaatgcacactatttaaagacaacgtcgtgtcactgatttaaaaggggagaaagagccagttattcaaatttccaatcccaccaaaatgtaaaacatgttttaactaggagggctcattgtttctcctttcaacatgtttgctttggagtttgggatgggtttgagcaagactaaaacatatgttcttaaaatttatttcagggagaagaattgcacccatccaggtgtgtatgcatttattttctccggtgctatgacatctgttgactatttactattagatttttatttctgtcctgacataacaaagctgacggtgtgttaaccagtgcactttgttttatagcactcaagtcactcttcgcatttataggtgcacgagttttcatttcaagagtctccctttaagagcacagcatttgggggcaggatacaatgccatatgcagtcatagttttcattttgaattgtcaatgtcttggccctgtggcttaattaacatccacttagtaataggttttgtctggtagagaaaatagaaaggccagagatatgcaacagcttttcaaagaaaaatttggaggataaaagaaaggaacaagatgtcctggttaaatctagggtgacctttaaaataacctgttatgacagactgtgcccttatccagaatgaagtagactgtgtcatttccaaaaccagctctgaactttcagcacggccccctggttgtagcaatggatctgccatctctgacagggatgaagagtttctgcagcagcaagggaaagatccatgcccaattttatcttcctgacttgtgggattggcaggaaagccctcatttcatttgaaaagtcacagaggatttttttggagaaatagctgctgttttattactggacctcaatcctcaagcaatagtttgatattcatagcagtaaggataacatccatgtacacattctttgttgattttaatccttgttggcctaattgtaccaacaaaggtagaagatacttaccaagccatagggaaatgcaaattgttatgtctgtgtatcagctagctgttgctagataaaaaaccacttaaagtaaca

SEQ ID NO: 118217 - DNA, 689 bp, Homo sapiens
  Payload ID: 3139
  Gene Symbol: C12orf75
  Gene Name: chromosome 12 open reading frame 75
  ENST ID: ENST00000552457
  CDS Start-End: 219-359
ggcgaggggtgccgggtggtttccgcccggcagcccgcagcccgctgcgccccgggccgcgtctcccggcggtgggagggggcggcccccactcggttcctggcccctcgcggccccgtcagcctcccgctcggggtgcgccgcccttcgtctgggtctccgcccccaggacccgcggccgagagctccggagcgcggcttccccggccggctgcgcgatgggctgcgggaactccaccgccaccagcgcgggcgcgggccaagaaactatggaggagtatatgttggcctaccatctgaagctgtcaatatggtgtccagtcaaacaaagacggttcggaaaaattagaagaaaataacatcatgactcaagaatcaagagcttgctcatcagtttggaaggaatttggctccgtgggacgttgtaatgtgcacagacatttccaaggaaattctaaacagtcacccttcccttttgcattcccccaaatcttaagtgtatacataaaaccctgggtacatattgttgtggtaatagaagggaattggttaaacagtacacttgtttatggaactttctgtggccacctacgaaagacaagttaacaaactgtcatggaggctgttgttgcccagccagggccgctgcattttgacaacatttccaccctggccactcagcacatttc

SEQ ID NO: 118218 - DNA, 1366 bp, Homo sapiens
  Payload ID: 3139
  Gene Symbol: C12orf75
  Gene Name: chromosome 12 open reading frame 75
  Uniprot ID: Q8TAD7
  ENST ID: ENST00000443585
  CDS Start-End: 257-448
gggtgggtccggcgggtccccgggcggggcggggccggggcgaggggtgccgggtggtttccgcccggcagcccgcagcccgctgcgccccgggccgcgtctcccggcggtgggagggggcggcccccactcggttcctggcccctcgcggccccgtcagcctcccgctcggggtgcgccgcccttcgtctgggtctccgcccccaggacccgcggccgagagctccggagcgcggcttccccggccggctgcgcgatgggctgcgggaactccaccgccaccagcgcgggcgcgggccaaggccctgcaggagcagccaaagatgtaacagaagaatccgtaacagaagatgacaagaggagaaactatggaggagtatatgttggcctaccatctgaagctgtcaatatggtgtccagtcaaacaaagacggttcggaaaaattagaagaaaataacatcatgactcaagaatcaagagcttgctcatcagtttggaaggaatttggctccgtgggacgttgtaatgtgcacagacatttccaaggaaattctaaacagtcacccttcccttttgcattcccccaaatcttaagtgtatacataaaaccctgggtacatattgttgtggtaatagaagggaattggttaaacagtacacttgtttatggaactttctgtggccacctacgaaagacaagttaacaaactgtcatggaggctgttgttgcccagccagggccgctgcattttgacaacatttccaccctggccactcagcacatttcatggaggtcatgtcttttcactgatacttttttgatagtttttatataacaaaatccttattctatttataacttaagatgataaggcactataaattaatgacctaaaataatatatttgtctgttatcttttgctatttctacttcactttaatttttagctgtaaaattggtaaatggattcttacaactatctctttccatttcttactatttggttttcaaatttcatttaaatgtcagaatttccttttttaggaacaatgtgtatttcattgcactatttaaaaataaactcaaatttgcatgccatatgcacattttgattacatttttattttctttcgtgaaaggcatgtgcaactacaaatacttcatagctgtttgggttgctcattctacatcacgacaatctcatcatattatttctataacttttcaaggacttgcgatggatggttagtgggatatctggaaattaatttgataatgacttgtgtatctacttagtattgcaatgtaagttactcaattcaccaatgtatttcaacaattaaaacatttttatccctcttca

SEQ ID NO: 118219 - DNA, 719 bp, Homo sapiens
  Payload ID: 3139
  Gene Symbol: C12orf75
  Gene Name: chromosome 12 open reading frame 75
  ENST ID: ENST00000549893
  CDS Start-End: 183-329
gcagcccgctgcgccccgggccgcgtctcccggcggtgggagggggcggcccccactcggttcctggcccctcgcggccccgtcagcctcccgctcggggtgcgccgcccttcgtctgggtctccgcccccaggacccgcggccgagagctccggagcgcggcttccccggccggctgcgcgatgggctgcgggaactccaccgccaccagcgcgggcgcgggccaaggccctgcaggagcagccaaagatgtgccattctcaagcacaacctgggtgaggctctgtcattgcttaatggatcagctgtatagtaacagcagaagataaaacatggtgagttgtgacaatgtaatgtcacagacaattttcctatttaaggttgttgttacagttctgactttggcaagcagaatggtttcaatagagcaatgtggggcttactatattaccatgcctacaggagcagttaaagcttcatgaaagtaattgaaagactaaattttgggctcaacatttaaaacaaaatcaattagatggtttagaagtattttatgaatatccaacagagacagaaatggaggtttctaataattaaaagtgttgctggatgtgtcaagatatacttgaaaagtgttttttaaaatttaaattggctgccaaccttgttcatcaaattcccctaaggcaacacaataatttaggaatggaagcaattgt

SEQ ID NO: 118220 - DNA, 291 bp, Homo sapiens
  Payload ID: 3139
  Gene Symbol: C12orf75
  Gene Name: chromosome 12 open reading frame 75
  ENST ID: ENST00000549934
  CDS Start-End: 25-291
gcggcttccccggccggctgcgcgatgggctgcgggaactccaccgccaccagcgcgggcgcgggccaaggccctgcaggagcagccaaagatgtaacagaagaatccgtaacagaagatgacaagaggagaaactatggaggagtatatgttggcctaccatctgaagctgtcaatatggtgtccagtcaaacaaagacggttcggaaaaaagaaaataacatcatgactcaagaatcaagagcttgctcatcagtttggaaggaatttggctccgtgggacgttgtaat

SEQ ID NO: 118221 - DNA, 1329 bp, Homo sapiens
  Payload ID: 3139
  Gene Symbol: C12orf75
  Gene Name: chromosome 12 open reading frame 75
  ENST ID: ENST00000612117
  CDS Start-End: 257-412
gggtgggtccggcgggtccccgggcggggcggggccggggcgaggggtgccgggtggtttccgcccggcagcccgcagcccgctgcgccccgggccgcgtctcccggcggtgggagggggcggcccccactcggttcctggcccctcgcggccccgtcagcctcccgctcggggtgcgccgcccttcgtctgggtctccgcccccaggacccgcggccgagagctccggagcgcggcttccccggccggctgcgcgatgggctgcgggaactccaccgccaccagcgcgggcgcgggccaaggccctgcaggagcagccaaagatgtaaactatggaggagtatatgttggcctaccatctgaagctgtcaatatggtgtccagtcaaacaaagacggttcggaaaaattagaagaaaataacatcatgactcaagaatcaagagcttgctcatcagtttggaaggaatttggctccgtgggacgttgtaatgtgcacagacatttccaaggaaattctaaacagtcacccttcccttttgcattcccccaaatcttaagtgtatacataaaaccctgggtacatattgttgtggtaatagaagggaattggttaaacagtacacttgtttatggaactttctgtggccacctacgaaagacaagttaacaaactgtcatggaggctgttgttgcccagccagggccgctgcattttgacaacatttccaccctggccactcagcacatttcatggaggtcatgtcttttcactgatacttttttgatagtttttatataacaaaatccttattctatttataacttaagatgataaggcactataaattaatgacctaaaataatatatttgtctgttatcttttgctatttctacttcactttaatttttagctgtaaaattggtaaatggattcttacaactatctctttccatttcttactatttggttttcaaatttcatttaaatgtcagaatttccttttttaggaacaatgtgtatttcattgcactatttaaaaataaactcaaatttgcatgccatatgcacattttgattacatttttattttctttcgtgaaaggcatgtgcaactacaaatacttcatagctgtttgggttgctcattctacatcacgacaatctcatcatattatttctataacttttcaaggacttgcgatggatggttagtgggatatctggaaattaatttgataatgacttgtgtatctacttagtattgcaatgtaagttactcaattcaccaatgtatttcaacaattaaaacatttttatccctcttc

SEQ ID NO: 118222 - DNA, 1964 bp, Homo sapiens
  Payload ID: 3140
  Gene Symbol: C12orf76
  Gene Name: chromosome 12 open reading frame 76
  Uniprot ID: Q8N812
  ENST ID: ENST00000309050
  CDS Start-End: 366-773
agggagaagatgactgagccggccgggtgcagtggctcacccctgtaatcccaatactttgagaggccgaggtgggtggatcacctgaggtctggagttcgagaagatgacggagcagtgtgagccctactgaaccacatccagtggattttccttaggaaggaagatcctgttaccagacaaaatgggaaaaggaagtgaggagggtgatgtgagagcttgagggggaggtcagaaggtcagagatgacccagttctggaggtgaccccatagaaggagaagaatccagccacgtgatacacgggaccaagagaacagtaaatgcaaagatctggaagcacaaaagaggaacagcaaggacagcatgttccagaacctgcaaggaacatttgaaaaggaaattggaaaaataattccatttaccatagcatttaagagagctgaggctgtggagccagatggctgcgttcagagctggcgctgctgtttaccatgtgaccttggacaagcttctcgcttcattcataccacagtttgttcggctattaggtggaggagctgtaagggggagaggaactttgctgaaaggcacatcctccctgcagagcttgaagaacaatctaaccatgctggcatggggcccatcctacctgcaatgccaagtgttgatgggaaccattttcagcatcctgctggtgactgtcatccttatggcattttgtgtctacaagcccattcggcgtcggtgacagccagacaagttcttcaatgagtatttgggaataggataagttgtgttgcacacaggccagtggagaagttggaaccaaaactttcctacttggaaatgacctttggtctggacagttggtaaatgctaaatgaattagaagaaaacatgtactagacattattttttcctaacactgtagcgcaaataattggcccctgagtccgcttctcagtgtttctgactgtacttgttaaaagtaagacctgaaagctccaaaggtcagtgtaaagatggagtgttcatgagaaagaaaacatggtaaccttgtgagtgcctgtaagaaccacactgtaaagaactcatcattaatgcttgaaaatgttattaagaaggagacttaccatgcagacattccctatttaagaaccatttggttacagtgggttaagaatcacagatttttttttttaatctcacctgagttagcctagaatgcgctggttgcaaagtggtgtcagctgtggggatcttgggccctcgttcctcacctgcatcctgccctgcactcaggtgctccccctgaagtcagggtcacatcaggtagacctgttactatatgcacctttggcctggaatgctctgaagttggactggaaatgttactaggttggcctgttacaaaaaggaccccatcctgcttaaacacattgatctcccttgccctgcatttgagtctttctagcccacggtctgaaacttgaggcagctttccagatttggaatgtaaaaggctcagtgggcactctgttcatccctgggtggggagggcccagccaacagaagtgcatgtccactgtgcgggccagtgtgtgtttacacaaatttcatctcagctttgaaaatgctgctattagtttccactgttggtgaactggattttttcctcctattgaaatgatactttcatacttataaagctgtcgtcaatatttatttcaaggtgctagatttaattttgttattaaattgaaatgcttatcttgtgttcaagcacagcactgattttaacaacctgcatttaatgtgaagtaaccgaagtaggatactgtaactgtgtaaggattttgtttgtaatcttgtaacattgaaccattgaaatgttcagttctttgcttttgagcaaaacgtcaattaaaactaaagtaaaatcctatatattgttttactcca

SEQ ID NO: 118223 - DNA, 496 bp, Homo sapiens
  Payload ID: 3140
  Gene Symbol: C12orf76
  Gene Name: chromosome 12 open reading frame 76
  ENST ID: ENST00000551185
  CDS Start-End: 71-301
agacctgggaggagacagaggcagggcttgcgacggaagtggcctctctgcttctgcagggctggggaagatgctgcgtccagcgttaccgtggctgtaccttggcctctgcagcctcctggtgggggaggcagaggccccgagccccgtggatccgctggagcggagccggccgtacgcggtgctgcgagggcagaacctggagtccctgtcgcccaggctggagtgcaatggtgcgatctcggctcgctgcaacctccgcgtctggggttcaagcgattctcctgcctcagccccctgagtagctgggattacagtgttgatgggaaccattttcagcatcctgctggtgactgtcatccttatggcattttgtgtctacaagcccattcggcgtcggtgacagccagacaagttcttcaatgagtatttgggaataggataagttgtgttgcacacaggccagtggagaagttggaaccaaaactttcctact

SEQ ID NO: 118224 - DNA, 1755 bp, Homo sapiens
  Payload ID: 3140
  Gene Symbol: C12orf76
  Gene Name: chromosome 12 open reading frame 76
  ENST ID: ENST00000546651
  CDS Start-End: 61-210
ggagacagaggcagggcttgcgacggaagtggcctctctgcttctgcagggctggggaagatgctgcgtccagcgttaccgtggctgtaccttggcctctgcagcctcctggtgggggaggcagaggccccgagccccgtggatccgctggagcggagccggccgtacgcggtgctgcgagggcagaacctggatcaaactcttcattgaagtactcatcaggcgtgatggctgtggggttgtttgcagtagcacattccgtggtgaggtcctgctgagccagaactcaggagagtcagaaatgccaaatgatgttcacaagtgaaggcctgtggcactcagtgtctgaggtggacgtgttaaccagctaaagaccgggaagttctattcactaacttttttgcatggaacaagaaaatctatgaggatatcaccaaactacacaggaagtgtaatggatttcttcattttaaaatatttctctactctcctttacatttttatctcctgattataacaaagaaaaaaagaaagaaatatctgaaagtgcatgagacttggaagacttggagttgaagttctagctgtttccctgtctagctttgatagtggaaaggtaatttcatttttctgacccgcagggacatccactgtaccaagttcatatagttactgtgagcatcaagtaagaaaatatttgttaaggtgctctgttgcaatataaagtcctgaatcctttttaagttccatttctataaagaggcccctcgtttataatggataagagggaaagcacctgatttctataatcactacccctcctctaaaatccttatttattttcaaagagtcactcatctaattctcttccaaaagagtatctcaaattccagcttgggggtatctttggcctttacatagagtgggctgttcaggatccagtaaatgccatcccagacacagacaagttgtttcctttcatctaactgcaatgaaagctcattgcttcaacttaccccttgtgcaccaaattggtgttccacagttcccagcaaagattccagcgggttcctgtctgctacagaggggtagggagtttaaagtctaatattatatctcacttgtggctataaaaaaaagatcttcattaaagtttctggtccaagctacctcattaggaaatgcaattacagactggctgatcaaatcattcacaataaccataaactaatttatcctttatagggtgcttttcatgaggatctctaaactagataaacagttgtaagaattaaagcagaataatgggaagagtctggattttggagtgagccagacctggattccaaccccaccttggccactcgctacccatgtgttctgggcctcagttccctcatctgtcaaagtggagtaatggcaatggtggtggtggtgctggtgaacaattactgcatgcttaccacatactgcaggcgccattctaaaggcttccacgtcgtaactcatctaatcctctcaataactctaaggaaggttgggtatcacctgcatttcactgctgaggaactaaggcacagagcagaagtaatttcacaaggccatagaactggtggggctgggatggggctgggatgtggcaaccacatgcaatgtttttgcttggaccccaagttctgtctaaatctttcatcacaatagtttggactaaatcactcattccaatgataaatattctcaaatgtccttatctcc

SEQ ID NO: 118225 - DNA, 461 bp, Homo sapiens
  Payload ID: 3140
  Gene Symbol: C12orf76
  Gene Name: chromosome 12 open reading frame 76
  ENST ID: ENST00000546627
  CDS Start-End: 28-213
ctctctgcttctgcagggctggggaagatgctgcgtccagcgttaccgtggctgtaccttggcctctgcagcctcctggtgggggaggcagaggccccgagccccgtggatccgctggagcggagccggccgtacgcggtgctgcgagggcagaacctggagacaactggagagaggatctgtttacagctgtttgcacagcacttgacatagtgcctggcagcaagtggcatttgataaatcattggcagtgagtggatgaattgcctaacctggagctgccattaggaagtaacctgttttccctttgcagtgttgatgggaaccattttcagcatcctgctggtgactgtcatccttatggcattttgtgtctacaagcccattcggcgtcggtgacagccagacaagttcttcaatgagtatttgggaataggataagttgtgttgcacacaggcca

SEQ ID NO: 118226 - DNA, 607 bp, Homo sapiens
  Payload ID: 3140
  Gene Symbol: C12orf76
  Gene Name: chromosome 12 open reading frame 76
  ENST ID: ENST00000547573
  CDS Start-End: 58-288
gacagaggcagggcttgcgacggaagtggcctctctgcttctgcagggctggggaagatgctgcgtccagcgttaccgtggctgtaccttggcctctgcagcctcctggtgggggaggcagaggccccgagccccgtggatccgctggagcggagccggccgtacgcggtgctgcgagggcagaacctggagtccctgtcgcccaggctggagtgcaatggtgcgatctcggctcgctgcaacctccgcgtctggggttcaagcgattctcctgcctcagccccctgagtagctgggattacaggtgcccgccaccatgtccggctaatttttgtatttttagtagagatggggtttcaccatgttggccaggctggtctcaaactcctgacctcgtgatctgcctgccttggcctcccaaagtgctgggattataggcatgagcccccttgcctggctaaatcttggtttttcaaaggaacagtaatgagactgaagaacaaccatggttaggccctagctggaacctgggatgggcccacatccctacagacacacatcagtgtacatttgcttgttttgaatgcttcccaagatcgctgagata

SEQ ID NO: 118227 - DNA, 2204 bp, Homo sapiens
  Payload ID: 3140
  Gene Symbol: C12orf76
  Gene Name: chromosome 12 open reading frame 76
  ENST ID: ENST00000548191
  CDS Start-End: 259-582
gtcattggaagagctcaaagttaaaggctcccgctaaaaatcagtatgtttcattttgcagttactgggagggggcttgctgtggccccatctgggagagttgagccctggtccagccccgcgcaggaagggaggctgtaaccgtgccagcctgctgcagctgcagtgatgttttcctgtatgagacaaacaaagtcgcccggatccaaagcatcaattatggcaccattaagttcttccacgtgatcgtcttttcctatgttagagagggaaaacgagtcacacggaagcaagtcatgcagccgagctaggattggaacggaagtggcctgcagagcctgcctcccaccccactgtgctatgcctcccattgatgctttcctgtgcctgccatttagctttgctctggtgagtggcaagctgtaccagtggaaagagcctgtcatcagttctgtgcacagcaaggtgaaaaggacagcagaagtgaaagaggagatcgtggagaaagaaatgaagaagttggtgcacagtgtctttaacatggcagattacaccttccctttgcaggtgaacacctggtagtgttaacggaccccaacacttacccaaaggtagccattgggtcaggtttctgcactatagtcccttctgtggttgccagaaatacgttacaggaaaagggtcccgatccagaccccaagagggggttcttggatctagcgcaagaaagaattagggcaagtccacagtgcaaagtgaaagcaagtttattaataaagtagtggaataaaagaatggctactccatagacagagtagcccccgagggctgctggttaggcatttttatgattatttcttgatgatacgctaaacgaggggtggattattcatgcctcccccttttagaccatatagggtaacttcctgacattaccatggcatttgtaaactgtcatggcgctgctgggagtgtagcagtgaggacgaccagaggtcactcttgtcaccattttggttttggtggtttatagcaggctcctttactgcaacctgttttatcagcaaggtctttatgacctgtattttgtgctgacctcctatatcatcctgtgacttagaatgccttaaccgtctgggaattcagcccagtaggtttcagcctcattttacccagctcctatttaagatggagttgctctggttcacacgcctctgacatttgtattgcacatccattgtgaggtgaatgatactaatcccactacaaatcaaaccttcaggaggtgaggcaatgtgtgaggtggtaaagcctccagattcaaaactatgcttgggtcaaattctagctctgccactttgtgtgtgcagtgttgggccaaacacttagctcaattccctcatgtattcagcaaacagttactgaatataatatgctactcttctagtcttgtagcaggacgagccgcagacaaaacctctcagacaccgagttgtagaaggaagggctttattcagctggcagcatcggcaagctactgccttaaaatccgagctccccgaatgcacaatttctgtcccttttaagggctcctcacagcactaaagatttcacatgaaagggtcgtgattgatttgagcaagtaggtggtacgtgacaggggctgcatgcaccagtggtaagagagaaacagaacagggcagggagtttcacaacgttcttctatacaatgtctggaatctatgaataacatcggtttctaagttatgagttgatttttagctactgggtgtgaggcctctgagcccaagccaagccatcgcatcccctgtgacttgcacgtatacatccagatggcctgaagtaactgaagatccacaaaagaagtaaaaatagccttaactgatgacattccaccattgtgatttgtttctgccccaccctaactgatcaatgtactttgtaatctcccccacccttaaggtactttgtaatctcccccaaccttaagaaggttctttgtaattctccctacccttgagaatgtacttcgtgagatccacccctgcccgcaaaacattgctcttaacttcaccgcctatcccaaaacctgtaagaactaatgataatccaccaccctttgcttactctcttttcggactcagcccgcctgcacccaggtgaaataaacagccatgttgctc

SEQ ID NO: 118228 - DNA, 1302 bp, Homo sapiens
  Payload ID: 3140
  Gene Symbol: C12orf76
  Gene Name: chromosome 12 open reading frame 76
  ENST ID: ENST00000549724
  CDS Start-End: 605-823
aggcaggcccaggcctggtttcgggcctggcgccgggctgcccgtctttggtttcacttccttgttgtttcttcttaaaacaggtactgagtataaaacaatataaaacaaaatgagagggtctctctctcccccagtctctgggacagagcagagagcaagaacaaaatcgctgtgctcgtggactttacatgctagggcggagcaggtcctcagaaaatcatcaaatgcccgtaatgaaggtttaataagaaaatgcatggattcgtaaaaaatcttcaataggccccaaatggacctacaagacctcgaccccaatggatgagggaacgctaaccacagcagaacggtaatcgcggcgaacgttggcacagacggaaagttgatctgaacggaaagttggtccgggggaaacattagttattgaggaacgttaatccggaacaaatcttaggcagaagcggaacttagaccaggacgcacagttaccatggcaatgacgcgcgccctaagggcggtggcagcgacgcagagagacctgggaggagacagaggcagggcttgcgacggaagtggcctctctgcttctgcagggctggggaagatgctgcgtccagcgttaccgtggctgtaccttggcctctgcagcctcctggtgggggaggcagaggccccgagccccgtggatccgctggagcggagccggccgtacgcggtgctgcgagggcagaacctggtgttgatgggaaccattttcagcatcctgctggtgactgtcatccttatggcattttgtgtctacaagcccattcggcgtcggtgacagccagacaagttcttcaatgagtatttgggaataggataagttgtgttgcacacaggccagtggagaagttggaaccaaaactttcctacttggaaatgacctttggtctggacagttggtaaatgctaaatgaattagaagaaaacatgtactagacattattttttcctaacactgtagcgcaaataattggcccctgagtccgcttctcagtgtttctgactgtacttgttaaaagtaagacctgaaagctccaaaggtcagtgtaaagatggagtgttcatgagaaagaaaacatggtaaccttgtgagtgcctgtaagaaccacactgtaaagaactcatcattaatgcttgaaaatgttattaagaaggagacttaccatgcagacattccctatttaagaaccatttggttacagtgggttaagaatcacagatttttttttttaatctcacctgagttagcctagaatg

SEQ ID NO: 118229 - DNA, 1580 bp, Homo sapiens
  Payload ID: 3140
  Gene Symbol: C12orf76
  Gene Name: chromosome 12 open reading frame 76
  ENST ID: ENST00000615315
  CDS Start-End: 1-408
ttttttttacaccagcaaggaacatttgaaaaggaaattggaaaaataattccatttaccatagcatttaagagagctgaggctgtggagccagatggctgcgttcagagctggcgctgctgtttaccatgtgaccttggacaagcttctcgcttcattcataccacagtttgttcggctattaggtggaggagctgtaagggggagaggaactttgctgaaaggcacatcctccctgcagagcttgaagaacaatctaaccatgctggcatggggcccatcctacctgcaatgccaagtgttgatgggaaccattttcagcatcctgctggtgactgtcatccttatggcattttgtgtctacaagcccattcggcgtcggtgacagccagacaagttcttcaatgagtatttgggaataggataagttgtgttgcacacaggccagtggagaagttggaaccaaaactttcctacttggaaatgacctttggtctggacagttggtaaatgctaaatgaattagaagaaaacatgtactagacattattttttcctaacactgtagcgcaaataattggcccctgagtccgcttctcagtgtttctgactgtacttgttaaaagtaagacctgaaagctccaaaggtcagtgtaaagatggagtgttcatgagaaagaaaacatggtaaccttgtgagtgcctgtaagaaccacactgtaaagaactcatcattaatgcttgaaaatgttattaagaaggagacttaccatgcagacattccctatttaagaaccatttggttacagtgggttaagaatcacagatttttttttttaatctcacctgagttagcctagaatgcgctggttgcaaagtggtgtcagctgtggggatcttgggccctcgttcctcacctgcatcctgccctgcactcaggtgctccccctgaagtcagggtcacatcaggtagacctgttactatatgcacctttggcctggaatgctctgaagttggactggaaatgttactaggttggcctgttacaaaaaggaccccatcctgcttaaacacattgatctcccttgccctgcatttgagtctttctagcccacggtctgaaacttgaggcagctttccagatttggaatgtaaaaggctcagtgggcactctgttcatccctgggtggggagggcccagccaacagaagtgcatgtccactgtgcgggccagtgtgtgtttacacaaatttcatctcagctttgaaaatgctgctattagtttccactgttggtgaactggattttttcctcctattgaaatgatactttcatacttataaagctgtcgtcaatatttatttcaaggtgctagatttaattttgttattaaattgaaatgcttatcttgtgttcaagcacagcactgattttaacaacctgcatttaatgtgaagtaaccgaagtaggatactgtaactgtgtaaggattttgtttgtaatcttgtaacattgaaccattgaaatgttcagttctttgcttttgagcaaaacgtcaattaaaactaaagtaaaatcc

SEQ ID NO: 118230 - DNA, 2633 bp, Homo sapiens
  Payload ID: 3141
  Gene Symbol: C14orf1
  Gene Name: chromosome 14 open reading frame 1
  Uniprot ID: Q9UKR5
  ENST ID: ENST00000256319
  CDS Start-End: 447-869
cgtcaccgccgcgcagcgcgggcgcagagccctgccctcagctgaagggagtcttcttttttttttttttttccgctgtttttttctccgcccctaagaggttgactccaaacccggagttccgctaggtccaacaggagggcttacggcgtgagcggcgtacctggggagaggcttaggcagcggcaaccgctgattggcagtaaaggggttcactccccatctcctgctcgggcgaaaccgggacagccaatcagagagagtactgacggaaacggcccaatcctggagcagggctgagggagggggcggggacaaatggctcaggtggactccgggctggagctgtcctgggggagcttgtttgcggcagcggctgctgctgccactgctgtgctgggggcccggtcgccaggcaaaaagccctcccacgtttgaggggagtcatgagccgtttcctgaatgtgttaagaagttggctggttatggtgtccatcatagccatggggaacacgctgcagagcttccgagaccacacttttctctatgaaaagctctacactggcaagccaaaccttgtgaatggcctccaagctcggacctttgggatctggacgctgctctcatcagtgattcgctgcctctgtgccattgacattcacaacaagacgctctatcacatcacactctggaccttcctccttgccctggggcatttcctctctgagttgtttgtctatggaactgcagctcccacgattggcgtcctggcacccctgatggtggcaagtttctccatcctgggtatgctggtcgggctccggtatctagaagtagaaccagtatccagacagaagaagagaaactgaggccagcattatcacctccaggactttctcgttttccaccttggccatcttcttccttcgtcgtctctcctctttaatttcttttctattccatcatctgcccttttattcacttttagcctctttttttaatttttaaaatttaaagatatgcatactgaaaagtatataacatgtacgtacaatttaaagaataattttaaagtgaatactacgtaactccatccaagtcaagaaattgccagcttctcggaagcccactgtgtctccttcccctacctgcaacctcttccaggctcccttttccagccttcccctttttcccttttattttcatgccttgatttgacttgtgtggtgggaacatgtgaactatgaaacttaaacctgctgcccacccagagcagctgtgaccaagggctgcctcaaggggttgtccacgcaggttgggctcctctctgctgctggacccaagactctgaaccttccaagggacaggcagttcttctaagaagggctcccctgtgtgtgagcaagaccacagctctccttctatctacagatgcatgagggttggaagagtctgggctgtttttagaccttctggtcagctgtatttgtgtaacaacttttgtaataaatagaaaaaccctctgctctgatcagttcttgtactttgacctctgctaagacaagagcatggctgcctcctctgagccctaggagaatcacagctttatgcctgattgaatacaccatagtgagtaggacagctcatgacacaggtcagcctggctgcctccggctccttactgtcatttgctcattcctcttgtattcttgaagtcaaatcttcttttttctcaccttcaagagtctgcgttcacaactaaacactaagtgccctttcttatttcctcctaaagaagaaacagattcttgagagagcagagacaaaaaaatagaactaggcagcatagatgaaacaactgcatgacatgggaagaagacaactaaaccccgaggagaatgcactggaatggacagttgctcttaaaccctacccagagggcctcccccagctggaccctcatacacagtgtgtgtatccaaaaggccattgctatttcagcaaatatttgttgagtacttctccatgccggacacttgggaaagagaaatgaacgacacaggcaatgcccctgccctgtgggccttatattatagtcaaggtaacagaatcaacaagccaacacaaaaataaagaacttcaaatagggataagaactctaacaaacacaaggtattttggtcaagaaggaatgtggggtgggcagtggggaacgtaacttaaattagatcatcagaaagtcctccctgaggagatgggatttttttgttttttagagacagggtttcactctgtcacccaggctggagtgcagtggcacaatcacacctcactgcagcctcaacttcctgggctcaagtgatcctcctgcatcagcttcccaagtagctgggactacaagtgtgtaccaccacatccagctaacatttttgggggtgggaagagatggggtcttactatgttgtccaggctaagaggtgggatttgagctgagacttgaatgcccaggagttaaatgtcttaagatatggagcaggccgttagaaaggagggagcagcaactggaaggtagaatagtcttattcaaggaataagaactatgtaatcacagcatggtgaagagttaggaagtg

SEQ ID NO: 118231 - DNA, 3082 bp, Homo sapiens
  Payload ID: 3142
  Gene Symbol: C14orf105
  Gene Name: chromosome 14 open reading frame 105
  Uniprot ID: Q9NVL8
  ENST ID: ENST00000216445
  CDS Start-End: 138-1028
tagaaggatgccatgaaggaaatgactgctttgtaaagcgagggtaaacttctgaaatgctttgattaaaataagctatattaaagaccccaaaaccacttccctcgcagctttcctctgaatgtctttcacatgaaatgggcctgagtcactctaagactcaccttagggtgatcaaagtagcacctttgcaaaacaaagaggtagagactccctcggctggccgtgtggactttgcattcaatcagaatttggaagaaaagacttcatattcactggcaagactgcaggaccagaataaagccttggaagggcagctgccacctttacaagaaaactggtatggaagatattctacagcatccagagacatgtattttgacatcccactggaacacagagaaacaagtattattaaaaggcatccaccccaaagacttcaaaagcttgaacccattgacttgccacgagtaattacttcaggaagactcctgagccagcgagaagccaggacaatgcacaaagcaaagcaggtactagaaaagaaaatgcaaactccaatgtatacttctgagaacagacaatatttgcataagatgcaagtgctggaaatgatccgtaaaagacaagaggcccaaatggagttaaagaaaagtcttcatggagaggcaagaattaataagcaaagtccaagggaccataaagccaagaaaacccttcaaagcaccccaaggaatgatgaccatgaccttctaaccatgttgcctgatgaaatcttgaacagaggtcccggaaattcaaagaatacagaatttttgaaacatcaagcagtgaataactactgtccctggaaaattggcaaaatggaaacatggcttcatgaacaagaggcccagggacagcttctctgggacagttccagctctgactcagatgagcaggggaaagatgagaagaagccacgagcactggtgaggaccaggacagagagaatcccacttttcgatgagttttttgatcaagaataagaatactattcattaacctagaaactgagtgctttgaaagcttgttttactctcaaaatcttccaaactgatatatgaattactttgaggacagcaaatcactttggtaaaaagaaatgatatctttagagtcttatgattaacaagtccgtcacatgtgctgttaactattgctgcataactaaatgcctcaaaacacaggggctaaccaagagccattttattgtctcactttcctgtgggttgctgagttcagctaggtggttcttctgctgttcccttttgaaatctttcatgtcattgaaattggactacatttggactactaagactggagtcatccagaggccccattaggacactgacacagggggaccttgccccctatccatgtagcctcagagcatctgcatatgatctcttcagcaggacactgcagagatttctctcatatgagcccagggctcccaaaagcaattgtctcaagaggaggaaacagaagttgccagtcttcttaaaagctagtcatagaactgactttgcatcacttccaccatgttctgttggttaaagtcatagaccagcttggagttaatgcagaagaggactacacaagggcatgagtgccaaagtgtggtcctttggggttcatctttgacatttgccacctcaccatgtttttaaaaagaaaattagattacataaaacaaatagatgggctggatgtggtggctcacacctgtaatcccagcactttgggaggccgaggtgggcagatcacttgaggtcaggagttcaagaccagcctggccaacatggtgagacaccgtctctactaaaatacaaaaattagccagacatggtggcattcgtctgtaatcccagctacttgatgcgaaggctgaggcaaaagaattgcttgaacccaggagatagaggttgcaatgagccaagatcactccactgcactccagcctgggcgacagaatgagactctgtctcaaaattaaaaaacaaaaaaccaaaaacaaatagatgaaaaagtagactggagacaaataaaagtgagtttctaaaggaaattcacagtaatgctgcattaaacactaagctcacttaggtcactttctagtgagctaaccgtaacagagagcctacaggatacacgtgagataatgtcacgtgtagaagatcgttgtgaattaaagttcaaaattaagacttcttagattatgatgtagattttagagctccttaaaacataaagcgaatcttataaatgttcaattctaaagttattccacttggaaaaattagcttttgggacaatttttaagaacttttgtgtaaaatgcagctccatgtttagcataatctaaaaataatttcaagcaatccagaatcttccaagaatttattaaagctttaaaacaaagcaaaacaaaaagacccttttgtgccttatatgggaagactccaaaaacagaaaaaaatagaggaaaacaccacttcaatttgacattcaatgcattcacatcagaaactaagaagataacaagcctgagatgtcaggtgataaaaattcatgtttcttccaaggacagaaggctattagattgtcccaggccatatctattcccagttctttgtgagtagtcttcttactttttctgtggtaggtaagaagcatatttccaccaaaagaaagcatgcattgtttgactagccagctttctagaaaaaatgagatccttgagaggataaacaaatccaacctattcatggtgtcctcacttattgtggtcaatttggaaggcttaaaacacaaaaaatgggatggataactttgaacactaaaattagtggagccaaaggcacgtcttcaccattctgttatgtgacttaaaattcaatttcacgaaacccacttccacaagcttaatgaactgtgagctacatgagggcataaaccatgtcttctttgtatggtatttctgcttcctagcaggacagctggcaaagagtttatcattaaatgtttgctgaattaatga

SEQ ID NO: 118232 - DNA, 1153 bp, Homo sapiens
  Payload ID: 3142
  Gene Symbol: C14orf105
  Gene Name: chromosome 14 open reading frame 105
  ENST ID: ENST00000422976
  CDS Start-End: 43-1053
ccacttccctcgcagctttcctctgaatgtctttcacatgaaatgggcctgagtcactctaagactcaccttagggtgatcaaagtagcacctttgcaaaacaaagaggtagagactccctcggctggccgtgtggactttgcattcaatcagaatttggaagaaaagacttcatattcactggcaagactgcaggaccagaataaagccttggaagggcagctgccacctttacaagaaaactggtatggaagatattctacagcatccagagacatgtattttgacatcccactggaacacagagaaacaagtattattaaaaggcatccaccccaaagacttcaaaagcttgaacccattgacttgccacgagtaattacttcaggaagactcctgagccagcgagaagccaggacaatgcacaaagcaaaggtactagaaaagaaaatgcaaactccaatgtatacttctgagaacagacaatatttgcataagatgcaagtgctggaaatgatccgtaaaagacaagaggcccaaatggagttaaagaaaagtcttcatggagaggcaagaattaataagcaaagtccaagggaccataaagccaagaaaacccttcaaagcaccccaaggaatgatgaccatgaccttctaaccatgttgcctgatgaaatcttgaacagaggtcccgacagagtttcgctcctgttacccaggctggagtgcaatggcatgatctcggctcaccgcaaacttcgcctcccaagttcaaatgattctcctgcctcagcctcccgagtagctgggattacaggaaattcaaagaatacagaatttttgaaacatcaagcagtgaataactactgtccctggaaaattggcaaaatggaaacatggcttcatgaacaagaggcccagggacagcttctctgggacagttccagctctgactcagatgagcaggggaaagatgagaagaagccacgagcactggtgaggaccaggacagagagaatcccacttttcgatgagttttttgatcaagaataagaatactattcattaacctagaaactgagtgctttgaaagcttgttttactctcaaaatcttccaaactgatatatgaattactttgaggacagcaaatc

SEQ ID NO: 118233 - DNA, 1242 bp, Homo sapiens
  Payload ID: 3142
  Gene Symbol: C14orf105
  Gene Name: chromosome 14 open reading frame 105
  ENST ID: ENST00000526745
  CDS Start-End: 132-446
gatgccatgaaggaaatgactgctttgtaaagcgagggtaaacttctgaaatgctttgattaaaataagctatattaaagaccccaaaaccacttccctcgcagctttcctctgaatgtctttcacatgaaatgggcctgagtcactctaagactcaccttagggtgatcaaagtagcacctttgcaaaacaaagaggtagagactccctcggctggccgtgtggactttgcattcaatcagaatttggaagaaaagacttcatattcactggcaagactgcaggaccagaataaagccttggaagggcagctgccacctttacaagaaaactggtatggaagatattctacagcatccagagacatgtattttgacatcccactggaacacagagaaacaagtattattaaaaggcatccaccccaaagacttcaagtaagatgaatttaaaaggcttcataaggaatttcttggataaaatggaatgctgactgctctaaacgttgaacttctagaagcttgaacccattgacttgccacgagtaattacttcaggaagactcctgagccagcgagaagccaggacaatgcacaaagcaaaggtactagaaaagaaaatgcaaactccaatgtatacttctgagaacagacaatatttgcataagatgcaagtgctggaaatgatccgtaaaagacaagaggcccaaatggagttaaagaaaagtcttcatggagaggcaagaattaataagcaaagtccaagggaccataaagccaagaaaacccttcaaagcaccccaaggaatgatgaccatgaccttctaaccatgttgcctgatgaaatcttgaacagaggtcccgatcgctgtgccgtgggccaaatccccacatcagcaggactgacccaccgctgagagagctgcagaaaagctggctatgtctctggaggtcttgaacttctaagacgcaaaattgcctgctgaaagagacactgctcctacttggagaaacaagacgctcgatcaataagttaattaaataagaaaaggctgaataattgaaaatctacttggggcatctatttaacctatacttccaagtctcagaatgaaatatcctttgtagtcacataaacaatttttaccatttaaaccgtaccttaaaaaatatacacaaaacaaccaagaaaaaaacctcacctaaagttagacatttaagagtcatcacttgagagcacgcc

SEQ ID NO: 118234 - DNA, 1057 bp, Homo sapiens
  Payload ID: 3142
  Gene Symbol: C14orf105
  Gene Name: chromosome 14 open reading frame 105
  ENST ID: ENST00000534528
  CDS Start-End: 43-267
ccacttccctcgcagctttcctctgaatgtctttcacatgaaatgggcctgagtcactctaagactcaccttagggtgatcaaagtagcacctttgcaaaacaaagaggtagagactccctcggctggccgtgtggactttgcattcaatcagaatttggaagaaaagacttcatattcactggcaagactgcaggaccagaataaagccttggaagggcagctgccacctttacaagaaaactgcatccagagacatgtattttgacatcccactggaacacagagaaacaagtattattaaaaggcatccaccccaaagacttcaagtaagatgaatttaaaaggcttcataaggaatttcttggataaaatgaagcttgaacccattgacttgccacgagtaattacttcaggaagactcctgagccagcgagaagccaggacaatgcacaaagcaaaggtactagaaaagaaaatgcaaactccaatgtatacttctgagaacagacaatatttgcataagatgcaagtgctggaaatgatccgtaaaagacaagaggcccaaatggagttaaagaaaagtcttcatggagaggcaagaattaataagcaaagtccaagggaccataaagccaagaaaacccttcaaagcaccccaaggaatgatgaccatgaccttctaaccatgttgcctgatgaaatcttgaacagaggtcccggaaattcaaagaatacagaatttttgaaacatcaagcagtgaataactactgtccctggaaaattggcaaaatggaaacatggcttcatgaacaagaggcccagggacagcttctctgggacagttccagctctgactcagatgagcaggggaaagatgagaagaagccacgagcactggtgaggaccaggacagagagaatcccacttttcgatgagttttttgatcaagaataagaatactattcattaacctagaaactgagtgctttgaaagcttgttttactctcaaaatcttccaaactgatatatgaattactttgaggacagcaaatc

SEQ ID NO: 118235 - DNA, 1030 bp, Homo sapiens
  Payload ID: 3142
  Gene Symbol: C14orf105
  Gene Name: chromosome 14 open reading frame 105
  ENST ID: ENST00000534126
  CDS Start-End: 43-930
ccacttccctcgcagctttcctctgaatgtctttcacatgaaatgggcctgagtcactctaagactcaccttagggtgatcaaagtagcacctttgcaaaacaaagaggtagagactccctcggctggccgtgtggactttgcattcaatcagaatttggaagaaaagacttcatattcactggcaagactgcaggaccagaataaagccttggaagggcagctgccacctttacaagaaaactggtatggaagatattctacagcatccagagacatgtattttgacatcccactggaacacagagaaacaagtattattaaaaggcatccaccccaaagacttcaaaagcttgaacccattgacttgccacgagtaattacttcaggaagactcctgagccagcgagaagccaggacaatgcacaaagcaaaggtactagaaaagaaaatgcaaactccaatgtatacttctgagaacagacaatatttgcataagatgcaagtgctggaaatgatccgtaaaagacaagaggcccaaatggagttaaagaaaagtcttcatggagaggcaagaattaataagcaaagtccaagggaccataaagccaagaaaacccttcaaagcaccccaaggaatgatgaccatgaccttctaaccatgttgcctgatgaaatcttgaacagaggtcccggaaattcaaagaatacagaatttttgaaacatcaagcagtgaataactactgtccctggaaaattggcaaaatggaaacatggcttcatgaacaagaggcccagggacagcttctctgggacagttccagctctgactcagatgagcaggggaaagatgagaagaagccacgagcactggtgaggaccaggacagagagaatcccacttttcgatgagttttttgatcaagaataagaatactattcattaacctagaaactgagtgctttgaaagcttgttttactctcaaaatcttccaaactgatatatgaattactttgaggacagcaaatc

SEQ ID NO: 118236 - DNA, 583 bp, Homo sapiens
  Payload ID: 3142
  Gene Symbol: C14orf105
  Gene Name: chromosome 14 open reading frame 105
  ENST ID: ENST00000524996
  CDS Start-End: 1-410
aagtgctggaaatgatccgtaaaagacaagaggcccaaatggagttaaagaaaagtcttcatggagaggcaagaattaataagcaaagtccaagggaccataaagccaagaaaacccttcaaagcaccccaaggaatgatgaccatgaccttctaaccatgttgcctgatgaaatcttgaacagaggtcccgacagagtttcgctcctgttacccaggctggagtgcaatggcatgatctcggctcaccgcaaacttcgcctcccaagttcaaatgattctcctgcctcagcctcccgagtagctgggattacaggtgcctgccaccacgcccagctaacttttgtatttgtagtagagacgaggtttcaccatgttggccaagctggtctcgaactcctgacctcatgatccgattacaggcatgagccaccgcgcctggccacaattgatgtcttatagtgaaaacagtcatatgcttcagggatgtgtcactttgaatccattattttaatgtcagcttcaaaattctggtcttatctggccacctgcactctttctataaagaatcttgttttatttta

SEQ ID NO: 118237 - DNA, 598 bp, Homo sapiens
  Payload ID: 3142
  Gene Symbol: C14orf105
  Gene Name: chromosome 14 open reading frame 105
  ENST ID: ENST00000526336
  CDS Start-End: 132-446
gatgccatgaaggaaatgactgctttgtaaagcgagggtaaacttctgaaatgctttgattaaaataagctatattaaagaccccaaaaccacttccctcgcagctttcctctgaatgtctttcacatgaaatgggcctgagtcactctaagactcaccttagggtgatcaaagtagcacctttgcaaaacaaagaggtagagactccctcggctggccgtgtggactttgcattcaatcagaatttggaagaaaagacttcatattcactggcaagactgcaggaccagaataaagccttggaagggcagctgccacctttacaagaaaactggtatggaagatattctacagcatccagagacatgtattttgacatcccactggaacacagagaaacaagtattattaaaaggcatccaccccaaagacttcaagtaagatgaatttaaaaggcttcataaggaatttcttggataaaatggaatgctgactgctctaaacgttgaacttctagaagcttgaacccattgacttgccacgagtaattacttcaggaagactcctgagccagcgagaagccaggacaatgcacaaa

SEQ ID NO: 118238 - DNA, 1022 bp, Homo sapiens
  Payload ID: 3142
  Gene Symbol: C14orf105
  Gene Name: chromosome 14 open reading frame 105
  ENST ID: ENST00000529860
  CDS Start-End: 144-368
cagagctagaaggatgccatgaaggaaatgactgctttgtaaagcgagggtaaacttctgaaatgctttgattaaaataagctatattaaagaccccaaaaccacttccctcgcagctttcctctgaatgtctttcacatgaaatgggcctgagtcactctaagactcaccttagggtgatcaaagtagcacctttgcaaaacaaagaggtagagactccctcggctggccgtgtggactttgcattcaatcagaatttggaagaaaagacttcatattcactggcaagactgcaggaccagaataaagccttggaagggcagctgccacctttacaagaaaactgcatccagagacatgtattttgacatcccactggaacacagagaaacaagtattattaaaaggcatccaccccaaagacttcaaaagcttgaacccattgacttgccacgagtaattacttcaggaagactcctgagccagcgagaagccaggacaatgcacaaagcaaaggtactagaaaagaaaatgcaaactccaatgtatacttctgagaacagacaatatttgcataagatgcaagtgctggaaatgatccgtaaaagacaagaggcccaaatggagttaaagaaaagtcttcatggagaggcaagaattaataagcaaagtccaagggaccataaagccaagaaaacccttcaaagcaccccaaggaatgatgaccatgaccttctaaccatgttgcctgatgaaatcttgaacagaggtcccgggcaaacccacagttgaaatttccaatattgttcacacacacagatcgctgtgccgtgggccaaatccccacatcagcaggactgacccaccgctgagagagctgcagaaaagctggctatgtctctggaggtcttgaacttctaagacgcaaaattgcctgctgaaagagacactgctcctacttggagaaacaagacgctcgatcaataagttaattaaataagaaaaggctgaataattgaaaa

SEQ ID NO: 118239 - DNA, 1187 bp, Homo sapiens
  Payload ID: 3142
  Gene Symbol: C14orf105
  Gene Name: chromosome 14 open reading frame 105
  ENST ID: ENST00000530417
  CDS Start-End: 153-467
gcagtgaaacagagctagaaggatgccatgaaggaaatgactgctttgtaaagcgagggtaaacttctgaaatgctttgattaaaataagctatattaaagaccccaaaaccacttccctcgcagctttcctctgaatgtctttcacatgaaatgggcctgagtcactctaagactcaccttagggtgatcaaagtagcacctttgcaaaacaaagaggtagagactccctcggctggccgtgtggactttgcattcaatcagaatttggaagaaaagacttcatattcactggcaagactgcaggaccagaataaagccttggaagggcagctgccacctttacaagaaaactggtatggaagatattctacagcatccagagacatgtattttgacatcccactggaacacagagaaacaagtattattaaaaggcatccaccccaaagacttcaagtaagatgaatttaaaaggcttcataaggaatttcttggataaaatgaagcttgaacccattgacttgccacgagtaattacttcaggaagactcctgagccagcgagaagccaggacaatgcacaaagcaaaggtactagaaaagaaaatgcaaactccaatgtatacttctgagaacagacaatatttgcataagatgcaagtgctggaaatgatccgtaaaagacaagaggcccaaatggagttaaagaaaagtcttcatggagaggcaagaattaataagcaaagtccaagggaccataaagccaagaaaacccttcaaagcaccccaaggaatgatgaccatgaccttctaaccatgttgcctgatgaaatcttgaacagaggtcccggaaattcaaagaatacagaatttttgaaacatcaagcagtgaataactactgtccctggaaaattggcaaaatggaaacatggcttcatgaacaagaggcccagggacagcttctctgggacagttccagctctgactcagatgagcaggggaaagatgagaagaagccacgagcactggtgaggaccaggacagagagaatcccacttttcgatgagttttttgatcaagaataagaatactattcattaacctagaaactgagtgctttgaaagcttgttttactctcaaaatcttccaaactgatatatgaattactttgaggacagcaaatc

SEQ ID NO: 118240 - DNA, 3660 bp, Homo sapiens
  Payload ID: 3143
  Gene Symbol: C14orf119
  Gene Name: chromosome 14 open reading frame 119
  Uniprot ID: Q9NWQ9
  ENST ID: ENST00000319074
  CDS Start-End: 857-1279
gggctcgcgctgctgccgttaaggcgggaaccggcgcgatctccattccagcgcgaacctcatcaaccaccgtgcgcgcggatccagaggctcgcgctggcggcctgagcgagctcgcgccgagcccggatactgcgcctgcgccgcggcagaggctcgtctctaccgggtccgctctcctccgacaccccagcaacgccgactcctcacccctttgagccgcttgaccagggcactcttctgcccgctcttggctaggcctcgctgctccagtgcggccttcaggtcggtcacccgcagcgcctgaagaggcttcccgtccagagtcacctcctccagctccgccatcttgcgtgaggtactcgggtccgtcccgacggcttcgggcatcttcggtaatttccgccaacgcccttcgaacgtaccgagatgaccccgcccactgccatactctacccctcgattaccactcagaactccccgggttcctccggatgtcctcggatgtttccgtctccacatcgttaccaatcaattctttccatccgccctgcagcgccccttttctcgccctgctttcaggctcggttttcttcgtcttgccgaagctttgaatcgaatatattcggaaaccctcgaccctggtataaccataatcggagatgttcgtttatttccggacctagagatgaggcgctggggcgcttgggtgtttggggcgggtccgaggccggaagtgcgtgggctgccgggctggcccagcttagggttttcaggaaatttggaagctgccgcagtagttggagtctaaggactcgtgacaatcttcgggtgcccttcgagagaaaaggggaggatgccactggagtcatcctcttcaatgccactatccttcccatctctcttaccctcagtaccacacaatactaacccttcccctcctctgatgtcttacatcacctcccaggagatgaagtgtattcttcactggtttgccaattggtcaggtccccagcgtgaacgtttcctagaggacctggtagctaaggcagtgccagaaaaattacaaccactgctggatagtctggagcagcttagtgtgtctggggcagaccgaccaccttctatctttgagtgccagctacatctttgggatcagtggtttcgaggctgggctgagcaggagcgcaatgaatttgtcagacagctggagttcagtgagccagacttcgtggcaaagttttaccaagcagtggctgctacagctggtaaggactgataggcattcagaccaaagaagataaccatagctgatggagccatgactctctacaatgataactcaattcaaatgtgtcgcctaaagctctggaactggtattccaaccagctgaccgaactcactgaccagtacaggcatggttatttcaacattaatagcatgtcaactggactcctatttgtaaatgttatcaatctaagcaatccagctcatcagtctactagtttgcttctttccgagagatgtcaagtcctcaagaatttgatggcttcttctgcagctataaccacaaggaacctacacattgtaactcaagtccactgctggctcatgaaatgtgtaaagtagaaccctccttcccgagaaataagacaggacaataaaaggtggcgtttttgtactttacctggattccattggctggttttaccactcctatcagattgtagtgtaattgtgtgatacgcaaaccattagttttcccagtgatgatttaataaaattatgaaaaatcaggagagggagataattagttgcttcctccttcacactgtttgaatcgaactcgcggtgacttttttttttttttaaaaacatgggttgtcacttaagtttggagtgcagtggcatgatcatcagtgagcgtgagatcactgtaacctcaaattctaggctgaagtaatctttctgcctcagtctcctgagtatctaggactacaggcccgcacaacaatatctggctaatttttaaattattctgtagatacaggggtcatgctacgttttctagtctggtcttgaactgctggcctcaagcgatccattctcaccttggcctcccaaagtgctgggattacaggcatgaaccatcatacctggcctttttctaaggcatatgtatgtgatattcttggaactggtagcaggtgttcctattctgtaagtttgctttacaacaatacgaaaataagtgacaatttacaggttgaacaatttatttttgtaccaaaataaagaatggatctttagaactgtaaaacttcacccttttttcattgccaggctatataatattgacaaccggggaaagaggcattccaaagaaagtagaaattaagtatacacaatagattttccatccagttgtctcacaagaaattattctcttccttaccccctgtcatgttctgggcaacatcacacctcccttattcctctaactgggacccttgtgctgtggagctctggtgaatggtaagaggcagatggtctcacaggaagagtggctcttttctggtaggctgtggttcccattacacccaccaggattagcagcattaggcagagtcccatggacagccttaggtgggtcatggagggattatggtctgaagtaaccagcaacctaggaacatagaaggtaatatttggcatggaataatgcctagccttagtagataaagcggcattacctttttttttttttttttttggagacaaggtcttggtctgttgcccaggctggagtgcagtggtgtgatcttggctcaccgtaatctccgcctcccaggctcaagcaattctcctgcctcaaccttccgaatagctgggactacaggcgcacgccgcaccaccacgtctggctaaggggctttacccttaaagatagagctcatgaagccccgcctcatccaagcattaagctaaacaggaaatcattaagagggactatcgaaccttaaagtagaaataagatcaagatctaagtcttctagcatcttatattattggaagaagacctaacttggcagcaagggaagtggcttaagggaagagtcagtctatgttctttaggtagctagacacaatccctaacagtgcttaagaaaggaagggggctgggagtggtggcagtggctcccagcactttgggaggcagaggccggtgggttgctttagctcaggagttggagacaagcctgggcaacatggtgaaactgtctctatcaaaaatacaaaaattagctggcatggtggtgtgcacctgtagtcccagctacttgggaagctgaggtgggggaatcacttgagcctagggaggtcgaggccacagtgagctgagatcaccccactgcattccagcctgggtgacagagcgagaccctgtctcaaaaaagaagaagaaaaaggtggggggaggggactaagatccctatgtcctagagatgggggaatgtgttattgtatgggaggagggagtcaggtagtgacgggactggatgatcgtgttagggatctttgttctctgaaacgcaaccctgtctaggacaatatacacgtgagtgagtgcttaataaatttaatttcaaacatccgga

SEQ ID NO: 118241 - DNA, 725 bp, Homo sapiens
  Payload ID: 3143
  Gene Symbol: C14orf119
  Gene Name: chromosome 14 open reading frame 119
  Uniprot ID: Q9NWQ9
  ENST ID: ENST00000554203
  CDS Start-End: 113-535
agcttagggttttcaggaaatttggaagctgccgcagtagttggagtctaaggactcgtgacaatcttcgggtgcccttcgagagaaaaggggagtgcttttatgtttcaggatgccactggagtcatcctcttcaatgccactatccttcccatctctcttaccctcagtaccacacaatactaacccttcccctcctctgatgtcttacatcacctcccaggagatgaagtgtattcttcactggtttgccaattggtcaggtccccagcgtgaacgtttcctagaggacctggtagctaaggcagtgccagaaaaattacaaccactgctggatagtctggagcagcttagtgtgtctggggcagaccgaccaccttctatctttgagtgccagctacatctttgggatcagtggtttcgaggctgggctgagcaggagcgcaatgaatttgtcagacagctggagttcagtgagccagacttcgtggcaaagttttaccaagcagtggctgctacagctggtaaggactgataggcattcagaccaaagaagataaccatagctgatggagccatgactctctacaatgataactcaattcaaatgtgtcgcctaaagctctggaactggtattccaaccagctgaccgaactcactgaccagtacaggcatggttatttcaacattaatagcatgtcaactggactcctatttgtaaatg

SEQ ID NO: 118242 - DNA, 1154 bp, Homo sapiens
  Payload ID: 3144
  Gene Symbol: C14orf142
  Gene Name: chromosome 14 open reading frame 142
  Uniprot ID: Q9BXV9
  ENST ID: ENST00000306954
  CDS Start-End: 58-360
atttccgcctccgggtggcgcttcccggtgtcgtgttctggaagcttagcggtcaccatggagctgctgggagagtacgtcgggcaggaagggaagccgcagaagctgcgggtgtcctgtgaggcgccgggtgacggcgaccctttccagggcctgttgtctggcgtggcccagatgaaggacatggtaacggaattattcgaccctctggtacagggggaagtgcagcaccgggtggcggcggctccagacgaggacttggacggtgatgatgaagatgatgcagaagatgaaaataacattgataacagaactaacttcgatggaccatctgcaaaacggccaaaaacaccgtcttaacaatagccttcatgacatttaaaagatggctgttgtatccttattgtcacactaggacatttaaggaagacttatgctctaatttggaaaaagcatttgtgttgttctcctgggacaattttgtcaaagagaaaactggtttttctgtttctagcaaagatagtaaaggcttagaaataaaatctgttttcttgagaaataaatttcagaccctggaaggaaaatagaacacttcataatgtataaaatcctctaagttggcaactgaatttttatcattgttttctatttttaaaataatcattgatttgtgtgatgtctacatcttttaacttctggttctgttataaagagtacatgtcacggttcataggcagtaacatttcagagaactgacatgaacaagtagtgaaaattgggcattaaatataaaaataacagttcttcataaacagaaggaaaataaggaaatagaaataccgacgagaaaggagagtccttgaaagagacccaaggaaaccctgaattcatacccacgtcaaatatgcacatatcctgagatgatgccactttgatgaatgtgcattagtctgatttatcatgtaccttaagagagccagatggggtatgtttttgtgctgtgatatggtatttatacaggtacaaatataaggccttaagtaaacaatctgcattgattacaatttggatatttcctctcctcctgtagccatactttgattttgctttaaaaagattattgaatccttttaaaaatatatattcctaaaata

SEQ ID NO: 118243 - DNA, 398 bp, Homo sapiens
  Payload ID: 3144
  Gene Symbol: C14orf142
  Gene Name: chromosome 14 open reading frame 142
  ENST ID: ENST00000556566
  CDS Start-End: 1-238
gctgggagagtacgtcgggcaggaagggaagccgcagaagctgcgggtgtcctgtgaggcgccgggtgacggcgaccctttccagggcctgttgtctggcgtggcccagatgaaggacatggtgatgatgaagatgatgcagaagatgaaaataacattgataacagaactaacttcgatggaccatctgcaaaacggccaaaaacaccgtcttaacaatagccttcatgacatttaaaagatggctgttgtatccttattgtcacactaggacatttaaggaagacttatgctctaatttggaaaaagcatttgtgttgttctcctgggacaattttgtcaaagagaaaactggtttttctgtttctagcaaagatagtaaaggcttagaaataaaa

SEQ ID NO: 118244 - DNA, 1154 bp, Homo sapiens; identical to SEQ ID NO: 118242
  Payload ID: 3144
  Gene Symbol: C14orf142
  Gene Name: chromosome 14 open reading frame 142
  Uniprot ID: Q9BXV9
  ENST ID: ENST00000621279
  CDS Start-End: 58-360

SEQ ID NO: 118245 - DNA, 398 bp, Homo sapiens; identical to SEQ ID NO: 118243
  Payload ID: 3144
  Gene Symbol: C14orf142
  Gene Name: chromosome 14 open reading frame 142
  ENST ID: ENST00000629526
  CDS Start-End: 1-238

SEQ ID NO: 118246 - DNA, 2967 bp, Homo sapiens
  Payload ID: 3145
  Gene Symbol: C14orf159
  Gene Name: chromosome 14 open reading frame 159
  Uniprot ID: Q7Z3D6
  ENST ID: ENST00000256324
  CDS Start-End: 303-2168
acgtgagctcaggctgtgggagcggatggagctgctacagtcagcgcttggggctggcctcagcttgtagacccgagccctgcagaacaaccccccgtggcgcaggagagcagaagaaagggggcctttatgcccttttgagggaagcacacattctgcaaggccgtggaaacaaagggaggaactgtttgtagccctcgtccagacgccccaaacaaacagagccaagttacaccctgtttaaccctgccttcaaagggacgactctgtaagattctctgctacttattcaagttgacacgatgcccttcacactccacctgaggtcccgccttccctctgccataaggagtttgattctacaaaagaaaccaaacatcagaaatacatccagcatggctggagagctccgaccagccagcctggtggtcctgcccaggtcccttgctccagcttttgaaagattctgccaggtcaacactggtcctctacccctgctgggccagagtgagccagaaaagtggatgctgccccctcaaggtgctatctcagagaccaggatgggccatccccagttctggaaatacgagttcggtgcctgcaccggcagcctggcttcgctggagcagtactcggagcagctgaaggacatggtggccttcttcctgggctgcagcttctccctggaggaggccttggagaaagcggggctccccagaagagacccagcaggtcacagccaggcgggtgcatacaagacaacagtgccttgtgttacccatgctggcttctgctgccctctggtggtcacgatgaggcccattcccaaggacaagctggaagggctggtgcgggcctgctgctccctcggaggtgagcaggggcaacctgttcacatgggcgacccagaactgttgggaatcaaagagctttccaaacctgcctacggggatgccatggtgtgtcccccaggggaggttccagtgttctggccttctccgctgaccagtctcggagctgtcagcagctgtgagaccccactggcttttgccagcatcccaggctgcacagttatgactgacctgaaggatgcaaaggctccacctggttgtctcaccccagagagaattccagaggtccatcacatttcccaagatcctctgcactacagcatcgcgtcagtctctgcttctcagaagatcagagaactagagtctatgatcggcatagacccagggaaccgggggattgggcacctgctctgtaaagatgagctgctgaaggcctctctctcgctgtcccatgcccgctcagtgctcatcaccactgggttccccacacatttcaatcatgagcctccagaagagacagatggcccaccaggagctgttgctctggttgccttcctgcaggccttggagaaggaggtcgccataatcgttgaccagagagcctggaacttgcaccagaagattgttgaagatgctgttgagcaaggtgttctgaagacgcagatcccgatattaacttaccaaggtggatcagtggaagctgctcaggcattcctgtgcaaaaatggggacccgcagacacctagatttgaccacctggtggccatagagcgtgccggaagagctgctgatggcaattactacaatgcaaggaagatgaacatcaagcacttggttgaccccattgacgatctttttcttgctgcgaagaagattcctggaatctcatcaactggagtcggtgatggaggcaacgagcttgggatgggtaaagtcaaggaggctgtgaggaggcacatacggcacggggatgtcatcgcctgcgacgtggaggctgactttgccgtcattgctggtgtttctaactggggaggctatgccctggcctgcgcactctacatcctgtactcatgtgctgtccacagtcagtacctgaggaaagcagtcggaccctccagggcacctggagatcaggcctggactcaggccctcccgtcggtcattaaggaagaaaaaatgctgggcatcttggtgcagcacaaagtccggagtggcgtctcgggcatcgtgggcatggaggtggatgggctgcccttccacaacacccacgccgagatgatccagaagctggtggacgtcaccacggcacaggtgtaaccgtccatgttccgtgtgagcagagtccctaccaacgggcaggtctgcatccggggagaatgcagctgcttctggcgacaatcctgctagtaaacactggtcttcggtgagcaacgaacactcgcctggcctgggaaactgcatgcccactttctgggaggggttagtgcaggtgctgtggacaaaggacaacatttctctggggctttttaacttttattcctaagactctaaaggcgttgatttcaaccctccttcactctggcttcttcaggcaacccacgtggtctcctgtgagaatcttctcgacagttacttatggggacacttgtgaacaattaactgccaggcagagcatgagaacaaacattcccaggccatgtaggataggatactccagactccagtcatcctcccccatccatggtttctgttactcatggtttcagttactcatagccaactgcagaccgaaaatactaaatgaaaaatttcagaaataaacaactcttaagttttaaattgtgtactcttcggaatatcgtgatgaaatctcacaccatcctgctccatcctacctaggacgtgaatcctccctttgtccagggtacccgtgctgtctacaccacccgcctgccagtcacccagcaggtgatcagatcgactgtcatggtattgcagtgcttatattcaagaacctcttatgtgactcagtaatgtcctcaaagtgcaagagcagagatgctggcaatttggatatgccaaaaagaggccataaagggcttcctttaagtgaaaa

SEQ ID NO: 118247 - DNA, 642 bp, Homo sapiens
  Payload ID: 3145
  Gene Symbol: C14orf159
  Gene Name: chromosome 14 open reading frame 159
  Uniprot ID: Q7Z3D6
  ENST ID: ENST00000298858
  CDS Start-End: 163-642
caggtggcattcttcttcagagcagggcaagtgtaattctggaccaatgtgtgattctgagaccagaccaaccaactgaaggagccaagttacaccctgtttaaccctgccttcaaagggacgactctgtaagattctctgctacttattcaagttgacacgatgcccttcacactccacctgaggtcccgccttccctctgccataaggagtttgattctacaaaagaaaccaaacatcagaaatacatccagcatggctggagagctccgaccagccagcctggtggtcctgcccaggtcccttgctccagcttttgaaagattctgccaggtcaacactggtcctctacccctgctgggccagagtgagccagaaaagtggatgctgccccctcaaggtgctatctcagagaccagcctcagggaccttcacagtgcctggcacagaacctcactcatgactgttgctcaggaacgagctgccctccccactgttctgactccttcccctatcacctggcgcctgtcctggctgagatctttgagatcatggagaaagtccagccctggagaaatcccactggctctgccatctgtccactccatcgcccaagccagaaacccgcctgtacaggattaa

SEQ ID NO: 118248 - DNA, 2591 bp, Homo sapiens
  Payload ID: 3145
  Gene Symbol: C14orf159
  Gene Name: chromosome 14 open reading frame 159
  Uniprot ID: Q7Z3D6
  ENST ID: ENST00000412671
  CDS Start-End: 163-2028
caggtggcattcttcttcagagcagggcaagtgtaattctggaccaatgtgtgattctgagaccagaccaaccaactgaaggagccaagttacaccctgtttaaccctgccttcaaagggacgactctgtaagattctctgctacttattcaagttgacacgatgcccttcacactccacctgaggtcccgccttccctctgccataaggagtttgattctacaaaagaaaccaaacatcagaaatacatccagcatggctggagagctccgaccagccagcctggtggtcctgcccaggtcccttgctccagcttttgaaagattctgccaggtcaacactggtcctctacccctgctgggccagagtgagccagaaaagtggatgctgccccctcaaggtgctatctcagagaccaggatgggccatccccagttctggaaatacgagttcggtgcctgcaccggcagcctggcttcgctggagcagtactcggagcagctgaaggacatggtggccttcttcctgggctgcagcttctccctggaggaggccttggagaaagcggggctccccagaagagacccagcaggtcacagccaggcgggtgcatacaagacaacagtgccttgtgttacccatgctggcttctgctgccctctggtggtcacgatgaggcccattcccaaggacaagctggaagggctggtgcgggcctgctgctccctcggaggtgagcaggggcaacctgttcacatgggcgacccagaactgttgggaatcaaagagctttccaaacctgcctacggggatgccatggtgtgtcccccaggggaggttccagtgttctggccttctccgctgaccagtctcggagctgtcagcagctgtgagaccccactggcttttgccagcatcccaggctgcacagttatgactgacctgaaggatgcaaaggctccacctggttgtctcaccccagagagaattccagaggtccatcacatttcccaagatcctctgcactacagcatcgcgtcagtctctgcttctcagaagatcagagaactagagtctatgatcggcatagacccagggaaccgggggattgggcacctgctctgtaaagatgagctgctgaaggcctctctctcgctgtcccatgcccgctcagtgctcatcaccactgggttccccacacatttcaatcatgagcctccagaagagacagatggcccaccaggagctgttgctctggttgccttcctgcaggccttggagaaggaggtcgccataatcgttgaccagagagcctggaacttgcaccagaagattgttgaagatgctgttgagcaaggtgttctgaagacgcagatcccgatattaacttaccaaggtggatcagtggaagctgctcaggcattcctgtgcaaaaatggggacccgcagacacctagatttgaccacctggtggccatagagcgtgccggaagagctgctgatggcaattactacaatgcaaggaagatgaacatcaagcacttggttgaccccattgacgatctttttcttgctgcgaagaagattcctggaatctcatcaactggagtcggtgatggaggcaacgagcttgggatgggtaaagtcaaggaggctgtgaggaggcacatacggcacggggatgtcatcgcctgcgacgtggaggctgactttgccgtcattgctggtgtttctaactggggaggctatgccctggcctgcgcactctacatcctgtactcatgtgctgtccacagtcagtacctgaggaaagcagtcggaccctccagggcacctggagatcaggcctggactcaggccctcccgtcggtcattaaggaagaaaaaatgctgggcatcttggtgcagcacaaagtccggagtggcgtctcgggcatcgtgggcatggaggtggatgggctgcccttccacaacacccacgccgagatgatccagaagctggtggacgtcaccacggcacaggtgtaaccgtccatgttccgtgtgagcagagtccctaccaacgggcaggtctgcatccggggagaatgcagctgcttctggcgacaatcctgctagtaaacactggtcttcggtgagcaacgaacactcgcctggcctgggaaactgcatgcccactttctgggaggggttagtgcaggtgctgtggacaaaggacaacatttctctggggctttttaacttttattcctaagactctaaaggcgttgatttcaaccctccttcactctggcttcttcaggcaacccacgtggtctcctgtgagaatcttctcgacagttacttatggggacacttgtgaacaattaactgccaggcagagcatgagaacaaacattcccaggccatgtaggataggatactccagactccagtcatcctcccccatccatggtttctgttactcatggtttcagttactcatagccaactgcagaccgaaaatactaaatgaaaaatttcagaaataaacaactcttaagttttaaattgtgtactcttcggaatatcgtgatgaaatctcacaccat

SEQ ID NO: 118249 - DNA, 2538 bp, Homo sapiens
  Payload ID: 3145
  Gene Symbol: C14orf159
  Gene Name: chromosome 14 open reading frame 159
  Uniprot ID: Q7Z3D6
  ENST ID: ENST00000428926
  CDS Start-End: 169-2019
attctccactgaggcccagctgttcctctccttgaaaagtcaaggcttggttcaagccagatagcacctgaggacagaacatatcaggagccaagttacaccctgtttaaccctgccttcaaagggacgactctgtaagattctctgctacttattcaagttgacacgatgcccttcacactccacctgaggtcccgccttccctctgccataaggagtttgattctacaaaagaaaccaaacatcagaaatacatccagcatggctggagagctccgaccagccagcctggtggtcctgcccaggtcccttgctccagcttttgaaagattctgccaggtcaacactggtcctctacccctgctgggccagagtgagccagaaaagtggatgctgccccctcaaggtgctatctcagagaccaggatgggccatccccagttctggaaatacgagttcggtgcctgcaccggcagcctggcttcgctggagcagtactcggagcagctgaaggacatggtggccttcttcctgggctgcagcttctccctggaggaggccttggagaaagcggggctccccagaagagacccagcaggtcacagccagacaacagtgccttgtgttacccatgctggcttctgctgccctctggtggtcacgatgaggcccattcccaaggacaagctggaagggctggtgcgggcctgctgctccctcggaggtgagcaggggcaacctgttcacatgggcgacccagaactgttgggaatcaaagagctttccaaacctgcctacggggatgccatggtgtgtcccccaggggaggttccagtgttctggccttctccgctgaccagtctcggagctgtcagcagctgtgagaccccactggcttttgccagcatcccaggctgcacagttatgactgacctgaaggatgcaaaggctccacctggttgtctcaccccagagagaattccagaggtccatcacatttcccaagatcctctgcactacagcatcgcgtcagtctctgcttctcagaagatcagagaactagagtctatgatcggcatagacccagggaaccgggggattgggcacctgctctgtaaagatgagctgctgaaggcctctctctcgctgtcccatgcccgctcagtgctcatcaccactgggttccccacacatttcaatcatgagcctccagaagagacagatggcccaccaggagctgttgctctggttgccttcctgcaggccttggagaaggaggtcgccataatcgttgaccagagagcctggaacttgcaccagaagattgttgaagatgctgttgagcaaggtgttctgaagacgcagatcccgatattaacttaccaaggtggatcagtggaagctgctcaggcattcctgtgcaaaaatggggacccgcagacacctagatttgaccacctggtggccatagagcgtgccggaagagctgctgatggcaattactacaatgcaaggaagatgaacatcaagcacttggttgaccccattgacgatctttttcttgctgcgaagaagattcctggaatctcatcaactggagtcggtgatggaggcaacgagcttgggatgggtaaagtcaaggaggctgtgaggaggcacatacggcacggggatgtcatcgcctgcgacgtggaggctgactttgccgtcattgctggtgtttctaactggggaggctatgccctggcctgcgcactctacatcctgtactcatgtgctgtccacagtcagtacctgaggaaagcagtcggaccctccagggcacctggagatcaggcctggactcaggccctcccgtcggtcattaaggaagaaaaaatgctgggcatcttggtgcagcacaaagtccggagtggcgtctcgggcatcgtgggcatggaggtggatgggctgcccttccacaacacccacgccgagatgatccagaagctggtggacgtcaccacggcacaggtgtaaccgtccatgttccgtgtgagcagagtccctaccaacgggcaggtctgcatccggggagaatgcagctgcttctggcgacaatcctgctagtaaacactggtcttcggtgagcaacgaacactcgcctggcctgggaaactgcatgcccactttctgggaggggttagtgcaggtgctgtggacaaaggacaacatttctctggggctttttaacttttattcctaagactctaaaggcgttgatttcaaccctccttcactctggcttcttcaggcaacccacgtggtctcctgtgagaatcttctcgacagttacttatggggacacttgtgaacaattaactgccaggcagagcatgagaacaaacattcccaggccatgtaggataggatactccagactccagtcatcctcccccatccatggtttctgttactcatggtttcagttactcatagccaactgcagaccgaaaatactaaatgaaaaatttcagaaataaacaactcttaagtttt

SEQ ID NO: 118250 - DNA, 2856 bp, Homo sapiens
  Payload ID: 3145
  Gene Symbol: C14orf159
  Gene Name: chromosome 14 open reading frame 159
  Uniprot ID: Q7Z3D6
  ENST ID: ENST00000522322
  CDS Start-End: 484-2334
cgaggtggcaattggggaaggggttctgggctgccgcaggcacacaggccagagcttcgtggatacctgcagggcccaaaggtccctccctgttttgaagagtgagtgatggctatgaggtagcggccaggctgatcacccctgcgttggctggaggcagaattctgtaaatcctcgccaagtctttctccaggccactggttagctcatctcagcctcctctgggagcatcaacaccaacatggcacaggggactgcagtggtgtgctttggacctgtgtacccacccaaggctaaaggcagagccagatggagaaggaaaggcaagtgacttgtccagagccactctgtcaaaaggggacttgagtcctcagggctgttgactccaaagctgacaagcaggagccaagttacaccctgtttaaccctgccttcaaagggacgactctgtaagattctctgctacttattcaagttgacacgatgcccttcacactccacctgaggtcccgccttccctctgccataaggagtttgattctacaaaagaaaccaaacatcagaaatacatccagcatggctggagagctccgaccagccagcctggtggtcctgcccaggtcccttgctccagcttttgaaagattctgccaggtcaacactggtcctctacccctgctgggccagagtgagccagaaaagtggatgctgccccctcaaggtgctatctcagagaccaggatgggccatccccagttctggaaatacgagttcggtgcctgcaccggcagcctggcttcgctggagcagtactcggagcagctgaaggacatggtggccttcttcctgggctgcagcttctccctggaggaggccttggagaaagcggggctccccagaagagacccagcaggtcacagccagacaacagtgccttgtgttacccatgctggcttctgctgccctctggtggtcacgatgaggcccattcccaaggacaagctggaagggctggtgcgggcctgctgctccctcggaggtgagcaggggcaacctgttcacatgggcgacccagaactgttgggaatcaaagagctttccaaacctgcctacggggatgccatggtgtgtcccccaggggaggttccagtgttctggccttctccgctgaccagtctcggagctgtcagcagctgtgagaccccactggcttttgccagcatcccaggctgcacagttatgactgacctgaaggatgcaaaggctccacctggttgtctcaccccagagagaattccagaggtccatcacatttcccaagatcctctgcactacagcatcgcgtcagtctctgcttctcagaagatcagagaactagagtctatgatcggcatagacccagggaaccgggggattgggcacctgctctgtaaagatgagctgctgaaggcctctctctcgctgtcccatgcccgctcagtgctcatcaccactgggttccccacacatttcaatcatgagcctccagaagagacagatggcccaccaggagctgttgctctggttgccttcctgcaggccttggagaaggaggtcgccataatcgttgaccagagagcctggaacttgcaccagaagattgttgaagatgctgttgagcaaggtgttctgaagacgcagatcccgatattaacttaccaaggtggatcagtggaagctgctcaggcattcctgtgcaaaaatggggacccgcagacacctagatttgaccacctggtggccatagagcgtgccggaagagctgctgatggcaattactacaatgcaaggaagatgaacatcaagcacttggttgaccccattgacgatctttttcttgctgcgaagaagattcctggaatctcatcaactggagtcggtgatggaggcaacgagcttgggatgggtaaagtcaaggaggctgtgaggaggcacatacggcacggggatgtcatcgcctgcgacgtggaggctgactttgccgtcattgctggtgtttctaactggggaggctatgccctggcctgcgcactctacatcctgtactcatgtgctgtccacagtcagtacctgaggaaagcagtcggaccctccagggcacctggagatcaggcctggactcaggccctcccgtcggtcattaaggaagaaaaaatgctgggcatcttggtgcagcacaaagtccggagtggcgtctcgggcatcgtgggcatggaggtggatgggctgcccttccacaacacccacgccgagatgatccagaagctggtggacgtcaccacggcacaggtgtaaccgtccatgttccgtgtgagcagagtccctaccaacgggcaggtctgcatccggggagaatgcagctgcttctggcgacaatcctgctagtaaacactggtcttcggtgagcaacgaacactcgcctggcctgggaaactgcatgcccactttctgggaggggttagtgcaggtgctgtggacaaaggacaacatttctctggggctttttaacttttattcctaagactctaaaggcgttgatttcaaccctccttcactctggcttcttcaggcaacccacgtggtctcctgtgagaatcttctcgacagttacttatggggacacttgtgaacaattaactgccaggcagagcatgagaacaaacattcccaggccatgtaggataggatactccagactccagtcatcctcccccatccatggtttctgttactcatggtttcagttactcatagccaactgcagaccgaaaatactaaatgaaaaatttcagaaataaacaactcttaagttttaaa

SEQ ID NO: 118251 - DNA, 558 bp, Homo sapiens
  Payload ID: 3145
  Gene Symbol: C14orf159
  Gene Name: chromosome 14 open reading frame 159
  ENST ID: ENST00000522837
  CDS Start-End: 302-558
gttgcttggcggggaggcaggagagggaggagcgccgccactccgattgatggagaaggaaaggcaagtgacttgtccagagccactctgtcaaaaggggacttgagtcctcagggctgttgactccaaagctgacaagcaggtggcattcttcttcagagcagggcaagtgtaattctggaccaatgtgtgattctgagaccagaccaaccaactgaaggagccaagttacaccctgtttaaccctgccttcaaagggacgactctgtaagattctctgctacttattcaagttgacacgatgcccttcacactccacctgaggtcccgccttccctctgccataaggagtttgattctacaaaagaaaccaaacatcagaaatacatccagcatggctggagagctccgaccagccagcctggtggtcctgcccaggtcccttgctccagcttttgaaagattctgccaggtcaacactggtcctctacccctgctgggccagagtgagccagaaaagtggatgctgccccctcaaggtgctatctcagagaccag

SEQ ID NO: 118252 - DNA, 650 bp, Homo sapiens
  Payload ID: 3145
  Gene Symbol: C14orf159
  Gene Name: chromosome 14 open reading frame 159
  ENST ID: ENST00000523879
  CDS Start-End: 400-650
agcggatggagctgctacagtcagcgcttggggctggcctcagcttgtagacccgagccctgcagaacaaccccccgtggcgcaggagagcagaagaaagggggcctttatgcccttttgagggaagcacacattctgcaaggccgtggaaacaaagggaggaactgtttgtagccctcgtccagacgccccaaacaaacagagccaagttacaccctgtttaaccctgccttcaaagggacgactctgtaaggtctcactctgttgcccaggctggagtgcagtggcgtgatcttgattcaccgcagccttgacctcctgggatcaagtggtccttccacctcaacctcccaagtagctaggactacagattctctgctacttattcaagttgacacgatgcccttcacactccacctgaggtcccgccttccctctgccataaggagtttgattctacaaaagaaaccaaacatcagaaatacatccagcatggctggagagctccgaccagccagcctggtggtcctgcccaggtcccttgctccagcttttgaaagattctgccaggtcaacactggtcctctacccctgctgggccagagtgagccagaaaagtggatgctgccccctcaaggtgctatctcaga

SEQ ID NO: 118253 - DNA, 3075 bp, Homo sapiens
  Payload ID: 3145
  Gene Symbol: C14orf159
  Gene Name: chromosome 14 open reading frame 159
  Uniprot ID: Q7Z3D6
  ENST ID: ENST00000518868
  CDS Start-End: 691-2556
aagggtattctgggagcccaccccaggacaatggcagggcaaaaccagtgagcaaggcagaaaattcctgaaattctccactgaggcccagctgttcctctccttgaaaagtcaaggcttggttcaagccagatagcacctgaggacagaacatatcagatggagaaggaaaggcaagtgacttgtccagagccactctgtcaaaaggggacttgagtcctcagggctgttgactccaaagctgacaagcaggtggcattcttcttcagagcagggcaagtgtaattctggaccaatgtgtgattctgagaccagaccaaccaactgaagttacagattacgaaaatgatagaaccagaaggtgctaacaaaatgtctgtcctgcatgtgtggcatttgacatgaagaaactgaggcccttgctgggcgcagtggctcatgcctgtaaccccagcactttgggaggccaaggcaggaggatcacttgagctcaagagttcaagaccagccttggacaagatagtgaaaccttgtctctaccaaaaaaatacagaagttagccaggcatggtgcagtgtacctgtagtagcagctactgaggaagctgaggagccaagttacaccctgtttaaccctgccttcaaagggacgactctgtaagattctctgctacttattcaagttgacacgatgcccttcacactccacctgaggtcccgccttccctctgccataaggagtttgattctacaaaagaaaccaaacatcagaaatacatccagcatggctggagagctccgaccagccagcctggtggtcctgcccaggtcccttgctccagcttttgaaagattctgccaggtcaacactggtcctctacccctgctgggccagagtgagccagaaaagtggatgctgccccctcaaggtgctatctcagagaccaggatgggccatccccagttctggaaatacgagttcggtgcctgcaccggcagcctggcttcgctggagcagtactcggagcagctgaaggacatggtggccttcttcctgggctgcagcttctccctggaggaggccttggagaaagcggggctccccagaagagacccagcaggtcacagccaggcgggtgcatacaagacaacagtgccttgtgttacccatgctggcttctgctgccctctggtggtcacgatgaggcccattcccaaggacaagctggaagggctggtgcgggcctgctgctccctcggaggtgagcaggggcaacctgttcacatgggcgacccagaactgttgggaatcaaagagctttccaaacctgcctacggggatgccatggtgtgtcccccaggggaggttccagtgttctggccttctccgctgaccagtctcggagctgtcagcagctgtgagaccccactggcttttgccagcatcccaggctgcacagttatgactgacctgaaggatgcaaaggctccacctggttgtctcaccccagagagaattccagaggtccatcacatttcccaagatcctctgcactacagcatcgcgtcagtctctgcttctcagaagatcagagaactagagtctatgatcggcatagacccagggaaccgggggattgggcacctgctctgtaaagatgagctgctgaaggcctctctctcgctgtcccatgcccgctcagtgctcatcaccactgggttccccacacatttcaatcatgagcctccagaagagacagatggcccaccaggagctgttgctctggttgccttcctgcaggccttggagaaggaggtcgccataatcgttgaccagagagcctggaacttgcaccagaagattgttgaagatgctgttgagcaaggtgttctgaagacgcagatcccgatattaacttaccaaggtggatcagtggaagctgctcaggcattcctgtgcaaaaatggggacccgcagacacctagatttgaccacctggtggccatagagcgtgccggaagagctgctgatggcaattactacaatgcaaggaagatgaacatcaagcacttggttgaccccattgacgatctttttcttgctgcgaagaagattcctggaatctcatcaactggagtcggtgatggaggcaacgagcttgggatgggtaaagtcaaggaggctgtgaggaggcacatacggcacggggatgtcatcgcctgcgacgtggaggctgactttgccgtcattgctggtgtttctaactggggaggctatgccctggcctgcgcactctacatcctgtactcatgtgctgtccacagtcagtacctgaggaaagcagtcggaccctccagggcacctggagatcaggcctggactcaggccctcccgtcggtcattaaggaagaaaaaatgctgggcatcttggtgcagcacaaagtccggagtggcgtctcgggcatcgtgggcatggaggtggatgggctgcccttccacaacacccacgccgagatgatccagaagctggtggacgtcaccacggcacaggtgtaaccgtccatgttccgtgtgagcagagtccctaccaacgggcaggtctgcatccggggagaatgcagctgcttctggcgacaatcctgctagtaaacactggtcttcggtgagcaacgaacactcgcctggcctgggaaactgcatgcccactttctgggaggggttagtgcaggtgctgtggacaaaggacaacatttctctggggctttttaacttttattcctaagactctaaaggcgttgatttcaaccctccttcactctggcttcttcaggcaacccacgtggtctcctgtgagaatcttctcgacagttacttatggggacacttgtgaacaattaactgccaggcagagcatgagaacaaacattcccaggccatgtaggataggatactccagactccagtcatcctcccccatccatggtttctgttactcatggtttcagttactcatagccaactgcagaccgaaaatactaaatgaaaaatttcagaaataaacaactcttaagtttt

SEQ ID NO: 118254 - DNA, 1060 bp, Homo sapiens
  Payload ID: 3145
  Gene Symbol: C14orf159
  Gene Name: chromosome 14 open reading frame 159
  ENST ID: ENST00000519950
  CDS Start-End: 457-1060
gggagcggatggagctgctacagtcagcgcttggggctggcctcagcttgtagacccgagccctgcagaacaaccccccgtggcgcaggagagcagaagaaagggggcctttatgcccttttgagggaagcacacattctgcaaggccgtggaaacaaagggaggaactgtttgtagccctcgtccagacgccccaaacaaacaatggagaaggaaaggcaagtgacttgtccagagccactctgtcaaaaggggacttgagtcctcagggctgttgactccaaagctgacaagcaggtggcattcttcttcagagcagggcaagtgtaattctggaccaatgtgtgattctgagaccagaccaaccaactgaaggagccaagttacaccctgtttaaccctgccttcaaagggacgactctgtaagattctctgctacttattcaagttgacacgatgcccttcacactccacctgaggtcccgccttccctctgccataaggagtttgattctacaaaagaaaccaaacatcagaaatacatccagcatggctggagagctccgaccagccagcctggtggtcctgcccaggtcccttgctccagcttttgaaagattctgccaggtcaacactggtcctctacccctgctgggccagagtgagccagaaaagtggatgctgccccctcaaggtgctatctcagagaccaggatgggccatccccagttctggaaatacgagttcggtgcctgcaccggcagcctggcttcgctggagcagtactcggagcagctgaaggacatggtggccttcttcctgggctgcagcttctccctggaggaggccttggagaaagcggggctccccagaagagacccagcaggtcacagccaggcgggtgcatacaagacaacagtgccttgtgttacccatgctggcttctgctgccctctggtggtcacgatgaggcccattcccaaggacaagctggaagggctggtgcgggcctgctgctccctcggaggtgagcaggggcaacctgttcacatgggcgacc

SEQ ID NO: 118255 - DNA, 2435 bp, Homo sapiens
  Payload ID: 3145
  Gene Symbol: C14orf159
  Gene Name: chromosome 14 open reading frame 159
  ENST ID: ENST00000523461
  CDS Start-End: 1-1694
ggagtttgattctacaaaagaaaccaaacatcagaaatacatccagcatggctggagagctccgaccagccagcctggtggtcctgcccaggtcccttgctccagcttttgaaagattctgccaggtcaacactggtcctctacccctgctgggccagagtgagccagaaaagtggatgctgccccctcaaggtgctatctcagagaccaggatgggccatccccagttctggaaatacgagttcggtgcctgcaccggcagcctggcttcgctggagcagtactcggagcagctgaaggacatggtggccttcttcctgggctgcagcttctccctggaggaggccttggagaaagcggggctccccagaagagacccagcaggtcacagccaggcgggtgcatacaagacaacagtgccttgtgttacccatgctggcttctgctgccctctggtggtcacgatgaggcccattcccaaggacaagctggaagggctggtgcgggcctgctgctccctcggaggtgagcaggggcaacctgttcacatgggcgacccagaactgttgggaatcaaagagctttccaaacctgcctacggggatgccatggtgtgtcccccaggggaggttccagtgttctggccttctccgctgaccagtctcggagctgtcagcagctgtgagaccccactggcttttgccagcatcccaggctgcacagttatgactgacctgaaggatgcaaaggctccacctggttgtctcaccccagagagaattccagaggtccatcacatttcccaagatcctctgcactacagcatcgcgtcagtctctgcttctcagaagatcagagaactagagtctatgatcggcatagacccagggaaccgggggattgggcacctgctctgtaaagatgagctgctgaaggcctctctctcgctgtcccatgcccgctcagtgctcatcaccactgggttccccacacatttcaatcatgagcctccagaagagacagatggcccaccaggagctgttgctctggttgccttcctgcaggccttggagaaggaggtcgccataatcgttgaccagagagcctggaacttgcaccagaagattgttgaagatgctgttgagcaaggtgttctgaagacgcagatcccgatattaacttaccaaggtggatcagtggaagctgctcaggcattcctgtgcaaaaatggggacccgcagacacctagatttgaccacctggtggccatagagcgtgccggaagagctgctgatggcaattactacaatgcaaggaagatgaacatcaagcacttggttgaccccattgacgatctttttcttgctgcgaagaagattcctggaatctcatcaactggagtcggtgatggaggcaacgagcttgggatgggtaaagtcaaggaggctgtgaggaggcacatacggcacggggatgtcatcgcctgcgacgtggaggctgactttgccgtcattgctggtgtttctaactggggaggctatgccctggcctgcgcactctacatcctgtactcatgtgctgtccacagtcagtacctgaggaaagcagtcggaccctccagggcacctggagatcaggcctggactcaggccctcccgtcggtcattaaggagagcaaagggagaaagctctaggctaaaggccagaagacctagccctgccaataaaatcaacctcattttgtgaatgcctgttgtgtgccaaggaccctgctaagtgctttgcttgaagaaaaaatgctgggcatcttggtgcagcacaaagtccggagtggcgtctcgggcatcgtgggcatggaggtggatgggctgcccttccacaacacccacgccgagatgatccagaagctggtggacgtcaccacggcacaggtgtaaccgtccatgttccgtgtgagcagagtccctaccaacgggcaggtctgcatccggggagaatgcagctgcttctggcgacaatcctgctagtaaacactggtcttcggtgagcaacgaacactcgcctggcctgggaaactgcatgcccactttctgggaggggttagtgcaggtgctgtggacaaaggacaacatttctctggggctttttaacttttattcctaagactctaaaggcgttgatttcaaccctccttcactctggcttcttcaggcaacccacgtggtctcctgtgagaatcttctcgacagttacttatggggacacttgtgaacaattaactgccaggcagagcatgagaacaaacattcccaggccatgtaggataggatactccagactccagtcatcctcccccatccatggtttctgttactcatggtttcagttactcatagccaactgcagaccgaaaatactaaatgaaaaatttcaga

SEQ ID NO: 118256 - DNA, 827 bp, Homo sapiens
  Payload ID: 3145
  Gene Symbol: C14orf159
  Gene Name: chromosome 14 open reading frame 159
  ENST ID: ENST00000522816
  CDS Start-End: 1-827
tcccgatattaacttaccaaggtggatcagtggaagctgctcaggcattcctgtgcaaaaatggggacccgcagacacctagatttgaccacctggtggccatagagcgtgccggaagagctgctgatggcaattactacaatgcaaggaagatgaacatcaagcacttggttgaccccattgacgatctttttcttgctgcgaagaagattcctggaatctcatcaactggagtcggtgatggaggcaacgagcttgggatgggtaaagtcaaggaggctgtgaggaggcacatacggcacggggatgtcatcgcctgcgacgtggaggctgactttgccgtcattgctggtgtttctaactggggaggctatgccctggcctgcgcactctacatcctgtactcatgtgctgtccacagtcagtacctgaggaaagcagtcggaccctccagggcacctggagatcaggcctggactcaggccctcccgtcggtcattaagtcaggctggggcaggtgtcagggtgtccctgagccaggcttgatggtggcagcaggtggcctatgccaaggagagctcccacagccagagcagaaggaggtgaaggccaagacagagctggggcctccagatgccatgtggcgtcatgtgggactgtctgtctttccccgtgtggctgggaggcagatggagccgtttctcccgctgccacactccccagcccggtccaggcagccagctctcccctgcctattgcaagatgagaccatgattataccagccccatcttgctctacgggaagcctcagcaccatgttcccgcct

SEQ ID NO: 118257 - DNA, 1597 bp, Homo sapiens
  Payload ID: 3145
  Gene Symbol: C14orf159
  Gene Name: chromosome 14 open reading frame 159
  ENST ID: ENST00000517518
  CDS Start-End: 303-1597
tggcagggcaaaaccagtgagcaaggcagaaaattcctgaaattctccactgaggcccagctgttcctctccttgaaaagtcaaggcttggttcaagccagatagcacctgaggacagaacatatcagatggagaaggaaaggcaagtgacttgtccagagccactctgtcaaaaggggacttgagtcctcagggctgttgactccaaagctgacaagcaggagccaagttacaccctgtttaaccctgccttcaaagggacgactctgtaagattctctgctacttattcaagttgacacgatgcccttcacactccacctgaggtcccgccttccctctgccataaggagtttgattctacaaaagaaaccaaacatcagaaatacatccagcatggctggagagctccgaccagccagcctggtggtcctgcccaggtcccttgctccagcttttgaaagattctgccaggtcaacactggtcctctacccctgctgggccagagtgagccagaaaagtggatgctgccccctcaaggtgctatctcagagaccaggatgggccatccccagttctggaaatacgagttcggtgcctgcaccggcagcctggcttcgctggagcagtactcggagcagctgaaggacatggtggccttcttcctgggctgcagcttctccctggaggaggccttggagaaagcggggctccccagaagagacccagcaggtcacagccaggcgggtgcatacaagacaacagtgccttgtgttacccatgctggcttctgctgccctctggtggtcacgatgaggcccattcccaaggacaagctggaagggctggtgcgggcctgctgctccctcggaggtgagcaggggcaacctgttcacatgggcgacccagaactgttgggaatcaaagagctttccaaacctgcctacggggatgccatggtgtgtcccccaggggaggttccagtgttctggccttctccgctgaccagtctcggagctgtcagcagctgtgagaccccactggcttttgccagcatcccaggctgcacagttatgactgacctgaaggatgcaaaggctccacctggttgtctcaccccagagagaattccagaggtccatcacatttcccaagatcctctgcactacagcatcgcgtcagtctctgcttctcagaagatcagagaactagagtctatgatcggcatagacccagggaaccgggggattgggcacctgctctgtaaagatgagctgctgaaggcctctctctcgctgtcccatgcccgctcagtgctcatcaccactgggttccccacacatttcaatcatgagcctccagaagagacagatggcccaccaggagctgttgctctggttgccttcctgcaggccttggagaaggaggtcgccataatcgttgaccagagagcctggaacttgcaccagaagattgttgaagatgctgttgagcaaggtgttctgaagacgcagatcccgatattaacttaccaaggtggatcagtggaagctgctcaggcattcctgtgcaaaaatggggacccgcagacacctag

SEQ ID NO: 118258 - DNA, 2294 bp, Homo sapiens
  Payload ID: 3145
  Gene Symbol: C14orf159
  Gene Name: chromosome 14 open reading frame 159
  ENST ID: ENST00000517306
  CDS Start-End: 1-1520
cctgcaccggcagcctggcttcgctggagcagtactcggagcagctgaaggacatggtggccttcttcctgggctgcagcttctccctggaggaggccttggagaaagcggggctccccagaagagacccagcaggtcacagccaggcgggtgcatacaagacaacagtgccttgtgttacccatgctggcttctgctgccctctggtggtcacgatgaggcccattcccaaggacaagctggaagggctggtgcgggcctgctgctccctcggaggtgagcaggggcaacctgttcacatgggcgacccagaactgttgggaatcaaagagctttccaaacctgcctacggggatgccatggtgtgtcccccaggggaggttccagtgttctggccttctccgctgaccagtctcggagctgtcagcagctgtgagaccccactggcttttgccagcatcccaggctgcacagttatgactgacctgaaggatgcaaaggctccacctggttgtctcaccccagagagaattccagaggtccatcacatttcccaagatcctctgcactacagcatcgcgtcagtctctgcttctcagaagatcagagaactagagtctatgatcggcatagacccagtgctcatcaccactgggttccccacacatttcaatcatgagcctccagaagagacagatggcccaccaggagctgttgctctggttgccttcctgcaggccttggagaaggaggtcgccataatcgttgaccagagagcctggaacttgcaccagaagattgttgaagatgctgttgagcaaggtgttctgaagacgcagatcccgatattaacttaccaaggtggatcagtggaagctgctcaggcattcctgtgcaaaaatggggacccgcagacacctagatttgaccacctggtggccatagagcgtgccggaagagctgctgatggcaattactacaatgcaaggaagatgaacatcaagcacttggttgaccccattgacgatctttttcttgctgcgaagaagattcctggaatctcatcaactggagtcggtgatggaggcaacgagcttgggatgggtaaagtcaaggaggctgtgaggaggcacatacggcacggggatgtcatcgcctgcgacgtggaggctgactttgccgtcattgctggtgagcactcggatggccgcccagtccggccggctacccagggtgtttctaactggggaggctatgccctggcctgcgcactctacatcctgtactcatgtgctgtccacagtcagtacctgaggaaagcagtcggaccctccagggcacctggagatcaggcctggactcaggccctcccgtcggtcattaaggtaacaaaccccagccagccgctcgcctggaagcagcttttaccctggatgagcagcaggcctgaggtcccaagccgtaagccgagggctggcaccctgctgcccctcaaaagccagaggcagagccagccttgaagcagaggtctcctggattgggtgccctttaagctactcgcagttctgaatcgtgtggcaggcctgatccaagtgaccattttccttctagtttgactttgggaagaaaaaatgctgggcatcttggtgcagcacaaagtccggagtggcgtctcgggcatcgtgggcatggaggtggatgggctgcccttccacaacacccacgccgagatgatccagaagctggtggacgtcaccacggcacaggtgtaaccgtccatgttccgtgtgagcagagtccctaccaacgggcaggtctgcatccggggagaatgcagctgcttctggcgacaatcctgctagtaaacactggtcttcggtgagcaacgaacactcgcctggcctgggaaactgcatgcccactttctgggaggggttagtgcaggtgctgtggacaaaggacaacatttctctggggctttttaacttttattcctaagactctaaaggcgttgatttcaaccctccttcactctggcttcttcaggcaacccacgtggtctcctgtgagaatcttctcgacagttacttatggggacacttgtgaacaattaactgccaggcagagcatgagaacaaacattcccaggccatgtaggataggatactccagactccagtcatcctcccccatccatggtttctgttactcatggtttcagttactcatagccaactgcagaccgaaaatactaaatgaaaaatttcagaaataaacaactcttaagttttaaa

SEQ ID NO: 118259 - DNA, 2764 bp, Homo sapiens
  Payload ID: 3145
  Gene Symbol: C14orf159
  Gene Name: chromosome 14 open reading frame 159
  Uniprot ID: Q7Z3D6
  ENST ID: ENST00000523816
  CDS Start-End: 392-2242
ccccaggacaatggcagggcaaaaccagtgagcaaggcagaaaattcctgaaattctccactgaggcccagctgttcctctccttgaaaagtcaaggcttggttcaagccagatagcacctgaggacagaacatatcagatggagaaggaaaggcaagtgacttgtccagagccactctgtcaaaaggggacttgagtcctcagggctgttgactccaaagctgacaagcaggtggcattcttcttcagagcagggcaagtgtaattctggaccaatgtgtgattctgagaccagaccaaccaactgaaggagccaagttacaccctgtttaaccctgccttcaaagggacgactctgtaagattctctgctacttattcaagttgacacgatgcccttcacactccacctgaggtcccgccttccctctgccataaggagtttgattctacaaaagaaaccaaacatcagaaatacatccagcatggctggagagctccgaccagccagcctggtggtcctgcccaggtcccttgctccagcttttgaaagattctgccaggtcaacactggtcctctacccctgctgggccagagtgagccagaaaagtggatgctgccccctcaaggtgctatctcagagaccaggatgggccatccccagttctggaaatacgagttcggtgcctgcaccggcagcctggcttcgctggagcagtactcggagcagctgaaggacatggtggccttcttcctgggctgcagcttctccctggaggaggccttggagaaagcggggctccccagaagagacccagcaggtcacagccagacaacagtgccttgtgttacccatgctggcttctgctgccctctggtggtcacgatgaggcccattcccaaggacaagctggaagggctggtgcgggcctgctgctccctcggaggtgagcaggggcaacctgttcacatgggcgacccagaactgttgggaatcaaagagctttccaaacctgcctacggggatgccatggtgtgtcccccaggggaggttccagtgttctggccttctccgctgaccagtctcggagctgtcagcagctgtgagaccccactggcttttgccagcatcccaggctgcacagttatgactgacctgaaggatgcaaaggctccacctggttgtctcaccccagagagaattccagaggtccatcacatttcccaagatcctctgcactacagcatcgcgtcagtctctgcttctcagaagatcagagaactagagtctatgatcggcatagacccagggaaccgggggattgggcacctgctctgtaaagatgagctgctgaaggcctctctctcgctgtcccatgcccgctcagtgctcatcaccactgggttccccacacatttcaatcatgagcctccagaagagacagatggcccaccaggagctgttgctctggttgccttcctgcaggccttggagaaggaggtcgccataatcgttgaccagagagcctggaacttgcaccagaagattgttgaagatgctgttgagcaaggtgttctgaagacgcagatcccgatattaacttaccaaggtggatcagtggaagctgctcaggcattcctgtgcaaaaatggggacccgcagacacctagatttgaccacctggtggccatagagcgtgccggaagagctgctgatggcaattactacaatgcaaggaagatgaacatcaagcacttggttgaccccattgacgatctttttcttgctgcgaagaagattcctggaatctcatcaactggagtcggtgatggaggcaacgagcttgggatgggtaaagtcaaggaggctgtgaggaggcacatacggcacggggatgtcatcgcctgcgacgtggaggctgactttgccgtcattgctggtgtttctaactggggaggctatgccctggcctgcgcactctacatcctgtactcatgtgctgtccacagtcagtacctgaggaaagcagtcggaccctccagggcacctggagatcaggcctggactcaggccctcccgtcggtcattaaggaagaaaaaatgctgggcatcttggtgcagcacaaagtccggagtggcgtctcgggcatcgtgggcatggaggtggatgggctgcccttccacaacacccacgccgagatgatccagaagctggtggacgtcaccacggcacaggtgtaaccgtccatgttccgtgtgagcagagtccctaccaacgggcaggtctgcatccggggagaatgcagctgcttctggcgacaatcctgctagtaaacactggtcttcggtgagcaacgaacactcgcctggcctgggaaactgcatgcccactttctgggaggggttagtgcaggtgctgtggacaaaggacaacatttctctggggctttttaacttttattcctaagactctaaaggcgttgatttcaaccctccttcactctggcttcttcaggcaacccacgtggtctcctgtgagaatcttctcgacagttacttatggggacacttgtgaacaattaactgccaggcagagcatgagaacaaacattcccaggccatgtaggataggatactccagactccagtcatcctcccccatccatggtttctgttactcatggtttcagttactcatagccaactgcagaccgaaaatactaaatgaaaaatttcagaaataaacaactcttaagttttaaa

SEQ ID NO: 118260 - DNA, 622 bp, Homo sapiens
  Payload ID: 3145
  Gene Symbol: C14orf159
  Gene Name: chromosome 14 open reading frame 159
  ENST ID: ENST00000521081
  CDS Start-End: 548-622
acgtgagctcaggctgtgggagcggatggagctgctacagtcagcgcttggggctggcctcagcttgtagacccgagccctgcagaacaaccccccgtggcgcaggagagcagaagaaagggggcctttatgcccttttgagggaagcacacattctgcaaggccgtggaaacaaagggaggaactgtttgtagccctcgtccagacgccccaaacaaacagtaagtcagaagggaacagagcacagcacagtccctccctccgccccaggcagtatccaccttgccccgccccacctaaggagcccaagggtattctgggagcccaccccaggacaatggcagggcaaaaccagtgagcaaggcagaaaattcctgaaattctccactgaggcccagctgttcctctccttgaaaagtcaaggcttggttcaagccagatagcacctgaggacagaacatatcaggagccaagttacaccctgtttaaccctgccttcaaagggacgactctgtaagattctctgctacttattcaagttgacacgatgcccttcacactccacctgaggtcccgccttccctctgccataaggagtttgattctacaaaagaaaccaaac

SEQ ID NO: 118261 - DNA, 2814 bp, Homo sapiens
  Payload ID: 3145
  Gene Symbol: C14orf159
  Gene Name: chromosome 14 open reading frame 159
  ENST ID: ENST00000523837
  CDS Start-End: 246-359
cctcagcttgtagacccgagccctgcagaacaaccccccgtggcgcaggagagcagaagaaagggggcctttatgcccttttgagggaagcacacattctgcaaggccgtggaaacaaagggaggaactgtttgtagccctcgtccagacgccccaaacaaacagagccaagttacaccctgtttaaccctgccttcaaagggacgactctgtaagattctctgctacttattcaagttgacacgatgcccttcacactccacctgaggtcccgccttccctctgccataaggagtttgattctacaaaagaaaccaaacatcagaaatacatccagcatggctggaggatttcattgaacagtaactttagtccctgcttcctgaacaccgaggtgctcaataacttacatacattacctccctgaggtctcttggagagctccgaccagccagcctggtggtcctgcccaggtcccttgctccagcttttgaaagattctgccaggtcaacactggtcctctacccctgctgggccagagtgagccagaaaagtggatgctgccccctcaaggtgctatctcagagaccaggatgggccatccccagttctggaaatacgagttcggtgcctgcaccggcagcctggcttcgctggagcagtactcggagcagctgaaggacatggtggccttcttcctgggctgcagcttctccctggaggaggccttggagaaagcggggctccccagaagagacccagcaggtcacagccaggcgggtgcatacaagacaacagtgccttgtgttacccatgctggcttctgctgccctctggtggtcacgatgaggcccattcccaaggacaagctggaagggctggtgcgggcctgctgctccctcggaggtgagcaggggcaacctgttcacatgggcgacccaggggtctccaggggcaaaggccctgaacaaggctcaaaggctctggcagctgtatcagggctgggcttacagatgcccctcaggtttaaagaactgttgggaatcaaagagctttccaaacctgcctacggggatgccatggtgtgtcccccaggggaggttccagtgttctggccttctccgctgaccagtctcggagctgtcagcagctgtgagaccccactggcttttgccagcatcccaggctgcacagttatgactgacctgaaggatgcaaaggctccacctggttgtctcaccccagagagaattccagaggtccatcacatttcccaagatcctctgcactacagcatcgcgtcagtctctgcttctcagaagatcagagaactagagtctatgatcggcatagacccagggaaccgggggattgggcacctgctctgtaaagatgagctgctgaaggcctctctctcgctgtcccatgcccgctcagtgctcatcaccactgggttccccacacatttcaatcatgagcctccagaagagacagatggcccaccaggagctgttgctctggttgccttcctgcaggccttggagaaggaggtcgccataatcgttgaccagagagcctggaacttgcaccagaagattgttgaagatgctgttgagcaaggtgttctgaagacgcagatcccgatattaacttaccaaggtggatcagtggaagctgctcaggcattcctgtgcaaaaatggggacccgcagacacctagatttgaccacctggtggccatagagcgtgccggaagagctgctgatggcaattactacaatgcaaggaagatgaacatcaagcacttggttgaccccattgacgatctttttcttgctgcgaagaagattcctggaatctcatcaactggagtcggtgatggaggcaacgagcttgggatgggtaaagtcaaggaggctgtgaggaggcacatacggcacggggatgtcatcgcctgcgacgtggaggctgactttgccgtcattgctggtgtttctaactggggaggctatgccctggcctgcgcactctacatcctgtactcatgtgctgtccacagtcagtacctgaggaaagcagtcggaccctccagggcacctggagatcaggcctggactcaggccctcccgtcggtcattaaggaagaaaaaatgctgggcatcttggtgcagcacaaagtccggagtggcgtctcgggcatcgtgggcatggaggtggatgggctgcccttccacaacacccacgccgagatgatccagaagctggtggacgtcaccacggcacaggtgtaaccgtccatgttccgtgtgagcagagtccctaccaacgggcaggtctgcatccggggagaatgcagctgcttctggcgacaatcctgctagtaaacactggtcttcggtgagcaacgaacactcgcctggcctgggaaactgcatgcccactttctgggaggggttagtgcaggtgctgtggacaaaggacaacatttctctggggctttttaacttttattcctaagactctaaaggcgttgatttcaaccctccttcactctggcttcttcaggcaacccacgtggtctcctgtgagaatcttctcgacagttacttatggggacacttgtgaacaattaactgccaggcagagcatgagaacaaacattcccaggccatgtaggataggatactccagactccagtcatcctcccccatccatggtttctgttactcatggtttcagttactcatagccaactgcagaccgaaaatactaaatgaaaaatttcagaaataaacaactcttaagttttaaa

SEQ ID NO: 118262 - DNA, 550 bp, Homo sapiens
  Payload ID: 3145
  Gene Symbol: C14orf159
  Gene Name: chromosome 14 open reading frame 159
  ENST ID: ENST00000524232
  CDS Start-End: 394-550
gtgagctcaggctgtgggagcggatggagctgctacagtcagcgcttggggctggcctcagcttgtagacccgagccctgcagaacaaccccccgtggcgcaggagagcagaagaaagggggcctttatgcccttttgagggaagcacacattctgcaaggccgtggaaacaaagggaggaactgtttgtagccctcgtccagacgccccaaacaaacaatggagaaggaaaggcaagtgacttgtccagagccactctgtcaaaaggggacttgagtcctcagggctgttgactccaaagctgacaagcaggagccaagttacaccctgtttaaccctgccttcaaagggacgactctgtaagattctctgctacttattcaagttgacacgatgcccttcacactccacctgaggtcccgccttccctctgccataaggagtttgattctacaaaagaaaccaaacatcagaaatacatccagcatggctggagagctccgaccagccagcctggtggtcctgcccaggtcccttgctccagcttttg

SEQ ID NO: 118263 - DNA, 959 bp, Homo sapiens
  Payload ID: 3145
  Gene Symbol: C14orf159
  Gene Name: chromosome 14 open reading frame 159
  Uniprot ID: Q7Z3D6
  ENST ID: ENST00000518665
  CDS Start-End: 450-929
gatggagctgctacagtcagcgcttggggctggcctcagcttgtagacccgagccctgcagaacaaccccccgtggcgcaggagagcagaagaaagggggcctttatgcccttttgagggaagcacacattctgcaaggccgtggaaacaaagggaggaactgtttgtagccctcgtccagacgccccaaacaaacaatggagaaggaaaggcaagtgacttgtccagagccactctgtcaaaaggggacttgagtcctcagggctgttgactccaaagctgacaagcaggtggcattcttcttcagagcagggcaagtgtaattctggaccaatgtgtgattctgagaccagaccaaccaactgaaggagccaagttacaccctgtttaaccctgccttcaaagggacgactctgtaagattctctgctacttattcaagttgacacgatgcccttcacactccacctgaggtcccgccttccctctgccataaggagtttgattctacaaaagaaaccaaacatcagaaatacatccagcatggctggagagctccgaccagccagcctggtggtcctgcccaggtcccttgctccagcttttgaaagattctgccaggtcaacactggtcctctacccctgctgggccagagtgagccagaaaagtggatgctgccccctcaaggtgctatctcagagaccagcctcagggaccttcacagtgcctggcacagaacctcactcatgactgttgctcaggaacgagctgccctccccactgttctgactccttcccctatcacctggcgcctgtcctggctgagatctttgagatcatggagaaagtccagccctggagaaatcccactggctctgccatctgtccactccatcgcccaagccagaaacccgcctgtacaggattaagaagaaaataaaaaacacttgcattaccaa

SEQ ID NO: 118264 - DNA, 484 bp, Homo sapiens
  Payload ID: 3145
  Gene Symbol: C14orf159
  Gene Name: chromosome 14 open reading frame 159
  ENST ID: ENST00000518871
  CDS Start-End: 158-484
gagaggagctcagagaagcgagagcaaagggaagggtttgtgacgcagatgagagcaggaagagaaaaaggctctggagccaagttacaccctgtttaaccctgccttcaaagggacgactctgtaagattctctgctacttattcaagttgacacgatgcccttcacactccacctgaggtcccgccttccctctgccataaggagtttgattctacaaaagaaaccaaacatcagaaatacatccagcatggctggagagctccgaccagccagcctggtggtcctgcccaggtcccttgctccagcttttgaaagattctgccaggtcaacactggtcctctacccctgctgggccagagtgagccagaaaagtggatgctgccccctcaaggtgctatctcagagaccaggatgggccatccccagttctggaaatacgagttcggtgcctgcaccggcagcctggcttcgctggagcag

SEQ ID NO: 118265 - DNA, 544 bp, Homo sapiens
  Payload ID: 3145
  Gene Symbol: C14orf159
  Gene Name: chromosome 14 open reading frame 159
  ENST ID: ENST00000521064
  CDS Start-End: 168-544
cttctcgagccagctctctctgtggggtgacaaatgaccactggcagcctatgctcacattgtccctgtgtctagcagtttcagaggagccaagttacaccctgtttaaccctgccttcaaagggacgactctgtaagattctctgctacttattcaagttgacacgatgcccttcacactccacctgaggtcccgccttccctctgccataaggagtttgattctacaaaagaaaccaaacatcagaaatacatccagcatggctggagagctccgaccagccagcctggtggtcctgcccaggtcccttgctccagcttttgaaagattctgccaggtcaacactggtcctctacccctgctgggccagagtgagccagaaaagtggatgctgccccctcaaggtgctatctcagagaccaggatgggccatccccagttctggaaatacgagttcggtgcctgcaccggcagcctggcttcgctggagcagtactcggagcagctgaaggacatggtggccttcttcctgggctgcagctt

SEQ ID NO: 118266 - DNA, 2687 bp, Homo sapiens
  Payload ID: 3145
  Gene Symbol: C14orf159
  Gene Name: chromosome 14 open reading frame 159
  Uniprot ID: Q7Z3D6
  ENST ID: ENST00000520328
  CDS Start-End: 474-2168
acgtgagctcaggctgtgggagcggatggagctgctacagtcagcgcttggggctggcctcagcttgtagacccgagccctgcagaacaaccccccgtggcgcaggagagcagaagaaagggggcctttatgcccttttgagggaagcacacattctgcaaggccgtggaaacaaagggaggaactgtttgtagccctcgtccagacgccccaaacaaacaatggagaaggaaaggcaagtgacttgtccagagccactctgtcaaaaggggacttgagtcctcagggctgttgactccaaagctgacaagcaggtggcattcttcttcagagcagggcaagtgtaattctggaccaatgtgtgattctgagaccagaccaaccaactgaaggagccaagttacaccctgtttaaccctgccttcaaagggacgactctgtaagattctctgctacttattcaagttgacacgatgcccttcacactccacctgaggtcccgccttccctctgccataaggagtttgattctacaaaagaaaccaaacatcagaaatacatccagcatggctggagagctccgaccagccagcctggtggtcctgcccaggtcccttgctccagcttttgaaagattctgccaggtcaacactggtcctctacccctgctgggccagagtgagccagaaaagtggatgctgccccctcaaggtgctatctcagagaccaggatgggccatccccagttctggaaatacgagttcggtgcctgcaccggcagcctggcttcgctggagcagtactcggagcagctgaaggacatggtggccttcttcctgggctgcagcttctccctggaggaggccttggagaaagcggggctccccagaagagacccagcaggtcacagccagacaacagtgccttgtgttacccatgctggcttctgctgccctctggtggtcacgatgaggcccattcccaaggacaagctggaagggctggtgcgggcctgctgctccctcggagaactgttgggaatcaaagagctttccaaacctgcctacggggatgccatggtgtgtcccccaggggaggttccagtgttctggccttctccgctgaccagtctcggagctgtcagcagctgtgagaccccactggcttttgccagcatcccaggctgcacagttatgactgacctgaaggatgcaaaggctccacctggttgtctcaccccagagagaattccagaggtccatcacatttcccaagatcctctgcactacagcatcgcgtcagtctctgcttctcagaagatcagagaactagagtctatgatcggcatagacccagggaaccgggggattgggcacctgctctgtaaagatgagctgctgaaggcctctctctcgctgtcccatgcccgctcagtgctcatcaccactgggttccccacacatttcaatcatgagcctccagaagagacagatggcccaccaggagctgttgctctggttgccttcctgcaggccttggagaaggaggtcgccataatcgttgaccagagagcctggaacttgcaccagaagattgttgaagatgctgttgagcaaggtgttctgaagacgcagatcccgatattaacttaccaaggtggatcagtggaagctgctcaggcattcctgtgcaaaaatggggacccgcagacacctagatttgaccacctggtggccatagagcgtgccggaagagctgctgatggcaattactacaatgcaaggaagatgaacatcaagcacttggttgaccccattgacgatctttttcttgctgcgaagaagattcctggaatctcatcaactggtgtttctaactggggaggctatgccctggcctgcgcactctacatcctgtactcatgtgctgtccacagtcagtacctgaggaaagcagtcggaccctccagggcacctggagatcaggcctggactcaggccctcccgtcggtcattaaggaagaaaaaatgctgggcatcttggtgcagcacaaagtccggagtggcgtctcgggcatcgtgggcatggaggtggatgggctgcccttccacaacacccacgccgagatgatccagaagctggtggacgtcaccacggcacaggtgtaaccgtccatgttccgtgtgagcagagtccctaccaacgggcaggtctgcatccggggagaatgcagctgcttctggcgacaatcctgctagtaaacactggtcttcggtgagcaacgaacactcgcctggcctgggaaactgcatgcccactttctgggaggggttagtgcaggtgctgtggacaaaggacaacatttctctggggctttttaacttttattcctaagactctaaaggcgttgatttcaaccctccttcactctggcttcttcaggcaacccacgtggtctcctgtgagaatcttctcgacagttacttatggggacacttgtgaacaattaactgccaggcagagcatgagaacaaacattcccaggccatgtaggataggatactccagactccagtcatcctcccccatccatggtttctgttactcatggtttcagttactcatagccaactgcagaccgaaaatactaaatgaaaaatttcagaaataaacaactcttaagtttt

SEQ ID NO: 118267 - DNA, 862 bp, Homo sapiens
  Payload ID: 3145
  Gene Symbol: C14orf159
  Gene Name: chromosome 14 open reading frame 159
  ENST ID: ENST00000523894
  CDS Start-End: 407-862
aggtgacaaagctaatcgaggtggcaattggggaaggggttctgggctgccgcaggcacacaggccagagcttcgtggatacctgcagggcccaaaggtccctccctgttttgaagagtgagtgatggctatgaggtagcggccaggctgatcacccctgcgttggctggaggcagaattctgtaaatcctcgccaagtctttctccaggccactggttagctcatctcagcctcctctgggagcatcaacaccaacatggcacaggggactgcagtggtgtgctttggacctgtgtacccacccaaggctaaaggcagagccaggagccaagttacaccctgtttaaccctgccttcaaagggacgactctgtaagattctctgctacttattcaagttgacacgatgcccttcacactccacctgaggtcccgccttccctctgccataaggagtttgattctacaaaagaaaccaaacatcagaaatacatccagcatggctggagagctccgaccagccagcctggtggtcctgcccaggtcccttgctccagcttttgaaagattctgccaggtcaacactggtcctctacccctgctgggccagagtgagccagaaaagtggatgctgccccctcaaggtgctatctcagagaccaggatgggccatccccagttctggaaatacgagttcggtgcctgcaccggcagcctggcttcgctggagcagtactcggagcagctgaaggacatggtggccttcttcctgggctgcagcttctccctggaggaggccttggagaaagcggggctccccagaagagacccagcaggtcacagccaggcgggtgcatacaag

SEQ ID NO: 118268 - DNA, 2976 bp, Homo sapiens
  Payload ID: 3145
  Gene Symbol: C14orf159
  Gene Name: chromosome 14 open reading frame 159
  Uniprot ID: Q7Z3D6
  ENST ID: ENST00000523771
  CDS Start-End: 604-2454
gggaaggggttctgggctgccgcaggcacacaggccagagcttcgtggatacctgcagggcccaaaggtccctccctgttttgaagagtgagtgatggctatgaggtagcggccaggctgatcacccctgcgttggctggaggcagaattctgtaaatcctcgccaagtctttctccaggccactggttagctcatctcagcctcctctgggagcatcaacaccaacatggcacaggggactgcagtggtgtgctttggacctgtgtacccacccaaggctaaaggcagagccaggtgactttgcgggggtctcttctctaggattatctgtacttcccctctgtcctcttttactacgggagatcgagctagctataacccaccttctttcatgagaaccacactaaattgcaaaaattatcccagtgctggaggagggcagcaggttgagattatgttggcaggaagaatgttggcattgattggcacgcaggggacgagagctgctttgtgctttaaaggagccaagttacaccctgtttaaccctgccttcaaagggacgactctgtaagattctctgctacttattcaagttgacacgatgcccttcacactccacctgaggtcccgccttccctctgccataaggagtttgattctacaaaagaaaccaaacatcagaaatacatccagcatggctggagagctccgaccagccagcctggtggtcctgcccaggtcccttgctccagcttttgaaagattctgccaggtcaacactggtcctctacccctgctgggccagagtgagccagaaaagtggatgctgccccctcaaggtgctatctcagagaccaggatgggccatccccagttctggaaatacgagttcggtgcctgcaccggcagcctggcttcgctggagcagtactcggagcagctgaaggacatggtggccttcttcctgggctgcagcttctccctggaggaggccttggagaaagcggggctccccagaagagacccagcaggtcacagccagacaacagtgccttgtgttacccatgctggcttctgctgccctctggtggtcacgatgaggcccattcccaaggacaagctggaagggctggtgcgggcctgctgctccctcggaggtgagcaggggcaacctgttcacatgggcgacccagaactgttgggaatcaaagagctttccaaacctgcctacggggatgccatggtgtgtcccccaggggaggttccagtgttctggccttctccgctgaccagtctcggagctgtcagcagctgtgagaccccactggcttttgccagcatcccaggctgcacagttatgactgacctgaaggatgcaaaggctccacctggttgtctcaccccagagagaattccagaggtccatcacatttcccaagatcctctgcactacagcatcgcgtcagtctctgcttctcagaagatcagagaactagagtctatgatcggcatagacccagggaaccgggggattgggcacctgctctgtaaagatgagctgctgaaggcctctctctcgctgtcccatgcccgctcagtgctcatcaccactgggttccccacacatttcaatcatgagcctccagaagagacagatggcccaccaggagctgttgctctggttgccttcctgcaggccttggagaaggaggtcgccataatcgttgaccagagagcctggaacttgcaccagaagattgttgaagatgctgttgagcaaggtgttctgaagacgcagatcccgatattaacttaccaaggtggatcagtggaagctgctcaggcattcctgtgcaaaaatggggacccgcagacacctagatttgaccacctggtggccatagagcgtgccggaagagctgctgatggcaattactacaatgcaaggaagatgaacatcaagcacttggttgaccccattgacgatctttttcttgctgcgaagaagattcctggaatctcatcaactggagtcggtgatggaggcaacgagcttgggatgggtaaagtcaaggaggctgtgaggaggcacatacggcacggggatgtcatcgcctgcgacgtggaggctgactttgccgtcattgctggtgtttctaactggggaggctatgccctggcctgcgcactctacatcctgtactcatgtgctgtccacagtcagtacctgaggaaagcagtcggaccctccagggcacctggagatcaggcctggactcaggccctcccgtcggtcattaaggaagaaaaaatgctgggcatcttggtgcagcacaaagtccggagtggcgtctcgggcatcgtgggcatggaggtggatgggctgcccttccacaacacccacgccgagatgatccagaagctggtggacgtcaccacggcacaggtgtaaccgtccatgttccgtgtgagcagagtccctaccaacgggcaggtctgcatccggggagaatgcagctgcttctggcgacaatcctgctagtaaacactggtcttcggtgagcaacgaacactcgcctggcctgggaaactgcatgcccactttctgggaggggttagtgcaggtgctgtggacaaaggacaacatttctctggggctttttaacttttattcctaagactctaaaggcgttgatttcaaccctccttcactctggcttcttcaggcaacccacgtggtctcctgtgagaatcttctcgacagttacttatggggacacttgtgaacaattaactgccaggcagagcatgagaacaaacattcccaggccatgtaggataggatactccagactccagtcatcctcccccatccatggtttctgttactcatggtttcagttactcatagccaactgcagaccgaaaatactaaatgaaaaatttcagaaataaacaactcttaagttttaaa

SEQ ID NO: 118269 - DNA, 583 bp, Homo sapiens
  Payload ID: 3145
  Gene Symbol: C14orf159
  Gene Name: chromosome 14 open reading frame 159
  ENST ID: ENST00000517362
  CDS Start-End: 390-583
actgaggcccagctgttcctctccttgaaaagtcaaggcttggttcaagccagatagcacctgaggacagaacatatcagaagacacaggaagggctctgaatggactcgcttgggacctctgctcaccccctgtattaaataaccaccgaggccagatgagtggaaataccctggttagttggcctgagtcacatggcactattgatgggacagatggagaaggaaaggcaagtgacttgtccagagccactctgtcaaaaggggacttgagtcctcagggctgttgactccaaagctgacaagcaggagccaagttacaccctgtttaaccctgccttcaaagggacgactctgtaagattctctgctacttattcaagttgacacgatgcccttcacactccacctgaggtcccgccttccctctgccataaggagtttgattctacaaaagaaaccaaacatcagaaatacatccagcatggctggagagctccgaccagccagcctggtggtcctgcccaggtcccttgctccagcttttgaaagattctgccaggtcaacactggtcctctacccct

SEQ ID NO: 118270 - DNA, 591 bp, Homo sapiens
  Payload ID: 3145
  Gene Symbol: C14orf159
  Gene Name: chromosome 14 open reading frame 159
  ENST ID: ENST00000517877
  CDS Start-End: 55-315
gccttcaaagggacgactctgtaagattctctgctacttattcaagttgacacgatgcccttcacactccacctgaggtcccgccttccctctgccataaggagtttgattctacaaaagaaaccaaacatcagaaatacatccagcatggctggagagctccgaccagccagcctggtggtcctgcccaggtcccttgctccagcttttgaaagattctgccaggtcaacactggtcctctacccctgctgggccagagtgagccagaaaagtggatgctgccccctcaaggtgctatctcagagaccaggtaaaaagcttgggttactgtgggttgaagcttgggagtgtccaggtgctgtagccaggtgtctctgtcatccgggacctctctgtccagcctcagggaccttcacagtgcctggcacagaacctcactcatgactgttgctcaggaacgagctgccctccccactgttctgactccttcccctatcacctggcgcctgtcctggctgagatctttgagatcatggagaaagtccagccctggagaaatcccactggctctgccatctgtccactccatc

SEQ ID NO: 118271 - DNA, 1148 bp, Homo sapiens
  Payload ID: 3145
  Gene Symbol: C14orf159
  Gene Name: chromosome 14 open reading frame 159
  ENST ID: ENST00000519994
  CDS Start-End: 215-529
acagtcagcgcttggggctggcctcagcttgtagacccgagccctgcagaacaaccccccgtggcgcaggagagcagaagaaagggggcctttatgcccttttgagggaagcacacattctgcaaggccgtggaaacaaagggaggaactgtttgtagccctcgtccagacgccccaaacaaacaattctctgctacttattcaagttgacacgatgcccttcacactccacctgaggtcccgccttccctctgccataaggagtttgattctacaaaagaaaccaaacatcagaaatacatccagcatggctggagagctccgaccagccagcctggtggtcctgcccaggtcccttgctccagcttttgaaagattctgccaggtcaacactggtcctctacccctgctgggccagagtgagccagaaaagtggatgctgccccctcaaggtgctatctcagagaccagacaacagtgccttgtgttacccatgctggcttctgctgccctctggtggtcacgatgaggcccattcccaaggacaagctggaagggctggtgcgggcctgctgctccctcggaggtgagcaggggcaacctgttcacatgggcgacccagaactgttgggaatcaaagagctttccaaacctgcctacggggatgccatggtgtgtcccccaggggaggttccagtgttctggccttctccgctgaccagtctcggagctgtcagcagctgtgagaccccactggcttttgccagcatcccaggctgcacagttatgactgacctgaaggatgcaaaggctccacctggttgtctcaccccagagagaattccagaggtccatcacatttcccaagatcctctgcactacagcatcgcgtcagtctctgcttctcagaagatcagagaactagagtctatgatcggcatagacccagagatggggtctccctgtgttgaacccctgggttcaaacaatcctccctcctcagtctcccaaagtgttgagattacaggcatgagccaccgctcctggtgctctggggaaccgggggattgggcacctgctctgtaaagatgagctgctgaaggcctctctctcgctgtcccatgcccgctcagtgctcatcaccactg

SEQ ID NO: 118272 - DNA, 909 bp, Homo sapiens
  Payload ID: 3145
  Gene Symbol: C14orf159
  Gene Name: chromosome 14 open reading frame 159
  ENST ID: ENST00000521334
  CDS Start-End: 454-909
agtccgcagctcgtgcttgacagtgaggagctgctctcctccgtcgccgccgtccgcgctggtccccgcggcgccgccgctgctgccaccctcctcctccatcttctcctttttttccgatcccgcgggtcgctacgaggggaacccaggagacagcggacgcccgtcccctcgcagccgctgccgcggccccaggagtcggggtgcggcggctccagaactcggacgcaaagacgagtctctttcccgctctggccgcacggctcgctcctcgcctcctcccccttcggcgggcaccgctagtaccgcgcaaccaaaccgccccctgctccaccgccgcctcctcaggccgctccgcccacagccagcaaggagccaagttacaccctgtttaaccctgccttcaaagggacgactctgtaagattctctgctacttattcaagttgacacgatgcccttcacactccacctgaggtcccgccttccctctgccataaggagtttgattctacaaaagaaaccaaacatcagaaatacatccagcatggctggagagctccgaccagccagcctggtggtcctgcccaggtcccttgctccagcttttgaaagattctgccaggtcaacactggtcctctacccctgctgggccagagtgagccagaaaagtggatgctgccccctcaaggtgctatctcagagaccaggatgggccatccccagttctggaaatacgagttcggtgcctgcaccggcagcctggcttcgctggagcagtactcggagcagctgaaggacatggtggccttcttcctgggctgcagcttctccctggaggaggccttggagaaagcggggctccccagaagagacccagcaggtcacagccaggcgggtgcatacaag

SEQ ID NO: 118273 - DNA, 2719 bp, Homo sapiens
  Payload ID: 3145
  Gene Symbol: C14orf159
  Gene Name: chromosome 14 open reading frame 159
  Uniprot ID: Q7Z3D6
  ENST ID: ENST00000521077
  CDS Start-End: 452-2197
cggatggagctgctacagtcagcgcttggggctggcctcagcttgtagacccgagccctgcagaacaaccccccgtggcgcaggagagcagaagaaagggggcctttatgcccttttgagggaagcacacattctgcaaggccgtggaaacaaagggaggaactgtttgtagccctcgtccagacgccccaaacaaacaatggagaaggaaaggcaagtgacttgtccagagccactctgtcaaaaggggacttgagtcctcagggctgttgactccaaagctgacaagcaggtggcattcttcttcagagcagggcaagtgtaattctggaccaatgtgtgattctgagaccagaccaaccaactgaaggagccaagttacaccctgtttaaccctgccttcaaagggacgactctgtaagattctctgctacttattcaagttgacacgatgcccttcacactccacctgaggtcccgccttccctctgccataaggagtttgattctacaaaagaaaccaaacatcagaaatacatccagcatggctggagagctccgaccagccagcctggtggtcctgcccaggtcccttgctccagcttttgaaagattctgccaggtcaacactggtcctctacccctgctgggccagagtgagccagaaaagtggatgctgccccctcaaggtgctatctcagagaccaggatgggccatccccagttctggaaatacgagttcggtgcctgcaccggcagcctggcttcgctggagcagtactcggagcagctgaaggacatggtggccttcttcctgggctgcagcttctccctggaggaggccttggagaaagcggggctccccagaagagacccagcaggtcacagccaggcgggtgcatacaagacaacagtgccttgtgttacccatgctggcttctgctgccctctggtggtcacgatgaggcccattcccaaggacaagctggaagggctggtgcgggcctgctgctccctcggaggtgagcaggggcaacctgttcacatgggcgacccagaactgttgggaatcaaagagctttccaaacctgcctacggggatgccatggtgtgtcccccaggggaggttccagtgttctggccttctccgctgaccagtctcggagctgtcagcagctgtgagaccccactggcttttgccagcatcccaggctgcacagttatgactgacctgaaggatgcaaaggctccacctggttgtctcaccccagagagaattccagaggtccatcacatttcccaagatcctctgcactacagcatcgcgtcagtctctgcttctcagaagatcagagaactagagtctatgatcggcatagacccagggaaccgggggattgggcacctgctctgtaaagatgagctgctgaaggcctctctctcgctgtcccatgcccgctcagtgctcatcaccactgggttccccacacatttcaatcatgagcctccagaagagacagatggcccaccaggagctgttgctctggttgccttcctgcaggccttggagaaggaggtcgccataatcgttgaccagagagcctggaacttgcaccagaagattgttgaagatgctgttgagcaaggtgttctgaagacgcagatcccgatattaacttaccaaggtggatcagtggaagctgctcaggcattcctgtgcaaaaatggggacccgcagacacctagatttgaccacctggtggccatagagcgtgccggaagagctgctgatggcaattactacaatgcaaggaagatgaacatcaagcacttggttgaccccattgacgatctttttcttgctgcgaagaagattcctggaatctcatcaactggtgtttctaactggggaggctatgccctggcctgcgcactctacatcctgtactcatgtgctgtccacagtcagtacctgaggaaagcagtcggaccctccagggcacctggagatcaggcctggactcaggccctcccgtcggtcattaaggaagaaaaaatgctgggcatcttggtgcagcacaaagtccggagtggcgtctcgggcatcgtgggcatggaggtggatgggctgcccttccacaacacccacgccgagatgatccagaagctggtggacgtcaccacggcacaggtgtaaccgtccatgttccgtgtgagcagagtccctaccaacgggcaggtctgcatccggggagaatgcagctgcttctggcgacaatcctgctagtaaacactggtcttcggtgagcaacgaacactcgcctggcctgggaaactgcatgcccactttctgggaggggttagtgcaggtgctgtggacaaaggacaacatttctctggggctttttaacttttattcctaagactctaaaggcgttgatttcaaccctccttcactctggcttcttcaggcaacccacgtggtctcctgtgagaatcttctcgacagttacttatggggacacttgtgaacaattaactgccaggcagagcatgagaacaaacattcccaggccatgtaggataggatactccagactccagtcatcctcccccatccatggtttctgttactcatggtttcagttactcatagccaactgcagaccgaaaatactaaatgaaaaatttcagaaataaacaactcttaagttttaaa

SEQ ID NO: 118274 - DNA, 834 bp, Homo sapiens
  Payload ID: 3145
  Gene Symbol: C14orf159
  Gene Name: chromosome 14 open reading frame 159
  ENST ID: ENST00000519019
  CDS Start-End: 394-678
caccccaggacaatggcagggcaaaaccagtgagcaaggcagaaaattcctgaaattctccactgaggcccagctgttcctctccttgaaaagtcaaggcttggttcaagccagatagcacctgaggacagaacatatcagatggagaaggaaaggcaagtgacttgtccagagccactctgtcaaaaggggacttgagtcctcagggctgttgactccaaagctgacaagcaggtggcattcttcttcagagcagggcaagtgtaattctggaccaatgtgtgattctgagaccagaccaaccaactgaaggagccaagttacaccctgtttaaccctgccttcaaagggacgactctgtaagattctctgctacttattcaagttgacacgatgcccttcacactccacctgaggtcccgccttccctctgccataaggagtttgattctacaaaagaaaccaaacatcagaaatacatccagcatggctggagagctccgaccagccagcctggtggtcctgcccaggtcccttgctccagcttttgaaagattctgccaggtcaacactggtcctctacccctgctgggccagagtgagccagaaaagtggatgctgccccctcaaggtgctatctcagagaccaggaacgagctgccctccccactgttctgactccttcccctatcacctggcgcctgtcctggctgagatctttgagatcatggagaaagtccagccctggagaaatcccactggctctgccatctgtccactccatcgcccaagccagaaacccgcctgtacaggattaagaagaaaataaaaaac

SEQ ID NO: 118275 - DNA, 853 bp, Homo sapiens
  Payload ID: 3145
  Gene Symbol: C14orf159
  Gene Name: chromosome 14 open reading frame 159
  ENST ID: ENST00000522170
  CDS Start-End: 247-853
gagctcaggctgtgggagcggatggagctgctacagtcagcgcttggggctggcctcagcttgtagacccgagccctgcagaacaaccccccgtggcgcaggagagcagaagaaagggggcctttatgcccttttgagggaagcacacattctgcaaggccgtggaaacaaagggaggaactgtttgtagccctcgtccagacgccccaaacaaacaattctctgctacttattcaagttgacacgatgcccttcacactccacctgaggtcccgccttccctctgccataaggagtttgattctacaaaagaaaccaaacatcagaaatacatccagcatggctggagagctccgaccagccagcctggtggtcctgcccaggtcccttgctccagcttttgaaagattctgccaggtcaacactggtcctctacccctgctgggccagagtgagccagaaaagtggatgctgccccctcaaggtgctatctcagagaccaggatgggccatccccagttctggaaatacgagttcggtgcctgcaccggcagcctggcttcgctggagcagtactcggagcagctgaaggacatggtggccttcttcctgggctgcagcttctccctggaggaggccttggagaaagcggggctccccagaagagacccagcaggtcacagccaggcgggtgcatacaagacaacagtgccttgtgttacccatgctggcttctgctgccctctggtggtcacgatgaggcccattcccaaggacaagctggaagggctggtgcgggcctgctgctccctcggaggtgagcaggggcaacctgttcacatgggcgacccag

SEQ ID NO: 118276 - DNA, 2471 bp, Homo sapiens
  Payload ID: 3145
  Gene Symbol: C14orf159
  Gene Name: chromosome 14 open reading frame 159
  Uniprot ID: Q7Z3D6
  ENST ID: ENST00000525393
  CDS Start-End: 163-1908
caggtggcattcttcttcagagcagggcaagtgtaattctggaccaatgtgtgattctgagaccagaccaaccaactgaaggagccaagttacaccctgtttaaccctgccttcaaagggacgactctgtaagattctctgctacttattcaagttgacacgatgcccttcacactccacctgaggtcccgccttccctctgccataaggagtttgattctacaaaagaaaccaaacatcagaaatacatccagcatggctggagagctccgaccagccagcctggtggtcctgcccaggtcccttgctccagcttttgaaagattctgccaggtcaacactggtcctctacccctgctgggccagagtgagccagaaaagtggatgctgccccctcaaggtgctatctcagagaccaggatgggccatccccagttctggaaatacgagttcggtgcctgcaccggcagcctggcttcgctggagcagtactcggagcagctgaaggacatggtggccttcttcctgggctgcagcttctccctggaggaggccttggagaaagcggggctccccagaagagacccagcaggtcacagccaggcgggtgcatacaagacaacagtgccttgtgttacccatgctggcttctgctgccctctggtggtcacgatgaggcccattcccaaggacaagctggaagggctggtgcgggcctgctgctccctcggaggtgagcaggggcaacctgttcacatgggcgacccagaactgttgggaatcaaagagctttccaaacctgcctacggggatgccatggtgtgtcccccaggggaggttccagtgttctggccttctccgctgaccagtctcggagctgtcagcagctgtgagaccccactggcttttgccagcatcccaggctgcacagttatgactgacctgaaggatgcaaaggctccacctggttgtctcaccccagagagaattccagaggtccatcacatttcccaagatcctctgcactacagcatcgcgtcagtctctgcttctcagaagatcagagaactagagtctatgatcggcatagacccagggaaccgggggattgggcacctgctctgtaaagatgagctgctgaaggcctctctctcgctgtcccatgcccgctcagtgctcatcaccactgggttccccacacatttcaatcatgagcctccagaagagacagatggcccaccaggagctgttgctctggttgccttcctgcaggccttggagaaggaggtcgccataatcgttgaccagagagcctggaacttgcaccagaagattgttgaagatgctgttgagcaaggtgttctgaagacgcagatcccgatattaacttaccaaggtggatcagtggaagctgctcaggcattcctgtgcaaaaatggggacccgcagacacctagatttgaccacctggtggccatagagcgtgccggaagagctgctgatggcaattactacaatgcaaggaagatgaacatcaagcacttggttgaccccattgacgatctttttcttgctgcgaagaagattcctggaatctcatcaactggtgtttctaactggggaggctatgccctggcctgcgcactctacatcctgtactcatgtgctgtccacagtcagtacctgaggaaagcagtcggaccctccagggcacctggagatcaggcctggactcaggccctcccgtcggtcattaaggaagaaaaaatgctgggcatcttggtgcagcacaaagtccggagtggcgtctcgggcatcgtgggcatggaggtggatgggctgcccttccacaacacccacgccgagatgatccagaagctggtggacgtcaccacggcacaggtgtaaccgtccatgttccgtgtgagcagagtccctaccaacgggcaggtctgcatccggggagaatgcagctgcttctggcgacaatcctgctagtaaacactggtcttcggtgagcaacgaacactcgcctggcctgggaaactgcatgcccactttctgggaggggttagtgcaggtgctgtggacaaaggacaacatttctctggggctttttaacttttattcctaagactctaaaggcgttgatttcaaccctccttcactctggcttcttcaggcaacccacgtggtctcctgtgagaatcttctcgacagttacttatggggacacttgtgaacaattaactgccaggcagagcatgagaacaaacattcccaggccatgtaggataggatactccagactccagtcatcctcccccatccatggtttctgttactcatggtttcagttactcatagccaactgcagaccgaaaatactaaatgaaaaatttcagaaataaacaactcttaagttttaaattgtgtactcttcggaatatcgtgatgaaatctcacaccat

SEQ ID NO: 118277 - DNA, 7075 bp, Homo sapiens
  Payload ID: 3146
  Gene Symbol: C14orf166
  Gene Name: chromosome 14 open reading frame 166
  Uniprot ID: Q9Y224
  ENST ID: ENST00000261700
  CDS Start-End: 166-900
gcggccaccgcttttaagccacgattggcgaaggccgccgtcatttcggagcgactcagcgcctgcccgccctctcgccgcgtcgccggtgcctgcgcctcccgctccacctcgcttcttctctcccggccgaggcccgggggaccagagcgagaagcggggaccatgttccgacgcaagttgacggctctcgactaccacaaccccgccggcttcaactgcaaagatgaaacagaatttagaaacttcatcgtttggcttgaagaccagaaaatcaggcactacaagattgaagacagagggaatttaagaaacatccacagcagcgactggcccaagttctttgaaaagtatctcagagatgttaactgtcctttcaagattcaagatcgacaagaagctattgactggcttcttggtttagctgttagacttgaatatggagataatgctgaaaaatacaaggatttagtacctgataattcaaaaactgctgacaatgcaactaaaaatgcagaaccattgatcaatttggatgtaaataatcctgattttaaggctggtgtgatggctttggctaacctgcttcagattcagcgtcatgatgattacctggtaatgcttaaggcaattcggattttggttcaggagcgcctgacacaggatgcagttgctaaggcaaatcaaacaaaagagggcttacctgttgctttagacaaacatattcttggttttgacacaggagatgcagttcttaatgaagctgctcaaattctgcgattgctgcacatagaggagctcagagagctacagacaaaaatcaacgaagccatagtagctgttcaggcaattattgctgatccaaagacagaccacagactgggaaaagttggaagatgaacacttgaggacttcagcttctcacctacttagtacagttgggaaccatacacttctggcatgtttggaaatcaaaatgtcacattctcgggggaggaagcccagaaaattgggtatgttctagagatttaccaccattgcttattgcttttttctttaataaagtttaggaaagtagaatttttattatgtactgtatgtttgcataaatcacctttctcctttgtggttaaggcatatatgccaacccccagctttgtcctagagacaatatagatccttaagtcataggaaaacttaaaacactttattggagtaatctagaaaattttaaaattgttacatctttggtatttataaatgtgatactttactttctgtgggtacttctatagaggcactacaggatcagaaaatgcaaattgaatcattttagcaccttttgatataaatagaaatgcactgatgcagaggtaaaaaatcttagaacttttgttgggaaactataaataattggtcctttcccatcagttctgcattggcttctccaactgtcaaggtttaggattatattgttatattgatcacatgtgctttaatttcttggccagaaggaatccatggcaaaaatcaggtttagagtcttaaactctaattcttagttgaatgaatttgatcttttaaatattaatgataaatgtttacaagaagttgctttaataagcaacagttaaaattctgttacctttttaaacttgcaataacaaccttcatttttaaaaatacagtagtaaagattgaggtatcagcttttcacaaaagtctttttgcactacaaaatgttcatcttggatgctcaggaacgtctaatggccaattccttttttactttctttgcctttgcagtcactgttctttagggtccaggttctgattgtaaactccaagtcttcctttacattactgtacttactttcttcctgtgagagaagagcaggggtgggacagggtggtgggtgagtatattgtaaccaagttgcaacagcaagtctttgcattttgtgtataaactaggtagatttaaggtagtaaagactggccctcagggcaggaagaaggcaatggtggcagtgtcacaggcagcaggggtaatcaaataccatatatatcccttctctaccctgctaatttaaaggagcatcctaaagcatactttttacctgttgggcagtaggggtagactgcagttatcccgtagaggtgagatcgttgttctgggagatactcatcagtaaactggccactatgtttatttactgatacaacaccatccctggtaacagaaaggaagagtgaattcagggacagtcatttactagataaagaagtcagtcagccacagaaaatcagttgcaatagaggaaaatttctggcagccttctctgtcccagggctggtgctaaagccatactgaagtttgaagaccattgctctaaatccattgctcatctctagctgcatgttagaatcacatgatgagctatcaaatcagagttgtagggcatggtgtaaagggcttagactttaatgttccacagttcctcatttgagaactagtctaaatagtatttttcggtccctcagacaatatgtccacagtgtcaaaagccaacttaagccctgtaatatagctcatggtatcaagggtagtcttattctctaaagaacatatttagattaatatgctcccttttgagacattatccaatagctttgctactttttaagctatatgtgagcaataccattcgatttctgggtgaagtaaaaggatgatttcaaaaacatgaaaggatgaaaaacatccttgaaggatcttatctgccaatgaggaggtgatgaaacaaaagcctcagagggcttaatgagtcaagtcaggtactgacttttggtaaaacaagtggtgtgtcctctggaacagttggccttttcaggcttgtccagaatttgtggggctcacctcctccagtctgtgtggtagaagtgatctgcatagcttacgatgctgaaggggtacttgaggttgttttgaatgacacgccgtccagttccatcaggtagtgtacactccagttttttggttccttttaaaacaaagggggaaaatgaggtccttcagctgctttgccaaaaatgatagtgacatagtgatagtgacacagtgatagaatggggaaataggatattttacttccattacagtcatagattagcaactgtaaaattacctgtcctattactagtctccagtttttagtagagattcaaactttcaatccttttttggaagacaggattgcatttactgaaatctggtaagtttctgccaaagtagggcattaaacataattatttttataatttgtgtgatttcaagccttagcttataaattataacatctgggtaaatacttgccctttgtaagctatgtctataattactgaggcaaccttttaaccaaaatccttagtatttttaaaatattttctaggtaggaggaaaaaagtgactaaaatggtaacataactcatatttcaatgtaaaggaatcagtcttaaaaatttttacaatagctaaaccattcaagaatttccaagtttcacatttctcatggagccgatttaaatttcaaatccttttaagaaatgtaacttgttttaaacaactgggttataaaagtgacctatgtacattaggcccttttattagattacaaattcaagaacagtctttttcatattctttagtatagaactagacacacagcattttttcagttgtgctgataaaagcaaacaaatgtaggttgctaatacccatgttattactgaaggaagctaccctgctacaatgctttccaaagaatgtccttagcattataacagatgtttataggtaagttatagtgaccctctccccgcataagaataacttcacttaagtttgtcaattcaacaatggctaattcttttaactgttaaaaatatgccaggcactcatggtcaggcaagcagtacaaacttactgcttgatatatccttccctccacccaaaccccagaaagttcattttaagactcatttactagtacttaaatttactagtacttaaaagtttacagaccaaagaaaggagatctaagtgatgggatttcattttgtagtaaaatctgttagtgctcacattcactgtgatgagaggttatctatttgcattccatcagtagtattacctgcatctgcccagcagagcagtttagagaaagggtcaaaggttaagccattgggcaatccaatgtctgtattgatcagaattcttctgttttctccatctaaagatgacgtttcaattttaggagcttctctattccagtctgtccagtacaagttgctgtaagttaaaaatcaagattgtaaaagaatagccatgtagcctgtggtaggcagcatctaagcagcccccagtgatctccatctcctcatgtattatagccttaagcaatccccttgagtttgggctgcattagtagtgtcttgcttcttctagtgcatagagtatagcagaagtgataggctatcactgccgatattcggtctcaaaaaactggtttctgccttaggggctctctcttgctccctttgagggaagctggatgccatgttgcaagctaccctgtaaaggggaacatgtgccaaggaactgatgtccttgagggctgttggccagagacattagtcttgcctgtagcccatgtgagcatgcttgggctgtgtcttccccgagctgagccttgtgatcactgcagtttggccattacctgattgcagccttgtgagagactccatgcctgagggagctcggtgaagacacacttggattcctgactcacagaaactgtgagactaaatgttatcttacactgctgagggtttgggcaatttcttacacagcagtaggtaactaatacacagccatattccacttttacctgtatcacaaggttttctgattattgtcactatgtgggagaagtcattactaagttactatcagaatccctgcctccaagataccccttgactcaactgccccaaaaccctccgtttgttgaagtcttgaattggatcttgggttttagaatagaaacaaatacagctgttaggaatggcttcgatacaaactatggaacttgaagagatgtggaccagggatttgagaaggaaactgttctttcttctgccaaaaatacaatttggtacttgaaggggtacctggcacccagggatggaaacattttaagttaagcactttaccttttaaatgccacgttaaaaatgaaatatattcataacagatactaacgaggaaatatggtcctattaagtggaaataggttataaggaaacaaacaggtttatcgttagagcagaaataatgttgaaagcactttttataaaatactattttataaaagctatagaagctttgaataaatcagttgggctacagagaacctcagtgagaggagaggaagaaaccataggtttcccctgttgcgaatttcatcccttatgcccaacagatgaagcagagagaagctgagagcaaaagctagaaagcagtttccactttgcgctaaggtggaggtggccagagggtacagcatgcatatcattgcttcatcgcttctgatcagtctcctccccaaaatgatttaatatcatcaacaacaataagtctgaaacaagctcacacagatatttggtgtaaattatttggggattgccagaggaagaaagttgtaaaggtgaaatctatagaaagcaaatgagaaatatgcaggaaggcttgacaaccattctgttacgcagttgaaggagatgtaattacatgtgttatattgcaacctggttcaaggtgggttttctttttattaaaaattcaagtcctttagcatttatatttgctgtctggataagaaagttctactttcatatttaaactcatggctgtgatgtggatttcagcttaaaagtatgctttttccccagactccagagacatggccaaagtttcattgcctacaagatggcagctctccccagttttcaggtcaagcaccaagaaggaataaggggccgggcgcagtggctcatacctataatcccagcactttgggaggccaaggcaggtggatcacccagggtcaggagttggagaccaaaatggcgaaaccctgtctcgactaaaaatacaaaaattagctgggcatggtggcacatgcctgtagtcccagctacttgggaggctgaggcaggagaattgcttgaacccgggagatggaggttgtagtcagccgagactgtgccactgcaccccagcctcggcaacaaagcaagaccttgtctcaaaaaaaagaaaaaaaaaagaaaaaaggaccttccaaatgtccaaatgtcagaaaggcaagcctatgcaaagagtttttaagagggctattaattcctgttaagtcaactggaatagagaaggatacaggtacttttcctgtgtgtagaacccaaagtttgaaaccacctttgaggcactgcactaagtatttcatagtcaaaaagcacttacctgaaaattaaagctgaaggttttctttactgatttgaagggcatctgggaatttcatttcgtagaaactccacttaaacatggcaagagtttctcaagatataaaaattctccctgattgtaacaagtactgagacagtgaacaaatcctgtatgtcacatttgatgaccttagcaattatacagacagggaaaatgtttatcttgatttctgctacagcaacactgaagccagaggtgtctgagctttggctaatgtcacttgatgtaggtcagccctactgtgagcgtcaaccctggtttctaaatgtgctgctggaggaatcccacttcacttccagtttaagtgtcagctgaggcctcgcctgatcatttgattcagagtagccctagttctcacaacactatctgaattttctacatatcacatcacagactaatattgtttataccagtcttgtttcctcctaataaaatataagtgccatgaaa

SEQ ID NO: 118278 - DNA, 683 bp, Homo sapiens
  Payload ID: 3146
  Gene Symbol: C14orf166
  Gene Name: chromosome 14 open reading frame 166
  ENST ID: ENST00000553362
  CDS Start-End: 1-390
ctcagagatgttaactgtcctttcaagattcaagatcgacaagaagctattgactggcttcttggtttagctgttagacttgaatatggagataatgctgaaaaatacaaggatttagtacctgataattcaaaaactgctgacaatgcaactaaaaatgcagaaccattgatcaatttggatgtaaataatcctgattttaaggctggtgtgatggctttggctaacctgcttcagattcagcgtcatgatgattacctggtaatgcttaaggcaattcggattttggttcaggagcgcctgacacaggatgcagttgctaaggcaaatcaaacaaaagagatgcagttcttaatgaagctgctcaaattctgcgattgctgcacatagaggagctcagagagctacagacaaaaatcaacgaagccatagtagctgttcaggcaattattgctgatccaaagacagaccacagactgggaaaagttggaagatgaacacttgaggacttcagcttctcacctacttagtacagttgggaaccatacacttctggcatgtttggaaatcaaaatgtcacattctcgggggaggaagcccagaaaattgggtatgttctagagatttaccaccattgcttattgcttttttctttaataaagtttaggaaagtagaattttta

SEQ ID NO: 118279 - DNA, 851 bp, Homo sapiens
  Payload ID: 3146
  Gene Symbol: C14orf166
  Gene Name: chromosome 14 open reading frame 166
  ENST ID: ENST00000556760
  CDS Start-End: 26-607
gggaccagagcgagaagcggggaccatgttccgacgcaagttgacggctctcgactaccacaaccccgccggcttcaactgcaaagatgaaacagaatttagaaacttcatcgtttggcttgaagaccagaaaatcaggcactacaagattgaagacagagggaatttaagaaacatccacagcagcgactggcccaagttctttgaaaagtatctcagagatgttaactgtcctttcaagattcaagatcgacaagaagctattgactggcttcttggtttagctgttagacttgaatatggagataatgctgaaaaatacaaggatttagtacctgataattcaaaaactgctgacaatgcaactaaaaatgcagaaccattgatcaatttggatgtaaataatcctgattttaaggctggtgtgatggctttggctaacctgcttcagattcagcgtcatgatgattacctggtaatgcttaaggcaattcggattttggttcaggagcgcctgacacaggatgcagttgctaaggcaaatcaaacaaaagaggagatgcagttcttaatgaagctgctcaaattctgcgattgctgcacatagaggagctcagagagctacagacaaaaatcaacgaagccatagtagctgttcaggcaattattgctgatccaaagacagaccacagactgggaaaagttggaagatgaacacttgaggacttcagcttctcacctacttagtacagttgggaaccatacacttctggcatgtttggaaatcaaaatgtcacattctcgggggaggaagcccagaaaattgggtatgttctagagatttaccacca

SEQ ID NO: 118280 - DNA, 557 bp, Homo sapiens
  Payload ID: 3146
  Gene Symbol: C14orf166
  Gene Name: chromosome 14 open reading frame 166
  ENST ID: ENST00000557553
  CDS Start-End: 127-333
gtcatttcggagcgactcagcgcctgcccgccctctcgccgcgtcgccggtgcctgcgcctcccgctccacctcgcttcttctctcccggccgaggcccgggggaccagagcgagaagcggggaccatgttccgacgcaagttgacggctctcgactaccacaaccccgccggcttcaactgcaaagatgaaacagaatttagaaacttcatcgtttggcttgaagaccagaaaatcaggcactacaagattgaagacagagggaatttaagaaacatccacagcagcgactggcccaagttctttgaaaagctgaaaaatacaaggatttagtacctgataattcaaaaactgctgacaatgcaactaaaaatgcagaaccattgatcaatttggatgtaaataatcctgattttaaggctggtgtgatggctttggctaacctgcttcagattcagcgtcatgatgattacctggtaatgcttaaggcaattcggattttggttcaggagcgcctgacacaggatgcagttgctaaggcaaatcaaacaaaagag

SEQ ID NO: 118281 - DNA, 2429 bp, Homo sapiens
  Payload ID: 3147
  Gene Symbol: C14orf169
  Gene Name: chromosome 14 open reading frame 169
  Uniprot ID: Q9H6W3
  ENST ID: ENST00000304061
  CDS Start-End: 55-1980
cgctttagcttcgcccccggccggccgggcggggaagactggtgtggtctggccatggatgggctccaggccagtgcagggccgttgaggcgcgggcggccgaagcgccggcgcaagccccagccacacagcgggtcggtcctggccctgcccttgaggtccaggaagatacgaaagcagctgcgaagtgttgtatcccgcatggcagcgctgaggacgcagacgctgcctagcgagaactcggaggaatcgagggtggagtcgacggccgacgacctgggggacgcgctacccggtggggcggcggtggcggccgtcccggacgcagcccggcgagagccatacggccacctggggcccgcagagctgctggaggcctcgcccgccgcgcgctccctgcagaccccgtcggcgcgcctggtgcccgcttccgcgccgcccgcgcgcctggtggaggtgcccgccgcgccggtccgggtggtggagacctcggccctgctgtgcaccgcgcaacacttagcggccgtccagtcgtccggggcccctgcgacggcgtcggggccgcaggtggataacacgggtggggagccggcctgggactccccgctgcggcgcgtcttggccgagctgaaccgcatccccagcagccggcggcgagcggcccgcctctttgagtggctcatcgcgcccatgccgccagatcacttttaccggcgcctatgggagcgcgaggcggtgctggtgcggcggcaggaccacacctactaccagggacttttctctaccgctgacctggattcgatgctgcgcaacgaggaggtgcagttcggccagcatttggacgccgctcgctacatcaacggacgacgcgagaccctgaacccacccggccgcgcgctgcccgccgccgcgtggtccctgtaccaggccggctgctccctgcgtctcctctgtccgcaggctttctctactactgtgtggcagtttttggctgtgcttcaagagcagtttggaagcatggcaggctccaacgtttacctcacgccccctaactcgcagggctttgccccccactacgacgacatcgaggccttcgtgctgcagctggaaggtaggaaactctggcgtgtataccgaccccgagtcccaaccgaggaactggctctgacatccagccccaacttcagtcaggacgacctcggtgagccggtgctgcagaccgtgctggaacctggagatttgctgtattttcctcggggcttcattcaccaagctgaatgccaggatggagtccactctctgcacctcaccttgtccacgtaccagcgcaatacctggggtgacttcttagaggccatactgcctctggcagtgcaggctgcaatggaagaaaatgtggagtttcggaggggtctgccccgagacttcatggattacatgggggcccagcattcagattctaaggatccgcgaagaaccgctttcatggagaaggtgcgggtcttggttgcccgcctgggacactttgctcctgttgatgctgtggccgaccagcgagccaaagacttcattcacgattctctgccccctgttttgactgatagggagagggcactaagtgtttacgggcttccaattcgctgggaggctggagaacctgtaaacgtgggggcccagttgacaacagaaacagaagtccatatgcttcaggatgggatagctcggctggtgggtgaggggggccatttgtttctctattacacagtggaaaactcccgtgtgtatcatctggaagaacccaagtgcttggaaatatacccccagcaagctgatgccatggaactgttgcttggttcttatccagagtttgtgagagtgggggacctgccctgtgacagtgtggaggaccagctgtccttggcaaccacgttgtatgataaggggctgctgctcactaagatgcctctagccctaaattagtttcttgttgattgctggaaacaaggcagtagtgattctccgctgccactgctaccttttttttttttttttccttaaactcacgttcttaccttgataagcatcagtgtgctcacatttacctttatcactgcttcagtgtcacaaacctcggaaggtcttctaggaagaaccatctcatctaggtacaaaaggaaaaggagaagttggaggtggaaaaaaaacccttgatccgtgatcatttcagagcaccaacttcatcaccttcaggcttcagtgtactgggtaacactgaccatgtcgttctgcttgagacagatattagattttttttggaatttggatctttcatctgagttctttttcatgggcgggtcggggtcagtatcctgtttgttattgttaaatttgtatgaaccttagaaaagttattaaagtgccaaagaatg

SEQ ID NO: 118282 - DNA, 1284 bp, Homo sapiens
  Payload ID: 3148
  Gene Symbol: C14orf177
  Gene Name: chromosome 14 open reading frame 177
  Uniprot ID: Q52M58
  ENST ID: ENST00000325812
  CDS Start-End: 420-797
aagatgcattatcatggctgtaaacacaggttctgcacgtgtctaagttcagccccaaacccacatgaagaacttatttccagacagctcctactcttatggtggctccagaccctgccccatgcagaaggcacttctcaagttccaggaccagggcttcagccacagcactcgcaaaaccccacagatacagtgccaatgacagaaattaagattaactgggggcgacacagatttctgtgaatgccagtgctgtcagatgcttcctgatagtactttctagagtaaaagaacttcgggaaaagtaaaagcagcaaatggtaacaccctcatggagatctcagggtgtagaggcaagcactgaaggcccatgatcagccgtgggagccacgggaatcaattgcttccagtacgactggatgcatcggaaagagcctggggcaaggctggaggccacaagaggagctgccaggccacataagcagggaacaaagccgatgatcacacgcccatcagtgagccaacttggtgaagggaaatgcccaagttctcagcacctgcagagcctaagacataacaagcagcatgccctgacgctcaccaaggccaggtgctgtggtgagtgctctacctgtttctgtacagaagagaaatcagaatgccagagacatgaagaaacttctccagggtcatgtaatcaccaaataatgtctgcttcgaccatctctgcattttgtgctacaccaagatttaagcagctgttcaaaggaactgtagaacagatgtcacagatgtaactattcttgaaaggaagtcagatttcatagatggaaagactgcccttttccatttgcctcctccagacccataactttggataggggggttttattgtccgtgaggcttatgcatatgtcagaagaatgtccaagcagaggaatctaagtggcagaccccccaggataggaaagaagaaggacgctcgtgctgacacttccagaacactcttcacgttttgtgacatatgtgcttgtcgagtgatcttaagacagctggatgtccgaaccatgcagtaatagcagagaacctgcggaaggagaagcttcccaggacgttctgagggcttatgccgggtgcaggctttccttcccgcaacatccctgagtccagagaagaaataatcccctgccctgtgggccaagcacttacagcaacagcactttgagtttgctgtgcttagattcacttgtggaacttgttaaaaatataaaattccagacccca

SEQ ID NO: 118283 - DNA, 467 bp, Homo sapiens
  Payload ID: 3148
  Gene Symbol: C14orf177
  Gene Name: chromosome 14 open reading frame 177
  ENST ID: ENST00000541516
  CDS Start-End: 243-467
attatcatggctgtaaacacaggttctgcacgtgtctaagttcagccccaaacccacatgaagaacttatttccagacagctcctactcttatggtggctccagaccctgccccatgcagaaggcacttctcaagttccaggaccagggcttcagccacagcactcgggtgtagaggcaagcactgaaggcccatgatcagccgtgggagccacgggaatcaattgcttccagtacgactggatgcatcggaaagagcctggggcaaggctggaggccacaagaggagctgccaggccacataagcagggaacaaagccgatgatcacacgcccatcagtgagccaacttggtgaagggaaatgcccaagttctcagcacctgcagagcctaagacataacaagcagcatgccctgacgctcaccaaggccaggtgctgtggtgagtgctctacctgtttctgtaca

SEQ ID NO: 118284 - DNA, 642 bp, Homo sapiens
  Payload ID: 3149
  Gene Symbol: C14orf178
  Gene Name: chromosome 14 open reading frame 178
  Uniprot ID: Q8N769
  ENST ID: ENST00000355883
  CDS Start-End: 210-578
caagatgctcacgcgaaaaacccactcttcagtgtctgagaccactccgcagctttcggcctcggtgagcgggtgaactaaacccgggaaaccgctgaaagaccccagcttcgactaggcctagtcgtagcggcggccagcgggagggcgtagccgtagtcttggcccacgtcattctgtgccccgggtcaggtcaccgcccggagggtatgggaagagaaatgaagaagactggtactcccagacccttccgtatcgaggaccccaatcaacaacccacctggcatgatcaaccagagatggggtcccactattttgcccaggctggtcttgaactgctgggctcaagcaatcctcctgcctcagcctcccaaagtgctgggattacaggtgtgagccactgtgcccggcccggagaacatgatcttaaccatactgtcttccaagtgaaagattctacctttctaagacatctggagtcagacagacctgagttcaagtcgtgccttcctccccactttactgaaccttcagtgagtctttctacctcagaaggctgtgaggatgccatggggtaatgaatgtaaagtgtttaagtgcttggctgacactgagtactaaataaatatcaatttattcttc

SEQ ID NO: 118285 - DNA, 632 bp, Homo sapiens
  Payload ID: 3149
  Gene Symbol: C14orf178
  Gene Name: chromosome 14 open reading frame 178
  ENST ID: ENST00000439131
  CDS Start-End: 290-568
cccgcaagatgctcacgcgaaaaacccactcttcagtgtctgagaccactccgcagctttcggcctcggtgagcgggtgaactaaacccgggaaaccgctgaaagaccccagcttcgactaggcctagtcgtagcggcggccagcgggagggcgtagccgtagtcttggcccacgtcattctgtgccccgggtcaggtcaccgcccggagggtatgggaagagaaatgaagaagactggtactcccagacccttccgtatcgaggaccccaatcaacaacccacctgagatggggtcccactattttgcccaggctggtcttgaactgctgggctcaagcaatcctcctgcctcagcctcccaaagtgctgggattacaggtgtgagccactgtgcccggcccggagaacatgatcttaaccatactgtcttccaagtgaaagattctacctttctaagacatctggagtcagacagacctgagttcaagtcgtgccttcctccccactttactgaaccttcagtgagtctttctacctcagaaggctgtgaggatgccatggggtaatgaatgtaaagtgtttaagtgcttggctgacactgagtactaaataaatatcaatttattcttc

SEQ ID NO: 118286 - DNA, 474 bp, Homo sapiens
  Payload ID: 3149
  Gene Symbol: C14orf178
  Gene Name: chromosome 14 open reading frame 178
  Uniprot ID: Q8N769
  ENST ID: ENST00000557011
  CDS Start-End: 70-144
cgggagggcgtagccgtagtcttggcccacgtcattctgtgccccgggtcaggtcaccgcccggagggtatgggaagagaaatgaagaagactggtactcccagacccttccgtatcgaggaccccaatcaacaacccacctgagatggggtcccactattttgcccaggctggtcttgaactgctgggctcaagcaatcctcctgcctcagcctcccaaagtgctgggattacaggtgtgagccactgtgcccggcccggagaacatgatcttaaccatactgtcttccaagtgaaagattctacctttctaagacatctggagtcagacagacctgagttcaagtcgtgccttcctccccactttactgaaccttcagtgagtctttctacctcagaaggctgtgaggatgccatggggtaatgaatgtaaagtgtttaagtgcttggctgacactgagtactaaataaata

SEQ ID NO: 118287 - DNA, 546 bp, Homo sapiens
  Payload ID: 3149
  Gene Symbol: C14orf178
  Gene Name: chromosome 14 open reading frame 178
  Uniprot ID: Q8N769
  ENST ID: ENST00000556047
  CDS Start-End: 70-183
cgggagggcgtagccgtagtcttggcccacgtcattctgtgccccgggtcaggtcaccgcccggagggtatgggaagagaaatgaagaagactggtactcccagacccttccgtatcgaggaccccaatcaacaacccacctggcatgatcaaccaggtacagaatcagttttttggctgtagatgatttaagagttagggtcaacttgtctttgagatggggtcccactattttgcccaggctggtcttgaactgctgggctcaagcaatcctcctgcctcagcctcccaaagtgctgggattacaggtgtgagccactgtgcccggcccggagaacatgatcttaaccatactgtcttccaagtgaaagattctacctttctaagacatctggagtcagacagacctgagttcaagtcgtgccttcctccccactttactgaaccttcagtgagtctttctacctcagaaggctgtgaggatgccatggggtaatgaatgtaaagtgtttaagtgcttggctgacactgagtactaaataaata

SEQ ID NO: 118288 - DNA, 1455 bp, Homo sapiens
  Payload ID: 3150
  Gene Symbol: C14orf180
  Gene Name: chromosome 14 open reading frame 180
  ENST ID: ENST00000331952
  CDS Start-End: 257-790
acaacagacccggccctgccagcgggcggtggcgcctccagatcagagccctcgggaaggaggcctgggcgggcctggcccgttcacctgtgtgccctgcagttctgcccgaggctcaactctcaagggcctgggaggggtgctgccggccaagagggtccaggacctcactggactgtgccccacagggagatcccgaagagcctgtttctgtccctcggggagccaggagggaaccaggaccatgttccagtaaatgaggactgcagcaggagccgtgagccctgactcccggccagagacacgacgtcagaccagaaagaatgaggaggccgcgtggggcccgcgggtgtgcagggcagagagggaggacaacaggaagtgccccccctccatcctgaaacggagccggccggagcaccaccgcccagaggccaagccccagaggacctcgaggcgcgtgtggttccgagaacccccagcggtgaccgtccactacattgctgacaagaacgccacagccactgtcagggctgtgtgtgtgcgtcctgctcgtgctggccctgggcctatactgcggccgggccaagcccgtggcaacggcactggaggacctgcgggcccggctcctcggccttgtcctgcacctgcggcacgtggccctcacctgctggcgcggcctcctgcggctctgacgggcaggacgggcaggacgggcagggcttccaggagagctcaagcactccgggggctccgagacagcctgagccctggccctgctgcttggtgaatcatgggggccaaaaggggctgctgcctgagggctaactaggaaaagggggaccccgtggcgtgagatcggacatggggggcacagcaggcggccccgccacactagtcagcacagccctcctgtctcctgtgttgggtccatgtgagattttattagaaagaggattcgactgctaacagttgaggctccccaggctcacccaaagacccctccctcgtcccagcaggaactcctgctgctgctagggcctggcccggccatcaccgtgtgcaccctcttgaggagggggacacactgcccgtgttcaaggggctgctcggaggaggcaaacccagccttttgcgattatggcttgtggggaatccagacctcgaaaccccacggggagggaagggtctggttgtcaaggtgggtccctttgatgtgaggtgccatcctctgagcccaggtctgacccccctacccagccccgtgagtctggagaggccccagggaaggacccctcatcaggggcggcttcaggtgtagaagccgaggggacagcaaggggcccagacacccccgaccttcagaacagccatctgtgcccagctctgcaggccaggcacacccagctgagcccggggccagccagcaccacccaccagctggggcctgtgggt

SEQ ID NO: 118289 - DNA, 2009 bp, Homo sapiens
  Payload ID: 3150
  Gene Symbol: C14orf180
  Gene Name: chromosome 14 open reading frame 180
  Uniprot ID: Q8N912
  ENST ID: ENST00000410013
  CDS Start-End: 502-984
gttccagtggtgagcgttgggctgggagccaaggcttttcccaggagcccagccaccccgcctggctgtgttctgcctccgccctgcagaggaaaggccagcgaggcagtgtccatggtcccagtcttcttccaccggaagaaggcacaacctgcatctgcagccccagggccattgggttaggcctgtggccaaactactaaggtgctgggagactgaggaggcccagctcctcctggggccaccaagcccgtggttgacggcctccccatggaccgggctgtcccgagagcagcaagtcagccggggccctcagggccgctgaggccactgctcagtgtcgccgtaatggaaacttctcagctggttgtgagccgcaacagctctggttcacaccctgcgacagcgaggctgtgaccgccagtggatctcggggctgatcaggcctgagccaccccggaggtacagcaccagcaggagcccaggaccatgttccagtaaatgaggactgcagcaggagccgtgagccctgactcccggccagagacacgacgtcagaccagaaagaatgaggaggccgcgtggggcccgcgggtgtgcagggcagagagggaggacaacaggaagtgccccccctccatcctgaaacggagccggccggagcaccaccgcccagaggccaagccccagaggacctcgaggcgcgtgtggttccgagaacccccagcggtgaccgtccactacattgctgacaagaacgccacagccactgtcagggtgcccggccggcccaggccacacggcggctccctgctcctgcagctgtgtgtgtgcgtcctgctcgtgctggccctgggcctatactgcggccgggccaagcccgtggcaacggcactggaggacctgcgggcccggctcctcggccttgtcctgcacctgcggcacgtggccctcacctgctggcgcggcctcctgcggctctgacgggcaggacgggcaggacgggcagggcttccaggagagctcaagcactccgggggctccgagacagcctgagccctggccctgctgcttggtgaatcatgggggccaaaaggggctgctgcctgagggctaactaggaaaagggggaccccgtggcgtgagatcggacatggggggcacagcaggcggccccgccacactagtcagcacagccctcctgtctcctgtgttgggtccatgtgagattttattagaaagaggattcgactgctaacagttgaggctccccaggctcacccaaagacccctccctcgtcccagcaggaactcctgctgctgctagggcctggcccggccatcaccgtgtgcaccctcttgaggagggggacacactgcccgtgttcaaggggctgctcggaggaggcaaacccagccttttgcgattatggcttgtggggaatccagacctcgaaaccccacggggagggaagggtctggttgtcaaggtgggtccctttgatgtgaggtgccatcctctgagcccaggtctgacccccctacccagccccgtgagtctggagaggccccagggaaggacccctcatcaggggcggcttcaggtgtagaagccgaggggacagcaaggggcccagacacccccgaccttcagaacagccatctgtgcccagctctgcaggccaggcacacccagctgagcccggggccagccagcaccacccaccagctggggcctgtgggtcccggagaccgtctgtggttgtggctttgtcgccggattgcagagctgaagggagccctgtggatgacaaacaccaggggcctctccagaccctacgtggggggagggctgaacaaagcagggaggcccacggttagacaccaggcagaactgcccaggagagacacagggacaatcagaccagcgtcctcgaggttagcctgaggcgggtgggcacggccgaccatccacccggtggttcctgtttgtcccaccacttaactgg

SEQ ID NO: 118290 - DNA, 2551 bp, Homo sapiens
  Payload ID: 3150
  Gene Symbol: C14orf180
  Gene Name: chromosome 14 open reading frame 180
  Uniprot ID: Q8N912
  ENST ID: ENST00000557649
  CDS Start-End: 337-819
agaggtaattatagcctggccgctgccagctggcccagctttgcgatccagcagagagggctggagacgggacgaaggccacaacagacccggccctgccagcgggcggtggcgcctccagatcagagccctcgggaaggaggcctgggcgggcctggcccgttcacctgtgtgccctgcagttctgcccgaggctcaactctcaagggcctgggaggggtgctgccggccaagagggtccaggacctcactggactgtgccccacagggagatcccgaagagcctgtttctgtccctcggggagccaggagggaaccaggaccatgttccagtaaatgaggactgcagcaggagccgtgagccctgactcccggccagagacacgacgtcagaccagaaagaatgaggaggccgcgtggggcccgcgggtgtgcagggcagagagggaggacaacaggaagtgccccccctccatcctgaaacggagccggccggagcaccaccgcccagaggccaagccccagaggacctcgaggcgcgtgtggttccgagaacccccagcggtgaccgtccactacattgctgacaagaacgccacagccactgtcagggtgcccggccggcccaggccacacggcggctccctgctcctgcagctgtgtgtgtgcgtcctgctcgtgctggccctgggcctatactgcggccgggccaagcccgtggcaacggcactggaggacctgcgggcccggctcctcggccttgtcctgcacctgcggcacgtggccctcacctgctggcgcggcctcctgcggctctgacgggcaggacgggcaggacgggcagggcttccaggagagctcaagcactccgggggctccgagacagcctgagccctggccctgctgcttggtgaatcatgggggccaaaaggggctgctgcctgagggctaactaggaaaagggggaccccgtggcgtgagatcggacatggggggcacagcaggcggccccgccacactagtcagcacagccctcctgtctcctgtgttgggtccatgtgagattttattagaaagaggattcgactgctaacagttgaggctccccaggctcacccaaagacccctccctcgtcccagcaggaactcctgctgctgctagggcctggcccggccatcaccgtgtgcaccctcttgaggagggggacacactgcccgtgttcaaggggctgctcggaggaggcaaacccagccttttgcgattatggcttgtggggaatccagacctcgaaaccccacggggagggaagggtctggttgtcaaggtgggtccctttgatgtgaggtgccatcctctgagcccaggtctgacccccctacccagccccgtgagtctggagaggccccagggaaggacccctcatcaggggcggcttcaggtgtagaagccgaggggacagcaaggggcccagacacccccgaccttcagaacagccatctgtgcccagctctgcaggccaggcacacccagctgagcccggggccagccagcaccacccaccagctggggcctgtgggtcccggagaccgtctgtggttgtggctttgtcgccggattgcagagctgaagggagccctgtggatgacaaacaccaggggcctctccagaccctacgtggggggagggctgaacaaagcagggaggcccacggttagacaccaggcagaactgcccaggagagacacagggacaatcagaccagcgtcctcgaggttagcctgaggcgggtgggcacggccgaccatccacccggtggttcctgtttgtcccaccacttaactgggagacactgttttattaaaacacaccgtggcttccttcagtcttggtgtttttatagaaatgagagaaaccagaaccgatttgctaaggaatcggcctcagtggccaaagcggatgtcctgggcgcctggaacctccccatctcctgcaggcctgggagtggatgtgtccactcgggcaggggctgaccaagcccctgggtcttgagggatgcccggccggctccctttgccctgcagtcagggtgtgtccctgcaactccaggtgccagggaacaggtgaagtggtctccagggtcacttccagctttggaatccagggagcccagagttgcgggtggaggtaacaaaaggggctgtttccagaagtggcccagaagggaccatggtgggggctcccccggggaccctccagcatctctccccaggcccagcccatcccaccccaccccaggaaggaggatgggcaggttcctgccccatattctggatgcagaagcagcggctcccagaggttgggtctctcagagcagtcacaggcccaggctcagccctgtgtgcttgggacacccctccagccccggttctgacgggggacaccgcacaggccgatctcccccagccgctgctgtctgtccactgcaaaggcaacgcaaggacgtgcctggctttgcggggtcccacgctacgacctcaggtgttttcgaat

SEQ ID NO: 118291 - DNA, 2009 bp, Homo sapiens; identical to SEQ ID NO: 118289
  Payload ID: 3150
  Gene Symbol: C14orf180
  Gene Name: chromosome 14 open reading frame 180
  Uniprot ID: Q8N912
  ENST ID: ENST00000618752
  CDS Start-End: 502-984

SEQ ID NO: 118292 - DNA, 1455 bp, Homo sapiens; identical to SEQ ID NO: 118288
  Payload ID: 3150
  Gene Symbol: C14orf180
  Gene Name: chromosome 14 open reading frame 180
  ENST ID: ENST00000619279
  CDS Start-End: 257-790

SEQ ID NO: 118293 - DNA, 2551 bp, Homo sapiens; identical to SEQ ID NO: 118290
  Payload ID: 3150
  Gene Symbol: C14orf180
  Gene Name: chromosome 14 open reading frame 180
  Uniprot ID: Q8N912
  ENST ID: ENST00000630349
  CDS Start-End: 337-819

SEQ ID NO: 118294 - DNA, 643 bp, Homo sapiens
  Payload ID: 3151
  Gene Symbol: C14orf2
  Gene Name: chromosome 14 open reading frame 2
  Uniprot ID: P56378
  ENST ID: ENST00000286953
  CDS Start-End: 89-265
atcccctgcgcgcgcctgcgcgctcggtgacctttccgagttggctgcagatttgtggtgcgttctgagccgtctgtcctgcgccaagatgcttcaaagtattattaaaaacatatggatccccatgaagccctactacaccaaagtttaccaggagatttggataggaatggggctgatgggcttcatcgtttataaaatccgggctgctgataaaagaagtaaggctttgaaagcttcagcgcctgctcctggtcatcactaaccagatttacttggagtacatgtgaaagaaaacgtcagtctgcctgtaaatttcagcaagccgtgttagatggggagcgtggaacgtcactgtacacttgtataagtaccgtttacttcatggcatgaataaatggatctgtgagatgcactgctacctggtactgctttcagtgtgttccccctcagcccctccggcgtgtcaggcatactctgagtagataatttgtcatgcagcgcatgcaatcagaatctcactgagccacccatcattgtgaaataattacctcagttgtacaggacttggtgatcaggatccaggcactcacttgtattctactgctcaataaacgtttattaaacttgatcctgctactta

SEQ ID NO: 118295 - DNA, 842 bp, Homo sapiens
  Payload ID: 3151
  Gene Symbol: C14orf2
  Gene Name: chromosome 14 open reading frame 2
  Uniprot ID: P56378
  ENST ID: ENST00000414262
  CDS Start-End: 251-478
ggtgcgttctgagccgtctgtcctgcgccaagggagcgtaccttggccttgagaggttcagctgcctaacccagaggctacgcagagttagagaagccagagtccaagccaagaactctgactccacatccagtcccttctctcctttataactcaagtttccttgcgccacactgccctccacgttatgctgtacatgacaacttgggtgaggcaacagggaagctgaaaagagatcatacggtgctgaatgaaattgtatggaactcgcgggtcagacatttcccatttccagtgtcagatgcttcaaagtattattaaaaacatatggatccccatgaagccctactacaccaaagtttaccaggagatttggataggaatggggctgatgggcttcatcgtttataaaatccgggctgctgataaaagaagtaaggctttgaaagcttcagcgcctgctcctggtcatcactaaccagatttacttggagtacatgtgaaagaaaacgtcagtctgcctgtaaatttcagcaagccgtgttagatggggagcgtggaacgtcactgtacacttgtataagtaccgtttacttcatggcatgaataaatggatctgtgagatgcactgctacctggtactgctttcagtgtgttccccctcagcccctccggcgtgtcaggcatactctgagtagataatttgtcatgcagcgcatgcaatcagaatctcactgagccacccatcattgtgaaataattacctcagttgtacaggacttggtgatcaggatccaggcactcacttgtattctactgctcaataaacgtttattaaactt

SEQ ID NO: 118296 - DNA, 472 bp, Homo sapiens
  Payload ID: 3151
  Gene Symbol: C14orf2
  Gene Name: chromosome 14 open reading frame 2
  Uniprot ID: P56378
  ENST ID: ENST00000557040
  CDS Start-End: 146-322
tctgagccgtctgtcctgcgccaagggctgttcgtttcttggaacctcacactgtcagagcattcgagtagcttgaggacaggaaatttgagggcggactatctgcaaggtgttccaggagaaggacacagtcgcatcctgcaagatgcttcaaagtattattaaaaacatatggatccccatgaagccctactacaccaaagtttaccaggagatttggataggaatggggctgatgggcttcatcgtttataaaatccgggctgctgataaaagaagtaaggctttgaaagcttcagcgcctgctcctggtcatcactaaccagatttacttggagtacatgtgaaagaaaacgtcagtctgcctgtaaatttcagcaagccgtgttagatggggagcgtggaacgtcactgtacacttgtataagtaccgtttacttcatggcatgaataaatggatctgtgagatgca

SEQ ID NO: 118297 - DNA, 1058 bp, Homo sapiens
  Payload ID: 3151
  Gene Symbol: C14orf2
  Gene Name: chromosome 14 open reading frame 2
  ENST ID: ENST00000554713
  CDS Start-End: 52-351
gagttggctgcagatttgtggtgcgttctgagccgtctgtcctgcgccaagatgcttcaaagtattattaaaaacatatggatccccatgaagccctactacaccaaagtttaccaggagatttggataggaatggggctgatgggcttcatcgtttataaaatccgggctgctgagatggggttttgccatgttacccaggctggtcttgaactcctgggctcaagcagtcctccaatcttggcttcccaaagtgctggaattaacaagcgtgagccacaacacctggcccaattggggaactttgaacaagactttaatatcagaattataaaagaagtaaggctttgaaaggtaagatttttgcttctgaaaatggttgggaatggaaaacagcatcatgtcttttcaggacaaggtatatcgttgttctcaattgaaatcgaaacacagttcagtatatatgtaaggtgcagttgaaatgcttcacagcttgaagtttgctatgcctgctgggaaagagaattctgaatttctgctttttatagtcaagtggatcaagtaaaacttccaggagtaatagaggaatggattaattagaggtagtcgatatcatcaccaatagggaagcacaagtgagctgtgcaagcatgctgtcctagaagttccctaatgatgtcgttttattttgtttattgttttttgagacggagcctcgctctgtcgcccaggctggactgcagtgctgcgatctcagctcactgcaagctccgcctcccaggttcatgccgttctcctgcctcagccttctgagtagctgggactacaggcacctgccgccacgcctggctaatgttttgtatttttagtagagatagggtttcacatagccaggatggtctggatctcctgaccttgtgatccacccgcctcagcctacccgtaatgatgtgtttttaatggtttggttttgttttttgggtttttttttttttgagacagagtctcgctgtgttgcccaggctggagtgcagtggcacaatcttggctcactgcaa

SEQ ID NO: 118298 - DNA, 707 bp, Homo sapiens
  Payload ID: 3151
  Gene Symbol: C14orf2
  Gene Name: chromosome 14 open reading frame 2
  Uniprot ID: P56378
  ENST ID: ENST00000554880
  CDS Start-End: 155-331
agggtgagcctttctaggacctcaggggaagcttgagcgccgcggctggcccgggagtctgtttcacgggagttccgtggcaacccctgtgtgtacaagaaaatgccctccggtcactccctggcctctctatttagaggctgctgcctcggagatgcttcaaagtattattaaaaacatatggatccccatgaagccctactacaccaaagtttaccaggagatttggataggaatggggctgatgggcttcatcgtttataaaatccgggctgctgataaaagaagtaaggctttgaaagcttcagcgcctgctcctggtcatcactaaccagatttacttggagtacatgtgaaagaaaacgtcagtctgcctgtaaatttcagcaagccgtgttagatggggagcgtggaacgtcactgtacacttgtataagtaccgtttacttcatggcatgaataaatggatctgtgagatgcactgctacctggtactgctttcagtgtgttccccctcagcccctccggcgtgtcaggcatactctgagtagataatttgtcatgcagcgcatgcaatcagaatctcactgagccacccatcattgtgaaataattacctcagttgtacaggacttggtgatcaggatccaggcactcacttgtattctactgctcaataaacgtttattaaacttgatcctgctact

SEQ ID NO: 118299 - DNA, 749 bp, Homo sapiens
  Payload ID: 3151
  Gene Symbol: C14orf2
  Gene Name: chromosome 14 open reading frame 2
  ENST ID: ENST00000555030
  CDS Start-End: 52-351
gagttggctgcagatttgtggtgcgttctgagccgtctgtcctgcgccaagatgcttcaaagtattattaaaaacatatggatccccatgaagccctactacaccaaagtttaccaggagatttggataggaatggggctgatgggcttcatcgtttataaaatccgggctgctgagatggggttttgccatgttacccaggctggtcttgaactcctgggctcaagcagtcctccaatcttggcttcccaaagtgctggaattaacaagcgtgagccacaacacctggcccaattggggaactttgaacaagactttaatatcagaattataaaagaagtaaggctttgaaagcttcagcgcctgctcctggtcatcactaaccagatttacttggagtacatgtgaaagaaaacgtcagtctgcctgtaaatttcagcaagccgtgttagatggggagcgtggaacgtcactgtacacttgtataagtaccgtttacttcatggcatgaataaatggatctgtgagatgcactgctacctggtactgctttcagtgtgttccccctcagcccctccggcgtgtcaggcatactctgagtagataatttgtcatgcagcgcatgcaatcagaatctcactgagccacccatcattgtgaaataattacctcagttgtacaggacttggtgatcaggatccaggcactcacttgtattctactgctcaataaacgtttattaaacttga

SEQ ID NO: 118300 - DNA, 1659 bp, Homo sapiens
  Payload ID: 3151
  Gene Symbol: C14orf2
  Gene Name: chromosome 14 open reading frame 2
  ENST ID: ENST00000553430
  CDS Start-End: 61-294
gacctttccgagttggctgcagatttgtggtgcgttctgagccgtctgtcctgcgccaagatgcttcaaagtattattaaaaacatatggatccccatgaagccctactacaccaaagtttaccaggagatttggataggaatggggctgatgggcttcatcgtttataaaatccgggctgctgataaaagaagtaaggctttgaaaggtaagatttttgcttctgaaaatggttgggaatggaaaacagcatcatgtcttttcaggacaaggtatatcgttgttctcaattgaaatcgaaacacagttcagtatatatgtaaggtgcagttgaaatgcttcacagcttgaagtttgctatgcctgctgggaaagagaattctgaatttctgctttttatagtcaagtggatcaagtaaaacttccaggagtaatagaggaatggattaattagaggtagtcgatatcatcaccaatagggaagcacaagtgagctgtgcaagcatgctgtcctagaagttccctaatgatgtcgttttattttgtttattgttttttgagacggagcctcgctctgtcgcccaggctggactgcagtgctgcgatctcagctcactgcaagctccgcctcccaggttcatgccgttctcctgcctcagccttctgagtagctgggactacaggcacctgccgccacgcctggctaatgttttgtatttttagtagagatagggtttcacatagccaggatggtctggatctcctgaccttgtgatccacccgcctcagcctacccgtaatgatgtgtttttaatggtttggttttgttttttgggtttttttttttttgagacagagtctcgctgtgttgcccaggctggagtgcagtggcacaatcttggctcactgcaacctccgccttccaggttcaagcaattctcctgccttagcctcccaagtagctgggattacaggtgcccgccaccatacccggctaattttttgtatttttagtagagatggggttggccggctggtttcaaactcctacctcaggtgatccacctgccttggcctcccaaagtgttgggattacaggcgtgagccactgcgcctggcctttaatgtattttgaaagaaagcgccttataaatttatgccagagtgacaatgaaactgtagccatttgaatgttacacaaacccaggactggctacatgagtttgaggaggaggtgtttccctgcctctctctttgcgctgtgggtgaccactgcctgtctgctgtcattacatgaacccttaagcactctgggtgtttcatatagaaataatcctacttttcaatagtattgaaaggtgtcatttatctttttggactgttgatcaacttcttttgatacttgtttaataaattacatccaacttgttccttccttcttaaatcatatttatatatgcatctctttcaaaagcttcagcgcctgctcctggtcatcactaaccagatttacttggagtacatgtgaaagaaaacgtcagtctgcctgtaaatttcagcaagccgtgttagatggggagcgtggaacgtcactgtacacttgtataagtaccgtttacttcatggcatgaataaatggatctgtgagatgcactgcta

SEQ ID NO: 118301 - DNA, 2915 bp, Homo sapiens
  Payload ID: 3152
  Gene Symbol: C14orf28
  Gene Name: chromosome 14 open reading frame 28
  Uniprot ID: Q4W4Y0
  ENST ID: ENST00000325192
  CDS Start-End: 276-1208
ctccgtaataagaagcgacgtgtcccactgtcctggctccgtgggtccagtgagattgggcctgggcgctggagctgctgtggctcccgccgcggcggctgccatggaggccatgccagagcccagaactcacgccgggggaggccgagacagccggcggtactcatagatgaggcagcggcggcggcggcggcggcggcagcccgggctctccatgagcaggcggcggcggcgacgggtgcggcggcaccggcagttttcggtccccagggaggatgaagacactgtttgaagagatcaaagcatcaattaaaaataactataaccaagatcgatcattttgtaggcctgttcttccttgggggggtgtttttactatcaaagctggccgcaaagcagtatcctgtacaccactctatgttgaaataagactgaaaaatacctgcaccatagatggattcttgatgttattatatgtcattcttaatgaaaatgaaaacttccctagggaactctctcttcattttggtagagagtttgtagactgttttctttacttaatggacacctacagttttacaactgtgaagctactttggatttgggacaagatggaaaaacagcaatacaaatctgaagtccataaagcttcattaataattgatttgtttgggaatgagcatgataattttacaaaaaatcttgaaaatctcatgtctaccattcaagagagttactgttccaactggcgatgcccaactcgagtgcaggaggatcagcagcgcacaattaatataaatcctccccaagaaattccacatggaaacttgataagactggctgtgaatgagttattctgttccaagattgaactgtgtgaagagcatgggtgtggtggcttaagagaattttcccaacgaattttctgccatggggcacccccttttgttgtcttaaatatgcaacattggaaatctgaagatctggcgtatgtaccctattacttggatttgtctgatcacaagtatttgttggaaggtgccacattatttaacaaagaggaacatcattattctgcagctttccagattggtggacattggatgcactatgatgggctcagaaatgtgaatttaattttgttaaataaacccccagagtttctcctcttgtcatcattggtttatattcgagcaacagagaaataaatatagattgatgctaaaagttgttttccctcctgcccatgctctcccagatgaagggcttttattttgtgtatacttggtatccaagaaaatagttcaactatactagtttcagaagtgtattttcagtgtttaaccccaggtaaatgttttatatagaggatctgtgcaaaaatgtttgtaatttttttatatttcctgagttatttttatatgagcatattttatgttggaataaaatatatcttgtggcctttgtattttttatttatatgtacctcaaagatttttacaattctgtctttgaattcaagaaatactttgtcatctgaattctaaatttttctttttggatattcgagtaaaacctaggtaaaagtattttaagtttatataatttaacagttcaaaatatatctgactgtatttctttgccctacctcactataatccaaagtgcactatttgatctagtatggatttgaatgtacaatttatcgatggcttagtttattagttcgatttgcctagtatccctgcagcaattttttaaaatgtctgagaaatttttcagagcttaaactatttctttataatggcaaattacttttaactacttcctaaagtattataaacctgccagtggattttaagtgatagctaagcttccaagcttaattcacgttattacaaataaattatataactatcttaaatgtttatcttataattaaatgtaatttgaaatgctctaatgtattttgcagataaaacaactataaacaatattaggcaactggatgtttactagtgtcggactagcaatagaaatgcactttaaatatatatttaaggggaaatgcgtgcctggaaatacttcttttcctagtgaagttttatattgacacagagaaaagaatacttaaaattttgagtgatgtctactggcttccttgtaagtagtgattgatagcatgcggctttgacttgcaatacaaatcattacgattttatagttatcagaacattacgtttctttataaagaccctaaggtcactcttctttttgcaacttaagggaaaaaatattctcaagggaaaatactttttgaaatttatcaccattttagtgtttacatttcaataaatagttcacttcaggtttgggattgagattagttgcaatatatttagaagctcctacatgacagcacagatcactgccatctgctgaactgctaaagtgcttggtgccatgttgagaaaacttacccaagaatggataaatatgggtgaaacattactgagaatgcctcacgttagcaaatactatgaaaattcttgtttatatatcaaactgatttattttacaaaaaaaaaaaattcaccccaagatttatttagtttcccaagtgtatctgattaggatttaatttagagtaaacttttctggggacacctgattgcatgaactgaagtatacaataacacaaatattacagtaaacataaatggtgtcattaacaaaattattcctaatgcagatttattctttcaggaaatgcactttatttggaatactagtttatcatgaaacaatgacttacctacctcacagggttgttgtgaggattaagatgtttgttaaaatcttgactaccttgaacatgctaataaaaaaacatttttctacctcttttatttgca

SEQ ID NO: 118302 - DNA, 1097 bp, Homo sapiens
  Payload ID: 3152
  Gene Symbol: C14orf28
  Gene Name: chromosome 14 open reading frame 28
  ENST ID: ENST00000557112
  CDS Start-End: 236-1078
gtgggtccagtgagattgggcctgggcgctggagctgctgtggctcccgccgcggcggctgccatggaggccatgccagagcccagaactcacgccgggggaggccgagacagccggcggtactcatagatgaggcagcggcggcggcggcggcggcggcagcccgggctctccatgagcaggcggcggcggcgacgggtgcggcggcaccggcagttttcggtccccagggaggatgaagacactgtttgaagagatcaaagcatcaattaaaaataactataaccaagatcgatcattttgtaggcctgttcttccttgggggggtgtttttactatcaaagctggccgcaaagcagtatcctgtacaccactctatgttgaaataagactgaaaaatacctgcaccatagatggattcttgatgttattatatgtcattcttaatgaaaatgaaaacttccctagggaactctctcttcattttggtagagagtttgtagactgttttctttacttaatggacacctacagttttacaactgtgaagctactttggatttgggacaagatggaaaaacagcaatacaaatctgaagtccataaagcttcattaataattgatttgtttgggaatgagcatgataattttacaaaaaatcttgaaaatctcatgtctaccattcaagagagttactgttccaactggcgatgcccaactcgagtgcaggaggatcagcagcgcacaattaatataaagtgtggtggcttaagagaattttcccaacgaattttctgccatggggcacccccttttgttgtcttaaatatgcaacattggaaatctgaagatctggcgtatgtaccctattacttggatttgtctgatcacaagtatttgttggaaggtgccacattatttaacaaagaggaacatcattattctgcagctttccagattggtggacattggatgcactatgatgggctcagaaatgtgaatttaattttgttaaataaacccccagagtttctcctcttgtcatcattggtttatattcgagcaacagagaaataaatatagattgatgctaaaa

SEQ ID NO: 118303 - DNA, 6495 bp, Homo sapiens
  Payload ID: 3153
  Gene Symbol: C14orf37
  Gene Name: chromosome 14 open reading frame 37
  Uniprot ID: Q86TY3
  ENST ID: ENST00000267485
  CDS Start-End: 196-2520
ctccccctagcgtcccagacagcggagggagtcgccgccgctaccgccgccgccgccgcagggcccgccgctgggatgccgagcgcccgcgccgccgctgcctctgtcctccgcgcgctgctcagctgaaggcgcacaggattcaattactggacttgtcaactctgccagtgtacgtgccatttctcttccactatgagaggaccgattgtattgcacatttgtctggctttctgtagccttctgcttttcagcgttgccacacaatgtctggccttccccaaaatagaaaggaggagggagatagcacatgttcatgcggaaaaagggcagtccgataagatgaacaccgatgacctagaaaatagctctgttacctcaaagcagactccccaactggtggtctctgaagatccaatgatgatgtcagcagtaccatcggcaacatcattaaataaagcattctcgattaacaaagaaacccagcctggacaagctgggctcatgcaaacagaacgccctggtgtttccacacctactgagtcaggtgtcccctcagctgaagaagtatttggttccagccagccagagagaatatctcctgaaagtggacttgccaaggccatgttaaccattgctatcactgcgactccttctctgactgttgatgaaaaggaggaactccttacaagcactaactttcagcccattgtagaagagatcacagaaaccacaaaaggttttctgaagtatatggataatcaatcatttgcaactgaaagtcaggaaggagttggtttgggacattcaccttcatcctatgtgaatactaaggaaatgctaaccaccaatccaaagactgagaaatttgaagcagacacagaccacaggacaacttcttttcctggtgctgagtccacagcaggcagtgagcctggaagcctcacccctgataaggagaagccttcgcagatgacagctgataacacccaggctgctgccaccaagcaaccactcgaaacttccgagtacaccctgagtgttgagccagaaactgatagtctgctgggagccccagaagtcacagtgagtgtcagcacagctgttccagctgcctctgccttaagtgatgagtgggatgacaccaaattagagagtgtaagccggataaggacccccaagcttggagacaatgaagagactcaggtgagaacggagatgtctcagacagcacaagtaagccatgagggtatggaaggaggccagccttggacagaggctgcacaggtggctctggggctgcctgaaggggaaacacacacgggcacagccctgctaatagcgcatgggaatgagagatcacctgctttcactgatcaaagttcctttacccccacaagtctgatggaagacatgaaagtttccattgtgaacttgctccaaagtacgggagacttcacggaatccaccaaggaaaacgatgccctgtttttcttagaaaccactgtttctgtctctgtatatgagtctgaggcagaccaactgttgggaaatacaatgaaagacatcatcactcaagagatgacaacagctgttcaagagccagatgccactttatccatggtgacacaagagcaggttgctaccctcgagcttatcagagacagtggcaagactgaggaagaaaaggaggacccctctcctgtgtctgacgttcctggtgttactcagctgtcaagaagatgggagcctctggccactacaatttcaactacagtcgtccctttgtcttttgaagttactcccactgtggaagaacaaatggacacagtcacagggccaaatgaggagttcacaccagttctgggatctccagtgacacctcctggaataatggtgggggaacccagcatttcccctgcacttcctgctttggaggcatcctctgagagaagaactgttgttccatctattactcgtgttaatacagctgcctcatatggcctggaccaacttgaatctgaagagggacaagaagatgaggatgaagaggatgaagaagatgaagatgaagaagaggaagatgaggaagaagatgaggaagataaagatgcagactcgctggatgagggcttggatggtgacactgagctgccaggttttaccctccctggtatcacatcccaggaaccaggcttagaggagggaaacatggacctgttggagggagctacctaccaggtgccagatgccctcgagtgggaacagcagaatcaaggcctggtgagaagctggatggaaaaattaaaagacaaggctggttacatgtctgggatgctggtgcctgtaggggttgggatagctggagccttgttcatcttgggagccctctacagcattaaggttatgaatcgccgaaggagaaatggcttcaaaaggcataaaagaaagcagagagaattcaacagcatgcaagatcgagtaatgctcttagccgacagctctgaagatgaattttgaattggactgggttttaattgggatattcaacgatgctactattctaatttttattttggagcagaaaaaaaaaaagaacaacctgccacattgctgctatcaggccgttagtcctagtgtctgctgggtgctgggtagtagatttttcttgtactgagcagaaatggcatgttgtatactaaacgtatcatgcagtatttggttttattctgtagtgaattttccacaaccgtgggctacaactcataaatatgcaacatatatgtttttcagtaggagttgctacattaggcagagtaaatattttgtagttttccacagtgtcttttccttggtttgaattacctgcattgagaataatgattgttgccaccaaggcatgcttgactctgagatataaatcttaacaaagaataacttctcaagatatactctacctacttgaaaccacagggttgtgggccatggtacatactgcatttgcatcaaactagcagtaactcagaatgaaatcattttcattaagaagctctctcagcatattaggattatatgtagatttgtatgtattttgcattatgtacttcagtctcctagttttattattctcaccttccgttttattcttggcgaggaaaaaaatgcactagaaataatacattaaactgactcttagtcttaatgtacgtttgctgtcttaaatagtgtgattgagtccaacagactcaatcatacatgtcatacatgtttatgattaagagatattctttttgtgtgctagttgattttgccgagaaaaaatgaagaagaattcaagaatgagatgagggtaggtaagctctcagagcatttctgtctgccatttggttctatgcttatgtggctgctaatgtgactaattcagagtgttgtatttccacatctgtggactccaccatggaaaaggtgggctaccattggtccttatatggctttattagaaaaatagacattctatcgtttgtctgcccagtggccagagtcctggtgaacaacagagctcatgggaaaccagcctctctcagggcaccccgctatgaggatattgaaatatgttcaatcatttctcatctcccttggaatgtaattccctgccctatacaaaataggatattccaatgcgctatttgaatctagggattgaggatttgtagttgagttttggggtaaaggcttggctcattgccatggaagaataaaagttatttattaatagtgctgtcactgtggagtacttgttggtgtttattagaagttgtctactatgttcaagaaaagttgcacagttattcctcagagctactatgtgaggtaggacatatgtttttattctcccatttgactgaagatggaactgaagcagagaagtgaaatgattttccaaagttgtacccagagagaatcagcgtgagaacccacttggacccagccatgcacccttatcttcagttcagtaaccttttcatagactttggtggaagcagtgacatttcagggtccttctttaaaacaaaggttctaagggaatagcagggaatagctgcctggtcaaggaacgtttgatgtgaatttccatctttgttaaatgaatgatgcctttctaatttctctcttactcacacacaagttctttccttccccatctcagttatcagttatttcctttacagtcatacatttgagtatcacctctatggaactaataaaccttcctagaatccgtttttgaataatgtctggctcacaagaacattttcatcaaataattttaactctttttgccaagagatgtaagcaaatatgtgaaactgatcaagagaagtgaaaagctctgtacagtcaaatagaagttagcaactggcaaattagctcaaggtcagattttaaaaatagaattcagaatcatgacactcagaagtgatttgtaatttcacgagtagagacatcctgatattgcataagggatgttttccttttctaagagcagccctttgctgtaagtgtttctaaggttgggagtaagtgagcatggtgtggcattactgtctttgtattcttgacaaactatttgttgagaatacgtcgtaggccacttaactgagtagcacatgggtgatactagtggccattattgccttgggctactcaatctatagtcttaactaaaccatggctaataggttgaatcttcaaactgtagtgtaataaattcccaaataacagacccatattttcatttctcagaggtccgtgaggatgacatgtatgtgaattttggcttaacacagtatctctgtggtcctttttgggacacatgatttcttaaaggaaaagattatacttagagtacatttctgtacaaacccatttaaacatctggattgagtggaaggtcggtggatggtacaaatgacatgtttattttggccattttccttgctgctggtggctgtggaataatgattttcagtggttggcttagattattaagaggatcagaaaaggttgtcatattttaaacaaaacctgggattagagatgctgctacgagatggaagtgctggccagtggttatatagtggtccagttgagaagtagtaaatcaggcacttgtaggtttacccaaaataagtgacaagtatgcttatatttgcacaattaaaatagaaagtcaactttttattcaaacaactaggcttaaaacatttaacagtgaaacaaataaagctgtctggaaaggagggctgattcctgcagcttcagttgtgaacaccatccccactggactgagtttacccagccagaactgccagcatcccaccgcaggggcaggaactaggtcttcttctcggagggagaggcagtgtttccagaatttgcaggctcataaaaatcacctgggacacttgtgaaacatacagatctcaaggccttgccccagacctgatgagttagaatctccagggaaggagcttggggtattcatgccccagcaagcttgggaacacagctaggagggatctatctagagaaccacttccttatgatagagacaaggtcatttaaagtcacaatgagataccacctcacacctattgggatggctattattcaataaaacaaaatataacaattgtttctgaggatgtggagaaattggaatccttgtatactgtgggtgggaatgtaaaatggatagccactgtggaaaacagtatgaagattcctcaaaaaattaagatagaactactatataatccaactatcccacttctgggcatatatccaaaagaatagaaatcaggatcttgaagaagtatctgtacgcctgtgttcattgcttatgcttataagcatattattcacaataagcttataagtattattcacaatagccaagatatggaaattgcattgatagatatgcaaatatctatcaatagatgaatggataaagaaaatgtggtatatacatacagtagaatattattcagccataggaaataaggaaattctgtcattgtgacaatatggatatacatggagaacattatgctaagtgaaataaactagtgacagaaggacaaatgcatgattgcacttctttgaggtatccaaaataatcaaactcataagggcagaggcaaaatggtgcttgccacgggctgggcaaagttaaaggtggggagatgttgattaattatgtttcagttatgcaagatgaataagttctagagctctgctgtataacatagtgcctatagttaacaatatcgtactgtgcagttaaaaatttgttaagagggccgggtgtggtggctcacgcctgtaatcccagcactttgggaggccaaggtgggcagatcatgaggtcaggagatagaaaccatcctggctaacatggtgaaaccccatctctactaaaaatacaaaaaa

SEQ ID NO: 118304 - DNA, 557 bp, Homo sapiens
  Payload ID: 3153
  Gene Symbol: C14orf37
  Gene Name: chromosome 14 open reading frame 37
  ENST ID: ENST00000555101
  CDS Start-End: 1-293
cagtcgtccctttgtcttttgaagttactcccactgtggaagaacaaatggacacagtcacagggccaaatgaggagttcacaccagttctgggatctccagtgacacctcctggaataatggtgggggaacccagcatttcccctgcacttcctgctttggaggcatcctctgagagaagaactgttgttccatctattactcgtgttaatacagctgcctcatatggcctggaccaacttgaatctgaaggtattcatgctttgaaggggatcttttcaaggactggttgagtgagtcactgagcaaatgtttttgaaaaagaattaagtaggagtatattcaatctgcagtatagatcagaggacagtaaactacagctgggccaaatctggcctgccacttgtttttgaatggtttgtaagctaagaatggtttttacattttgaaatgattgaaaaaaaaagtcaaaagaagaataatattttgtgacatagaaaagttataaaaattcaaattccagtgttcataaataaagctatattggaacacagcca

SEQ ID NO: 118305 - DNA, 2813 bp, Homo sapiens
  Payload ID: 3154
  Gene Symbol: C14orf39
  Gene Name: chromosome 14 open reading frame 39
  Uniprot ID: Q8N1H7
  ENST ID: ENST00000321731
  CDS Start-End: 161-1924
gctggtaccaggggcgtgggggcggggctgagcgagtccagcccagggctccggggaccgtttgtagttaggatccgctgtggcgtcctgagtggagtttgggaccccagggagggagggtgtgggcgttcgggtccagaggagctgtttagtatccaagatgaatgacagcctgtttgtcagtttggacagacttttgctagaatttgtcttccagtatgagcaagacataagtactaaagaagagatgattcaaagaattaataaatgctgtgaagatattaaggaaaacaaagtaactatttgtaggatacacgaaactataaatgcaacagatgaggaaattgatcattactgtaaacatagtgaggagattaaagacaactgtagaaactggaagccaacatgtgatgtttttcgtaaacatgaagattatatgcaggaccaatttactgtttatcaaggaactgttgaaaaagacaaagaaatgtatcatgattatatatgtcagtataaagaagttttgaagcagtaccaactaaaatactcagaaacacccttttcacgtgaatattatgagaagaaaagagaacatgaagaaattcaaagcagagtgttggcatgtactgaacaattaaaaatgaatgaaacaatttttatgaaatttcgagtgcctgctccctttccatcacttactaaatggactttaaacattgttaatttgagatgtgaaacacaagatattcttaaacatgccagcaatcttaccaaaagttcatccgaattgaagaaagaagtagatgaaatggaaatagaaattaattatttaaaccagcagatatctaggcataatgaaactaaggctctttcagaaactctggaagaaaagaacaaaaatacagaaaacagaaaagaactgaaagaaagaatttttggaaaagatgagcatgtacttacattgaataaaactcaaagcagtcaattatttcttccttatgaatctcagaaattagtaagaccaataaagatgcattcttcagaaccaagagttgcagatataaaagaagaaagttctgcgaagcagtcaaagcttgccaatattgactttagacaaaaagaaaatgatacacagatatttaatgactctgctgtggataaccattcaaaatgttcacatattacgactatcacaagttcacaaaagtttatgcaagtcagattgttaaccccacagaaacaatcaaattccaatcagtggtcggaaaaaggggataaagatgctgagtatggagataaagggacagtaagacaagtaagagaatcaaaatgtacttcacaagctatatatactgaacattttgggaagtcagtagaaaatgatagtgatgaagtagaagagagagctgagaattttccacgaacgtctgaaattcctatatttttaggaactcccaaagctgtgaaagcacctgagtcattggagaaaataaaattccctaaaacccccccgttcgaaattaacagaaatagaaatgcagtacctgaagttcaaacagaaaaggaatcccctggactttcttttcttatgagttatacttctagatcacctggattgaatttatttgattcttctgtatttgatacagaaatctcatcagatcagtttaatgaacattattctgcaagaaatctaaatcctctgtcatcagagcaagagattggaaacttacttgagaagccagaaggagaagatggctttacattttcttttccatcagacacttcaactcatacatttggagctggaaaagatgattttagttttccattttcatttggacagggtcaaaattcaataccttcttcttctttaaaaggtttttcatcttcctcacaaaatacaacacagtttacttttttttgagctagtcattaattccttaaattattttactgttctgtgttcatgagggcataaatttacattattgcttaaaacatgaagactgctttcttttattgattaaagcagtaatgtttacattatttgattatatttattgaaatattgaaatactgaatattttgggttttgtgtgtgctattaactaatcattatttattttggttttgattttgcgagccgtggtcaggtagaacttttattaatcttaatagaatttgatgcttttttcattactctttatttaaatattaagcctgcttctccttggaacctaaggtttttttctggaagtattgttggtactttgataagaacaagaactgcagtagtaactccagagttagtgctgaagcgtactttagctactaaaaatttctattaaaattattgggtttcacttctgcttcactatgtagtatacagagtggtactgtaataataatttcaaataatttatgttaataacaaaatctgtgttattttcttctaatataacacatggtacaattctaattttatgagttatgctaatgctttcaatggctaaaaattaaatgtaaagggcaagagtaatttctgaaaattggattgttgtatcagtggtgatcctgttaatattcttttttgcttaaatattttttgaagaacatttacaattttgtctccttcaataacaaaaatttcttctttatgttttgtgttcagtatttgtcaattaattatatagcttaagtgaagatatttaagatttgatgaacttctgtaaacattttgctcaatatcattgtattttgtgctttgtaaattagctgtactgagttaccaagtaataaagggtttgactcca

SEQ ID NO: 118306 - DNA, 1497 bp, Homo sapiens
  Payload ID: 3154
  Gene Symbol: C14orf39
  Gene Name: chromosome 14 open reading frame 39
  ENST ID: ENST00000557138
  CDS Start-End: 84-197
ctgtggcgtcctgagtggagtttgggaccccagggagggagggtgtgggcgttcgggtccagaggagctgtttagtatccaagatgaatgacagcctgtttgtcagtttggacagacttttgctagaatttgtcttccagtatgagcaagacataagtactaaagaagagatgattcaaagaattaataatatctaggcataatgaaactaaggctctttcagaaactctggaagaaaagaacaaaaatacagaaaacagaaaagaactgaaagaaagaatttttggaaaagatgagcatgtacttacattgaataaaactcaaagcagtcaattatttcttccttatgaatctcagaaattagtaagaccaataaagatgcattcttcagaaccaagagttgcagatataaaagaagaaagttctgcgaagcagtcaaagcttgccaatattgactttagacaaaaagaaaatgatacacagatatttaatgactctgctgtggataaccattcaaaatgttcacatattacgactatcacaagttcacaaaagtttatgcaagtcagattgttaaccccacagaaacaatcaaattccaatcagtggtcggaaaaaggggataaagatgctgagtatggagataaagggacagtaagacaagtaagagaatcaaaatgtacttcacaagctatatatactgaacattttgggaagtcagtagaaaatgatagtgatgaagtagaagagagagctgagaattttccacgaacgtctgaaattcctatatttttaggaactcccaaagctgtgaaagcacctgagtcattggagaaaataaaattccctaaaacccccccgttcgaaattaacagaaatagaaatgcagtacctgaagttcaaacagaaaaggaatcccctggactttcttttcttatgagttatacttctagatcacctggattgaatttatttgattcttctgtatttgatacagaaatctcatcagatcagtttaatgaacattattctgcaagaaatctaaatcctctgtcatcagagcaagagattggaaacttacttgagaagccagaaggagaagatggctttacattttcttttccatcagacacttcaactcatacatttggagctggaaaagatgattttagttttccattttcatttggacagggtcaaaattcaataccttcttcttctttaaaaggtttttcatcttcctcacaaaatacaacacagtttacttttttttgagctagtcattaattccttaaattattttactgttctgtgttcatgagggcataaatttacattattgcttaaaacatgaagactgctttcttttattgattaaagcagtaatgtttacattatttgattatatttattgaaatattgaaatactgaatattttgggttttgtgtgtgctattaactaatcattatttattttggttttgattttgcgagccg

SEQ ID NO: 118307 - DNA, 558 bp, Homo sapiens
  Payload ID: 3154
  Gene Symbol: C14orf39
  Gene Name: chromosome 14 open reading frame 39
  ENST ID: ENST00000556799
  CDS Start-End: 293-558
attctcccacctaggtttaaattgaaccccgtctcggtcccccggttttgagaggtttctctcctcgagccgctgagtcacgcagcccaacagtaggagtggctcgaggcctacacgtccgcgagttcgcggggcgctggatggaaaagatttgaaacgccacctgtatcacatactaaatttatatacatagaaattattctggatcttctattctgtttcatcgatatgtgtatttattcctattgtttcacaactgcagttgaagtacattttaatatctgtatccaagatgaatgacagcctgtttgtcagtttggacagacttttgctagaatttgtcttccagtatgagcaagacataagtactaaagaagagatgattcaaagaattaataaatgctgtgaagatattaaggaaaacaaagtaactatttgtaggatacacgaaactataaatgcaacagatgaggaaattgatcattactgtaaacatagtgaggagattaaagacaactgtagaaactggaagccaacatgtgatgtttttcgtaaaca

SEQ ID NO: 118308 - DNA, 482 bp, Homo sapiens
  Payload ID: 3154
  Gene Symbol: C14orf39
  Gene Name: chromosome 14 open reading frame 39
  ENST ID: ENST00000555476
  CDS Start-End: 139-482
ggggaccgtttgtagttaggatccgctgtggcgtcctgagtggagtttgggaccccagggagggagggtgtgggcgttcgggtccagaggagctgtttagtcttccagtatgagcaagacataagtactaaagaagagatgattcaaagaattaataaatgctgtgaagatattaaggaaaacaaagtaactatttgtaggatacacgaaactataaatgcaacagatgaggaaattgatcattactgtaaacatagtgaggagattaaagacaactgtagaaactggaagccaacatgtgatgtttttcgtaaacatgaagattatatgcaggaccaatttactgtttatcaaggaactgttgaaaaagacaaagaaatgtatcatgattatatatgtcagtataaagaagttttgaagcagtaccaactaaaatactcagaaacacccttttcacgtgaatattatgagaagaaaagaga

SEQ ID NO: 118309 - DNA, 475 bp, Homo sapiens
  Payload ID: 3154
  Gene Symbol: C14orf39
  Gene Name: chromosome 14 open reading frame 39
  ENST ID: ENST00000498565
  CDS Start-End: 1-218
tgaatttatttgattcttctgtatttgatacagaaatctcatcagatcagtttaatgaacattattctgcaagaaatctaaatcctctgtcatcagagcaagagattgaaaagaccaagtgttttcggaatgaggggaaaaaaggtcatcatgagctagaaaacctgggaaggattcaccgaagaggtaaaattgaattaggactttacagtttgtgaatgctctcgtccccatcctcatccatggcgaaatcttcgcccccagcctcgtgaagatctagcacgtccgccatctcgccttcgatcgagatctcgtctgtgccgctcagacactagatactcaacatatactatatgctaggccatgcaagatgtagagaataccagaataagaaaataaaaattgatttctacatgatacattaagtgcaagaaatatccctctggcaaattaaagaaagtaaaggtatagtgaa

SEQ ID NO: 118310 - DNA, 1962 bp, Homo sapiens
  Payload ID: 3155
  Gene Symbol: C14orf79
  Gene Name: chromosome 14 open reading frame 79
  ENST ID: ENST00000389964
  CDS Start-End: 154-747
gtcagccactgggcagcccggggcactcctgcagcgtcccctggccctctccagggcaggggaaggttgggcagtcctgggcggccagcaccccggcgtgcatgtctcctgagcagctgcccatcgggcctctgctggcctgggggctccaagatgcaaggccggcgggagctggggggagagcctttgagtgacctccaggaggaagcagccagcgcttccctccgagtggcacctgagaggctgagtgatgacagtttggaatggagacggacctgccccgaccttctcctgtccgatgggaaagccagcatctccatgccccgtgagggcggttccacctgcactgcccgatgtcctgaccctggggaacacagcagcacttggggggagtttgaaggctttcgggaatcttcagccaagtctggacaattctcacagtcccttgaactcctcgagggacccacagaaccccagccaccgagaaccacttctgccccaaaagagtgcagttctcaccaaccatgccagggtggaccttgggtgacaggaacttctgccgtcccaccttctgagcccattctcagctatgagaacattttaaagtgtgcttttcaagaaataacagtccagcaggcagctgaagacgtttccaccatagaccatttcctagaaataagcagtgaagaaaaacctggcgttgaacgtgtacataaattgtgggacacactttcaactgagcattgaaagacagacagcgctcgagtggattaggccgcagtggttgagaagctcgagtaacgaatccagaaaactctggagagcccttcagagcatacacaccacgtctacttctcagcgcctctggagcgagtcccgttgccaggagaacttctttcttgttctcggaatagatgctgcgcagaagaacctttctggaggccagggccacatcatggaagattgtgacctcaaagagcctgaaggactcctcactgtcagcagcttctgtctccagcattgcaaagccctgatccagaccaagctctcggggccgcctggcagcaaacaggggaggctgatgacatgcagccgcttcctgaagaccccctcatgcggaggtggccagcacatcactattccaaggaaaaggatgttcactccacgcaagctcaaactgacactctttaatagcgacgtttgctaaaatcaggaggactttgtacctttatgaggaatttttcattttcttcctggctgggttgatgtggaaaccagagctgtctgtggagctgttttccagaccccaggcccattcctgggatctctccaacaggacctgtcctgtgttctgggcttgtctcgggtctgaccaggagatggaggatgtgtccttggcagagccaaggggagacagaggtttctggatgccatgacaggctgtcggggtccaggtggcactcatgggccccctgccccatgtgaatgctgctggcacctggtggggggttgcccagggatggaccctgggcatggcttctgggctgcttagtccagggggagcaacttgtggccaaatccatgagttcagaggaaaaggggaaggcactgaaacgtcaccagagagacagctgttgagaccgctcagaaaccctctgtctgtcacactctgccctggctgctgtgtggtcagggcaccatgagggtgtacagatgtgctgtgtcctcagagcctcgcaggtgccctcacttactgcctgggcccctgcccagcagcctcaaggacaggcctttgtccctcacggttgtggacaggaggtcgcaccactggcctgcgagagcctctggtgggcccgtggcttcccccagttatctgctaaggaaaactgtgctcttcgaagggcagagccaagaagtcagccctgacttttgtaaaattttactaaataaaaccacctggat

SEQ ID NO: 118311 - DNA, 790 bp, Homo sapiens
  Payload ID: 3155
  Gene Symbol: C14orf79
  Gene Name: chromosome 14 open reading frame 79
  ENST ID: ENST00000551606
  CDS Start-End: 1-659
gcacgccgttgccaggcaacggggcggcgcaggcaggagggaacggctggttgcaggtttctctcgccctggtcccgcgcggccccgccgaggcggcgaccaagcccattctcagctatgagaacattttaaagtgtgcttttcaagaaataacagtccagcaggcagctgaagacgtttccaccatagaccatttcctagaaataagcagtgaagaaaaacctggcgttgaacgtgtacataaattgtgtaacgaatccagaaaactctggagagcccttcagagcatacacaccacgtctacttctcagcgcctctggagcgagtcccgttgccaggagaacttctttcttgttctcggaatagatgctgcgcagaagaacctttctggaggccagggccacatcatggaagattgtgacctcaaagagcctgaaggactcctcactgtcagcagcttctgtctccagcattgcaaagccctgatccagaccaagctctcggggccgcctggcagcaaacaggggaggctgatgacatgcagccgcttcctgaagaccccctcatgcggaggtggccagcacatcactattccaaggaaaaggatgttcactccacgcaagctcaaactgacactctttaatagcgacgtttgctaaaatcaggaggactttgtacctttatgaggaatttttcattttcttcctggctgggttgatgtggaaaccagagctgtctgtggagctgttttccagaccccaggcccattcctgggatctctccaacagga

SEQ ID NO: 118312 - DNA, 1645 bp, Homo sapiens
  Payload ID: 3155
  Gene Symbol: C14orf79
  Gene Name: chromosome 14 open reading frame 79
  ENST ID: ENST00000548641
  CDS Start-End: 97-654
aggggaaggttgggcagtcctgggcggccagcaccccggcgtgcatgtctcctgagcagctgcccatcgggcctctgctggcctgggggctccaagatgcaaggccggcgggagctggggggagagcctttgagtgacctccaggaggaagcagccagcgcttccctccgagtggcacctgagaggctgagtgatgacagtttggaatggagacggacctgccccgaccttctcctgtccgatgggaaagccagcatctccatgccccgtgagggcggttccacctgcactgcccgatgtcctgaccctggggaacacagcagcacttggggggagtttgaaggctttcgggaatcttcagccaagtctggacaattctcacagtcccttgaactcctcgagggacccacagaaccccagccaccgagaaccacttctgccccaaaagagtgcagttctcaccaaccatgccagggtggaccttgggtgacaggaacttctgccgtcccaccttctgagcccattctcagctatgagaacattttaaagtgtgcttttcaagaaataacagtccagcaggcagctgaagacgtttccaccatagaccatttcctagaaataagcagtgaagaaaaacctggcgttgaacgttaacgaatccagaaaactctggagagcccttcagagcatacacaccacgtctacttctcagcgcctctggagcgagtcccgttgccaggagaacttctttcttgttctcggaatagatgctgcgcagaagaacctttctggaggccagggccacatcatggaagattgtgacctcaaagagcctgaaggactcctcactgtcagcagcttctgtctccagcattgcaaagccctgatccagaccaagctctcggggccgcctggcagcaaacaggggaggctgatgacatgcagccgcttcctgaagaccccctcatgcggaggtggccagcacatcactattccaaggaaaaggatgttcactccacgcaagctcaaactgacactctttaatagcgacgtttgctaaaatcaggaggactttgtacctttatgaggaatttttcattttcttcctggctgggttgatgtggaaaccagagctgtctgtggagctgttttccagaccccaggcccattcctgggatctctccaacaggacctgtcctgtgttctgggcttgtctcgggtctgaccaggagatggaggatgtgtccttggcagagccaaggggagacagaggtttctggatgccatgacaggctgtcggggtccaggtggcactcatgggccccctgccccatgtgaatgctgctggcacctggtggggggttgcccagggatggaccctgggcatggcttctgggctgcttagtccagggggagcaacttgtggccaaatccatgagttcagaggaaaaggggaaggcactgaaacgtcaccagagagacagctgttgagaccgctcagaaaccctctgtctgtcacactctgccctggctgctgtgtggtcagggcaccatgagggtgtacagatgtgctgtgtcctcagagcctcgcaggtgccctcacttactgcctgggcccctgcccagcagcctcaaggacaggcct

SEQ ID NO: 118313 - DNA, 1912 bp, Homo sapiens
  Payload ID: 3155
  Gene Symbol: C14orf79
  Gene Name: chromosome 14 open reading frame 79
  ENST ID: ENST00000550614
  CDS Start-End: 902-1153
attttaaagtgtgcttttcaagaaataacagtccagcaggcagctgaagacgtttccaccatagaccatttcctagaaataagcagtgaagaaaaacctggcgttgaacgtgtacataaattgtggtaatgaactgaagaaatatttcttacagcaactgcttttgtacttttgtttgataaaagtaggtgtgtgaggctttgtttttgcctttatggagagtagcatctctcctgaggtccctgccatctgtgggtcataggggtcctatgagaaggggcagcacgattggcgctccagctgtggccttccactctgagccctattcatcctcctccccagccagctcacctggagcagctggacccaagcccagctccccttgggtctcagtgccagtgctggtggagtgggtgggggcctcgcattcagtgcgagtggctggtgggcctgggcagtgggcacaggggccttctgggggacttggctgagtgggcaccggctgcctcatggttctcagccacagagttctagaaaacgttccacactctggagccccattgtcagccccaggcccagccccaggggtgctcccggtgctgcctgcagggccacaggctcctaggggaaagtgcacccgcagtcactcgcagatggccattttccagggacacactttcaactgagcattgaaagacagacagcgctcgagtggattaggccgcagtggttgagaagctcgagtaacgaatccagaaaactctggagagcccttcagagcatacacaccacgtctacttctcagcgcctctggagcgagtcccgttgccaggagaacttctttcttgttctcggaatagatgctgcgcagaagaacctttctggaggccagggccacatcatggaagattgtgacctcaaagagcctgaaggactcctcactgtcagcagcttctgtctccagcattgcaaagccctgatccagaccaagctctcggggccgcctggcagcaaacaggggaggctgatgacatgcagccgcttcctgaagaccccctcatgcggaggtggccagcacatcactattccaaggaaaaggatgttcactccacgcaagctcaaactgacactctttaatagcgacgtttgctaaaatcaggaggactttgtacctttatgaggaatttttcattttcttcctggctgggttgatgtggaaaccagagctgtctgtggagctgttttccagaccccaggcccattcctgggatctctccaacaggacctgtcctgtgttctgggcttgtctcgggtctgaccaggagatggaggatgtgtccttggcagagccaaggggagacagaggtttctggatgccatgacaggctgtcggggtccaggtggcactcatgggccccctgccccatgtgaatgctgctggcacctggtggggggttgcccagggatggaccctgggcatggcttctgggctgcttagtccagggggagcaacttgtggccaaatccatgagttcagaggaaaaggggaaggcactgaaacgtcaccagagagacagctgttgagaccgctcagaaaccctctgtctgtcacactctgccctggctgctgtgtggtcagggcaccatgagggtgtacagatgtgctgtgtcctcagagcctcgcaggtgccctcacttactgcctgggcccctgcccagcagcctcaaggacaggcctttgtccctcacggttgtggacaggaggtcgcaccactggcctgcgagagcctctggtgggcccgtggcttcccccagttatctgctaaggaaaactgtgctcttcgaagggcagagccaagaagtcagccctgacttttgtaaaattttactaaataaaaccacctggataagc

SEQ ID NO: 118314 - DNA, 2370 bp, Homo sapiens
  Payload ID: 3155
  Gene Symbol: C14orf79
  Gene Name: chromosome 14 open reading frame 79
  Uniprot ID: Q96F83
  ENST ID: ENST00000547315
  CDS Start-End: 640-1617
acggggcggcgcaggcaggagggaacggctggttgcaggtttctctcgccctggtcccgcgcggccccgccgaggcggcgaccaaggtgggtgcggggactctcgggagccgtgggccaggcgcttagccggccacctcgggccctgtccaggcccaggcgttccagggctgctctgcgggccgcgtgcgagagggactctcgggaggccccggggcgccgcacccactccttcccacttgggactcccgcgggcgcccggctctcgctcctctggccagcgtgggcctcccaggccccctcgcggctctctccagagcaggagccccaccttgggccgcccctctcacacctgccgtgggtctggtacgcgcctctgtgtcggactccgcgcccgcctgcgtgggaggaagccaggactcccgggcgaccgggccattcctgtggtttgtgtcagttccacagcagcacgtgggcactttccaccgtcagccactgggcagcccggggcactcctgcagcgtcccctggccctctccagggcaggggaaggttgggcagtcctgggcggccagcaccccggcgtgcatgtctcctgagcagctgcccatcgggcctctgctggcctgggggctccaagatgcaaggccggcgggagctggggggagagcctttgagtgacctccaggaggaagcagccagcgcttccctccgagtggcacctgagaggctgagtgatgacagtttggaatggagacggacctgccccgaccttctcctgtccgatgggaaagccagcatctccatgccccgtgagggcggttccacctgcactgcccgatgtcctgaccctggggaacacagcagcacttggggggagtttgaaggctttcgggaatcttcagccaagtctggacaattctcacagtcccttgaactcctcgagggacccacagaaccccagccaccgagaaccacttctgccccaaaagagtgcagttctcaccaaccatgccagggtggaccttgggtgacaggaacttctgccgtcccaccttctgagcccattctcagctatgagaacattttaaagtgtgcttttcaagaaataacagtccagcaggcagctgaagacgtttccaccatagaccatttcctagaaataagcagtgaagaaaaacctggcgttgaacgtgtacataaattgtgtaacgaatccagaaaactctggagagcccttcagagcatacacaccacgtctacttctcagcgcctctggagcgagtcccgttgccaggagaacttctttcttgttctcggaatagatgctgcgcagaagaacctttctggaggccagggccacatcatggaagattgtgacctcaaagagcctgaaggactcctcactgtcagcagcttctgtctccagcattgcaaagccctgatccagaccaagctctcggggccgcctggcagcaaacaggggaggctgatgacatgcagccgcttcctgaagaccccctcatgcggaggtggccagcacatcactattccaaggaaaaggatgttcactccacgcaagctcaaactgacactctttaatagcgacgtttgctaaaatcaggaggactttgtacctttatgaggaatttttcattttcttcctggctgggttgatgtggaaaccagagctgtctgtggagctgttttccagaccccaggcccattcctgggatctctccaacaggacctgtcctgtgttctgggcttgtctcgggtctgaccaggagatggaggatgtgtccttggcagagccaaggggagacagaggtttctggatgccatgacaggctgtcggggtccaggtggcactcatgggccccctgccccatgtgaatgctgctggcacctggtggggggttgcccagggatggaccctgggcatggcttctgggctgcttagtccagggggagcaacttgtggccaaatccatgagttcagaggaaaaggggaaggcactgaaacgtcaccagagagacagctgttgagaccgctcagaaaccctctgtctgtcacactctgccctggctgctgtgtggtcagggcaccatgagggtgtacagatgtgctgtgtcctcagagcctcgcaggtgccctcacttactgcctgggcccctgcccagcagcctcaaggacaggcctttgtccctcacggttgtggacaggaggtcgcaccactggcctgcgagagcctctggtgggcccgtggcttcccccagttatctgctaaggaaaactgtgctcttcgaagggcagagccaagaagtcagccctgacttttgtaaaattttactaaataaaaccacctgg

SEQ ID NO: 118315 - DNA, 2503 bp, Homo sapiens
  Payload ID: 3155
  Gene Symbol: C14orf79
  Gene Name: chromosome 14 open reading frame 79
  ENST ID: ENST00000549240
  CDS Start-End: 1809-2060
ttgtgtctctgagcaggcctggactttcagagagctctgcagacaggccattctgggctccagccctggcccaccgtgtcctctgctggggtccaaccagcacctgccccagggtaccctctacaggggcttgaggacagaggcctggagcccagaaggccgcaaccagcattgcccagatggcccgtgtgccctctgtgtgtggtgcttctgcaaagcatgatccctggggaaaaactgtggagaatgtggtcccagcaagctgacggtgggggtgggctctgtgctggcagcattgacatctctgtccccagcagcacaactcgcggacccagaggcatggggagtcctgggtgtcaggacttggcggggctggacactcgtgggacagaaggctggatggtactttgggggtggagtagagcatggtttgtgtgttctgaaacactggggtatttttggaaatggtttggtgtttagcacatttgctcttcttctgtactcatctggagtgcagtggcaccatctcagctcactacagcctccgtctcctaggcttaagcgatcttcctgcctcagcctcctgagtactgggactacaggcacccgccactacacccagctaatttttgtattttttgtagagacagggttttgctatgttgctcaggctggtctcaaactcctgagctcaagtgatttgccctcctcagtctcccaaagtgctgggtttacaggtgtgagctgccgcacctgcccttgcactcattttcccttccatactagaacgtgaacttcctgcaggcagaccttctcagtccctcacagtgcgtagcagtgacgtgtggcacatagtagacattcaccgttggtttgctcatttgttctcctgagcatgcactggtactcgtagtttgggagcatctgttttgtactcagcacagttctaggcacttgagtgaacaaaaccagcaaaatatctggtctcacggagcttccactccttggaggagacagtaacggcagtaagtcagctactccagggcaggtgctgtgaggcatagagggggcacgggaggtgggttggggtgttgaaggatggcacgtgttgtttgaataaaagtataaatgaacaaataaatgagacagcccagtgctcctgcagggaatgctgtttttatttgtttttttgtttgtttgtttgagacagagtctcactctgtcccccaggctggagtgcagtggcgcgatctccgctccctgcaacctccgcctcccgggttcaagcgattctcctgcctcagcctccccagtagctgggatgacaggcgcccatcaccacgcccggctatttttttgtatttttagtagagacggggtttcactatgttggccaggcagatcttgaactcctgacctcctgatctgtcagcctcagcctcccaaagtgctgggattacaggcgtgagccactgtgcccagcccgggaacactgtttttagagttcttaacagccatacgcctcttggcttgtgcgcgtctcggcttgcgggtaaaggccaggcgccccgctgcgtgcctcgggccgtgcctcatgatctcctcagaaggctctcaaggtcaccttttaacaagtgcatctgttttccagtaacgaatccagaaaactctggagagcccttcagagcatacacaccacgtctacttctcagcgcctctggagcgagtcccgttgccaggagaacttctttcttgttctcggaatagatgctgcgcagaagaacctttctggaggccagggccacatcatggaagattgtgacctcaaagagcctgaaggactcctcactgtcagcagcttctgtctccagcattgcaaagccctgatccagaccaagctctcggggccgcctggcagcaaacaggggaggctgatgacatgcagccgcttcctgaagaccccctcatgcggaggtggccagcacatcactattccaaggaaaaggatgttcactccacgcaagctcaaactgacactctttaatagcgacgtttgctaaaatcaggaggactttgtacctttatgaggaatttttcattttcttcctggctgggttgatgtggaaaccagagctgtctgtggagctgttttccagaccccaggcccattcctgggatctctccaacaggacctgtcctgtgttctgggcttgtctcgggtctgaccaggagatggaggatgtgtccttggcagagccaaggggagacagaggtttctggatgccatgacaggctgtcggggtccaggtggcactcatgggccccctgccccatgtgaatgctgctggcacctggtggggggttgcccagggatggaccctgggcatggcttctgggctgcttagtccagggggagcaacttgtggccaaatccatgagttcagaggaaaaggggaaggcactgaaacgtcaccagagagacagctgttgagaccgctcagaa

SEQ ID NO: 118316 - DNA, 1947 bp, Homo sapiens
  Payload ID: 3156
  Gene Symbol: C14orf80
  Gene Name: chromosome 14 open reading frame 80
  Uniprot ID: Q86SX3
  ENST ID: ENST00000329886
  CDS Start-End: 254-1318
gggagagcgctgaacaaggccgcagagctgctccgccatctcccccacgcctcctgccaagttctgtggcgccgcggttccccacctcctgctcccatccccctggctcccgccgccctgtagctcggcagccctgccaggagcccggaagtgggtccgcacgagacagaatagactacactcaaactccaggggaaccgttcattgggcttggacacgaaggcgggaccctgccgacgcagtgattggatgcatgtccggccagcgcggtgattgggtacagacctccgcgctctggcagctcctcttccgtgtgctctcgccactccctgcgggcaacgccttggcatcgctcgccctggaggtccaagcccgcttggtgaagtcagcactatgctcccagggctacccgaggctggcactggcacaactacctgaggatggctcgcagggcagtcgggagctgctgctggctctgtcctggctcttggcccgaggacctgtgcccgagcagatgctggcccaggcccgagtgcctctgggtgacgagatgactgtgtgccagtgtgaggccctggccagccctggcccacctgcaccccacatggaagcagagggtcctgtggatgtccgccatgtgcagtggctgatgggaaagctgcggttccggtggcgccagctggtgtccagtcagcaggagcagtgcgccctcctgagcaagctgctgcggactctggagcgtgagaaccagcgcctggaggctgtcctggcgtggcggcgctctgagctggtcttctggcggtggatggacacggtcctgggcacctgtgccccggaggtgcctgctgcagcctcacagcccaccttcctgccctgggtccccgagcgcgggggtggcgagttggacctggtagtgcgggagctgcaggcactggaggaggagctgcgggaggctgcggagcgcaggcgggcggcctgggaggccaaggctggaggctgtggacgggggccagagtggagtgccgcgcggcgggcctctcgggaggctgtggaaaaggagctgggagctctacagcagtgctgggagcgagacggtggcccggcccagccccatgggccacaccggctggtgagacgagaggatggggcagcaggggaccgggacctgcgggcagctgtggtgatcaggacgctgaggagccaggaggcctgcctggaggcggtgctacgtcgactacagggacagtgtcggcaggaactggccaggctggtgggagcccgccctggtctcatctggatcccgccacctggacgctgagggcctgtcgacgggccctcgtgtgggaagcctgccctggcccagcctggctgggtcttggaggagcagattccaaggccaggtggccgcagggacgatgcagatgcagagcccacgtcacatgctcgctccaggggtggggctgggctgactctggccggatcccaggcctgtggctagcagcactggggacaggaatggctggtcccttgaggaggtcgtgacaggctcagcctggtggtctggaggggactcggaaataaattgtagcagctttcctgccgctggccctccccctgccaccctgtcgggtttccctgtttgggggtgggagcgtggaggagcccctgggcagtggtggccagtgtagggctggccaggtgctggaggacatgcataccccagcactggtgagtggcaggaccacggggaggtggcacaggcctccctggagcgggattatctcggccccgccccccttcatttgggctcccgctgtgggcctggccctgggctgtgagcacagctgcccccacctccggccaaggctgtgcctggtgggtgcgccggatgggagcccggggctctgctccttcccgggaggtggtgctccgggtggggaggcacag

SEQ ID NO: 118317 - DNA, 1358 bp, Homo sapiens
  Payload ID: 3156
  Gene Symbol: C14orf80
  Gene Name: chromosome 14 open reading frame 80
  Uniprot ID: Q86SX3
  ENST ID: ENST00000334656
  CDS Start-End: 330-1076
gctggctgcatggggaggcggcggcagcgggtggaccccgcggctggggcccgggccggggccctgcctgaggccatcgccgcgttgagtcggtcgctgccctcgggacccagccccgagatcttccgccgcgccaagttcgaccgtccggaggcgacctccgcgctctggcagctcctcttccgtgtgctctcgccactccctgcgggcaacgccttggctacccgaggctggcactggcacaactacctgaggatggctcgcagggcagtcgggagctgctgctggctctgtcctggctcttggcccgaggacctgtgcccgagcagatgctggcccaggcccgagtgcctctgggtgacgagatgactgtgtgccagatccacctgtacacacgcggctgccacagcgaccagagccttagccatctgtctgtcactgaagcagagatgctcagggacccagagggaggccagcagctgctgcggactctggagcgtgagaaccagcgcctggaggctgtcctggcgtggcggcgctctgagctggtcttctggcggtggatggacacggtcctgggcacctgtgccccggaggtgcctgctgcagcctcacagcccaccttcctgccctgggtccccgagcgcgggggtggcgagttggacctggtagtgcgggagctgcaggcactggaggaggagctgcgggaggctgcggagcgcaggcgggcggcctgggaggccaaggctggaggctgtggacgggggccagagtggagtgccgcgcggcgggcctctcgggaggctgtggaaaaggagctgggagctctacagcagtgctgggagcgagacggtggcccggcccagccccatgggccacaccggctggtgagacgagaggatggggcagcaggggaccgggacctgcgggcagctgtggtgatcaggacgctgaggagccaggaggcctgcctggaggcggtgctacgtcgactacagggacagtgtcggcaggaactggccaggctggtgggagcccgccctggtctcatctggatcccgccacctggacgctgagggcctgtcgacgggccctcgtgtgggaagcctgccctggcccagcctggctgggtcttggaggagcagattccaaggccaggtggccgcagggacgatgcagatgcagagcccacgtcacatgctcgctccaggggtggggctgggctgactctggccggatcccaggcctgtggctagcagcactggggacaggaatggctggtcccttgaggaggtcgtgacaggctcagcctggtggtctggaggggactcggaaataaattgtagcagctttcctgc

SEQ ID NO: 118318 - DNA, 1553 bp, Homo sapiens
  Payload ID: 3156
  Gene Symbol: C14orf80
  Gene Name: chromosome 14 open reading frame 80
  Uniprot ID: Q86SX3
  ENST ID: ENST00000354560
  CDS Start-End: 109-1290
tgggcgcaggtcccagccgccgcactaaacccggcccgtgcggtgattggacgcaggccccgggccgcggcggaggcgggcgatccgaaagaggctggtgctggctgcatggggaggcggcggcagcgggtggaccccgcggctggggcccgggccggggccctgcctgaggccatcgccgcgttgagtcggtcgctgccctcgggacccagccccgagatcttccgccgcgccaagttcgaccgtccggaggcgacctccgcgctctggcagctcctcttccgtgtgctctcgccactccctgcgggcaacgccttggcatcgctcgccctggaggtccaagcccgcttggtgaagtcagcactatgctcccagggctacccgaggctggcactggcacaactacctgaggatggctcgcagggcagtcgggagctgctgctggctctgtcctggctcttggcccgaggacctgtgcccgagcagatgctggcccaggcccgagtgcctctgggtgacgagatgactgtgtgccagtgtgaggccctggccagccctggcccacctgcaccccacatggaagcagagggtcctgtggatgtccgccatgtgcagtggctgatgggaaagctgcggttccggtggcgccagctggtgtccagtcagcaggagcagtgcgccctcctgagcaagctgctgcggactctggagcgtgagaaccagcgcctggaggctgtcctggcgtggcggcgctctgagctggtcttctggcggtggatggacacggtcctgggcacctgtgccccggaggtgcctgctgcagcctcacagcccaccttcctgccctgggtccccgagcgcgggggtggcgagttggacctggtagtgcgggagctgcaggcactggaggaggagctgcgggaggctgcggagcgcaggcgggcggcctgggaggccaaggctggaggctgtggacgggggccagagtggagtgccgcgcggcgggcctctcgggaggctgtggaaaaggagctgggagctctacagcagtgctgggagcgagacggtggcccggcccagccccatgggccacaccggctggtgagacgagaggatggggcagcaggggaccgggacctgcgggcagctgtggtgatcaggacgctgaggagccaggaggcctgcctggaggcggtgctacgtcgactacagggacagtgtcggcaggaactggccaggctggtgggagcccgccctggtctcatctggatcccgccacctggacgctgagggcctgtcgacgggccctcgtgtgggaagcctgccctggcccagcctggctgggtcttggaggagcagattccaaggccaggtggccgcagggacgatgcagatgcagagcccacgtcacatgctcgctccaggggtggggctgggctgactctggccggatcccaggcctgtggctagcagcactggggacaggaatggctggtcccttgaggaggtcgtgacaggctcagcctggtggtctggaggggactcggaaataa

SEQ ID NO: 118319 - DNA, 1630 bp, Homo sapiens
  Payload ID: 3156
  Gene Symbol: C14orf80
  Gene Name: chromosome 14 open reading frame 80
  Uniprot ID: Q86SX3
  ENST ID: ENST00000392522
  CDS Start-End: 128-1408
ttccagccggagcggtaactgggcgcaggtcccagccgccgcactaaacccggcccgtgcggtgattggacgcaggccccgggccgcggcggaggcgggcgatccgaaagaggctggtgctggctgcatggggaggcggcggcagcgggtggaccccgcggctggggcccgggccggggccctgcctgaggccatcgccgcgttgagtcggtcgctgccctcgggacccagccccgagatcttccgccgcgccaagttcgaccgtccggaggcgacctccgcgctctggcagctcctcttccgtgtgctctcgccactccctgcgggcaacgccttggcatcgctcgccctggaggtccaagcccgcttggtgaagtcagcactatgctcccagggctacccgaggctggcactggcacaactacctgaggatggctcgcagggcagtcgggagctgctgctggctctgtcctggctcttggcccgaggacctgtgcccgagcagatgctggcccaggcccgagtgcctctgggtgacgagatgactgtgtgccagtgtgaggccctggccagccctggcccacctgcaccccacatggaagcagagggtcctgtggatgtccgccatgtgcagtggctgatgggaaagctgcggttccggtggcgccagctggtgtccagtcagcaggagcagtgcgccctcctgagcaagatccacctgtacacacgcggctgccacagcgaccagagccttagccatctgtctgtcactgaagcagagatgctcagggacccagagggaggccagcagctgctgcggactctggagcgtgagaaccagcgcctggaggctgtcctggcgtggcggcgctctgagctggtcttctggcggtggatggacacggtcctgggcacctgtgccccggaggtgcctgctgcagcctcacagcccaccttcctgccctgggtccccgagcgcgggggtggcgagttggacctggtagtgcgggagctgcaggcactggaggaggagctgcgggaggctgcggagcgcaggcgggcggcctgggaggccaaggctggaggctgtggacgggggccagagtggagtgccgcgcggcgggcctctcgggaggctgtggaaaaggagctgggagctctacagcagtgctgggagcgagacggtggcccggcccagccccatgggccacaccggctggtgagacgagaggatggggcagcaggggaccgggacctgcgggcagctgtggtgatcaggacgctgaggagccaggaggcctgcctggaggcggtgctacgtcgactacagggacagtgtcggcaggaactggccaggctggtgggagcccgccctggtctcatctggatcccgccacctggacgctgagggcctgtcgacgggccctcgtgtgggaagcctgccctggcccagcctggctgggtcttggaggagcagattccaaggccaggtggccgcagggacgatgcagatgcagagcccacgtcacatgctcgctccaggggtggggctgggctgactctggccggatcccaggcctgtggctagcagcactggggacaggaatggctggtcccttgaggaggtcgt

SEQ ID NO: 118320 - DNA, 1845 bp, Homo sapiens
  Payload ID: 3156
  Gene Symbol: C14orf80
  Gene Name: chromosome 14 open reading frame 80
  Uniprot ID: Q86SX3
  ENST ID: ENST00000392523
  CDS Start-End: 122-1609
ccggagcggtaactgggcgcaggtcccagccgccgcactaaacccggcccgtgcggtgattggacgcaggccccgggccgcggcggaggcgggcgatccgaaagaggctggtgctggctgcatggggaggcggcggcagcgggtggaccccgcggctggggcccgggccggggccctgcctgaggccatcgccgcgttgagtcggtcgctgccctcgggacccagccccgagatcttccgccgcgccaagttcgaccgtccggaggcgacctccgcgctctggcagctcctcttccgtgtgctctcgccactccctgcgggcaacgccttggcatcgctcgccctggaggtccaagcccgcttggtgaagtcagcactatgctcccagggctacccgaggctggcactggcacaactacctgaggatggctcgcagggcagtcgggagctgctgctggctctgtcctggctcttggcccgaggacctgtgcccgagcagatgctggcccaggcccgagtgcctctgggtgacgagatgactgtgtgccagtgtgaggccctggccagccctggcccacctgcaccccacatggaagcagagggtcctgtggatgtccgccatgtgcagtggctgatgggaaagctgcggttccggtggcgccagctggtgtccagtcagcaggagcagtgcgccctcctgagcaagatccacctgtacacacgcggctgccacagcgaccagagccttagccatctgtctgtcactgaagcagagatgctcagggacccagagggaggccagcaggtttctggagcgggagctgcccaaaacctggacctggcctacccaaagtgcctgcactccttctgcactcctgggatgggtcccagaaccttctggaatgatctgtggctggtatgtgagcagccaggtctgctgccgggtgactgggcagcacccttggatcctggtggggcctcagcctgcagcctgctctccccttttagggcgctgctgcggactctggagcgtgagaaccagcgcctggaggctgtcctggcgtggcggcgctctgagctggtcttctggcggtggatggacacggtcctgggcacctgtgccccggaggtgcctgctgcagcctcacagcccaccttcctgccctgggtccccgagcgcgggggtggcgagttggacctggtagtgcgggagctgcaggcactggaggaggagctgcgggaggctgcggagcgcaggcgggcggcctgggaggccaaggctggaggctgtggacgggggccagagtggagtgccgcgcggcgggcctctcgggaggctgtggaaaaggagctgggagctctacagcagtgctgggagcgagacggtggcccggcccagccccatgggccacaccggctggtgagacgagaggatggggcagcaggggaccgggacctgcgggcagctgtggtgatcaggacgctgaggagccaggaggcctgcctggaggcggtgctacgtcgactacagggacagtgtcggcaggaactggccaggctggtgggagcccgccctggtctcatctggatcccgccacctggacgctgagggcctgtcgacgggccctcgtgtgggaagcctgccctggcccagcctggctgggtcttggaggagcagattccaaggccaggtggccgcagggacgatgcagatgcagagcccacgtcacatgctcgctccaggggtggggctgggctgactctggccggatcccaggcctgtggctagcagcactggggacaggaatggctggtcccttgaggaggtcgtgacaggctcagcct

SEQ ID NO: 118321 - DNA, 1476 bp, Homo sapiens
  Payload ID: 3156
  Gene Symbol: C14orf80
  Gene Name: chromosome 14 open reading frame 80
  Uniprot ID: Q86SX3
  ENST ID: ENST00000392527
  CDS Start-End: 178-1236
gccgggagggccgcctggaagaggaggtcgggggcgaaggaggccgagaagaaagccctgccaggagcccggaagtgggtccgcacgagacagaatagactacactcaaactccaggggaaccgttcattgggcttggacacgaaggcgggaccctgccgacgcagtgattggatgcatgtccggccagcgcggtgattggacctccgcgctctggcagctcctcttccgtgtgctctcgccactccctgcgggcaacgccttggcatcgctcgccctggaggtccaagcccgcttggtgaagtcagcactatgctcccagggctacccgaggctggcactggcacaactacctgaggatggctcgcagggcagtcgggagctgctgctggctctgtcctggctcttggcccgaggacctgtgcccgagcagatgctggcccaggcccgagtgcctctgggtgacgagatgactgtgtgccagtgtgaggccctggccagccctggcccacctgcaccccacatggaagcagagggtcctgtggatgtccgccatgtgcagtggctgatgggaaagctgcggttccggtggcgccagctggtgtccagtcagcaggagcagtgcgccctcctgagcaagctgctgcggactctggagcgtgagaaccagcgcctggaggctgtcctggcgtggcggcgctctgagctggtcttctggcggtggatggacacggtcctgggcacctgtgccccggaggtgcctgctgcagcctcacagcccaccttcctgccctgggtccccgagcgcgggggtggcgagttggacctggtagtgcgggagctgcaggcactggaggaggagctgcgggaggctgcggagcgcaggcgggcggcctgggaggccaaggctggaggctgtggacgggggccagagtggagtgccgcgcggcgggcctctcgggaggctgtggaaaaggagctgggagctctacagcagtgctgggagcgagacggtggcccggcccagccccatgggccacaccggctggtgagacgagaggatggggcagcaggggaccgggacctgcgggcagctgtggtgatcaggacgctgaggagccaggaggcctgcctggaggcggtgctacgtcgactacagggacagtgtcggcaggaactggccaggctggtgggagcccgccctggtctcatctggatcccgccacctggacgctgagggcctgtcgacgggccctcgtgtgggaagcctgccctggcccagcctggctgggtcttggaggagcagattccaaggccaggtggccgcagggacgatgcagatgcagagcccacgtcacatgctcgctccaggggtggggctgggctgactctggccggatcccaggcctgtggctagcagcactggggacaggaatggctggtcccttgaggaggtcgtgacaggctcagcctggtg

SEQ ID NO: 118322 - DNA, 543 bp, Homo sapiens
  Payload ID: 3156
  Gene Symbol: C14orf80
  Gene Name: chromosome 14 open reading frame 80
  ENST ID: ENST00000427614
  CDS Start-End: 304-543
gctgaacaaggccgcagagctgctccgccatctcccccacgcctcctgccaagttctgtggcgccgcggttccccacctcctgctcccatccccctggctcccgccgccctgtagctcggcaggtgcagtaggcgctccgaggaggaggccccttagcttcaagaaacccgcgtgggcgggccctgccaggagcccggaagtgggtccgcacgagacagaatagactacactcaaactccaggggaaccgttcattgggcttggacacgaaggcgggaccctgccgacgcagtgattggatgcatgtccggccagcgcggtgattggacctccgcgctctggcagctcctcttccgtgtgctctcgccactccctgcgggcaacgccttggcatcgctcgccctggaggtccaagcccgcttggtgaagtcagcactatgctcccagggctacccgaggctggcactggcacaactacctgaggatggctcgcagggcagtcgggagctgctgctggctctgtcctggctcttggcccgagga

SEQ ID NO: 118323 - DNA, 1107 bp, Homo sapiens
  Payload ID: 3156
  Gene Symbol: C14orf80
  Gene Name: chromosome 14 open reading frame 80
  Uniprot ID: Q86SX3
  ENST ID: ENST00000450383
  CDS Start-End: 361-1107
cgggtggaccccgcggctggggcccgggccggggccctgcctgaggccatcgccgcgttgagtcggtcgctgccctcgggacccagccccgagatcttccgccgcgccaagttcgaccgtccggaggcgacctccgcgctctggcagctcctcttccgtgtgctctcgccactccctgcgggcaacgccttggcatcgctcgccctggaggtccaagcccgcttggtgaagtcagcactatgctcccagggctacccgaggctggcactggcacaactacctgaggatggctcgcagggcagtcgggagctgctgctggctctgtcctggctcttggcccgaggacctgtgcccgagcagatgctggcccaggcccgagtgcctctgggtgacgagatgactgtgtgccagatccacctgtacacacgcggctgccacagcgaccagagccttagccatctgtctgtcactgaagcagagatgctcagggacccagagggaggccagcagctgctgcggactctggagcgtgagaaccagcgcctggaggctgtcctggcgtggcggcgctctgagctggtcttctggcggtggatggacacggtcctgggcacctgtgccccggaggtgcctgctgcagcctcacagcccaccttcctgccctgggtccccgagcgcgggggtggcgagttggacctggtagtgcgggagctgcaggcactggaggaggagctgcgggaggctgcggagcgcaggcgggcggcctgggaggccaaggctggaggctgtggacgggggccagagtggagtgccgcgcggcgggcctctcgggaggctgtggaaaaggagctgggagctctacagcagtgctgggagcgagacggtggcccggcccagccccatgggccacaccggctggtgagacgagaggatggggcagcaggggaccgggacctgcgggcagctgtggtgatcaggacgctgaggagccaggaggcctgcctggaggcggtgctacgtcgactacagggacagtgtcggcaggaactggccaggctggtgggagcccgccctggtctcatctggatcccgccacctggacgctga

SEQ ID NO: 118324 - DNA, 966 bp, Homo sapiens
  Payload ID: 3156
  Gene Symbol: C14orf80
  Gene Name: chromosome 14 open reading frame 80
  ENST ID: ENST00000443229
  CDS Start-End: 636-966
gtccagggaggactgagtttccctctcccgccgtcctcgcagccccgggaggtgcaggggcatcgcgggaacagccccggtgacacgctgcccggggtcttcacgaatgcccggaggcgccgctggccagaagccagcccgaccttccatccccgcagacagccccacgttcctcccggcccgcgtctttcggggccgcccgtgcaggcgggcccggctcagcggcgcccgggcagcagctgcttccatgcgccggcttcctccggggctgctccgtggcggcggcagagggaagcgctgccgcgggcgggcgaggatcgggagcgcctgaggaggctgccgcgggctccggctgcgcgttcggggcgggggagctgcccgggacttcgcgccaggggccaggggccggccgcgctggggtctgcgctgtgcggcgcggcgggctctgggcgcctcctggcggcccagcctggaaggcggcgcgatggggcgaggctcgtccgctccgactgcccctgccaggagcccggaagtgggtccgcacgagacagaatagactacactcaaactccaggggaaccgttcattgggcttggacacgaaggcgggaccctgccgacgcagtgattggatgcatgtccggccagcgcggtgattggacctccgcgctctggcagctcctcttccgtgtgctctcgccactccctgcgggcaacgccttggcatcgctcgccctggaggtccaagcccgcttggtgaagtcagcactatgctcccagggctacccgaggctggcactggcacaactacctgaggatggctcgcagggcagtcgggagctgctgctggctctgtcctggctcttggcccgaggacctgtgcccgagcagatgctggcccaggcccgagtgcctctgggtgacgagatgactgtgtgccagtgtgaggccctggccagccctggcc

SEQ ID NO: 118325 - DNA, 880 bp, Homo sapiens
  Payload ID: 3156
  Gene Symbol: C14orf80
  Gene Name: chromosome 14 open reading frame 80
  ENST ID: ENST00000455454
  CDS Start-End: 233-880
gcagagctgctccgccatctcccccacgcctcctgccaagttctgtggcgccgcggttccccacctcctgctcccatccccctggctcccgccgccctgtagctcggcagccctgccaggagcccggaagtgggtccgcacgagacagaatagactacactcaaactccaggggaaccgttcattgggcttggacacgaaggcgggaccctgccgacgcagtgattggatgcatgtccggccagcgcggtgattggacctccgcgctctggcagctcctcttccgtgtgctctcgccactccctgcgggcaacgccttggcatcgctcgccctggaggtccaagcccgcttggtgaagtcagcactatgctcccagggctacccgaggctggcactggcacaactacctgaggatggctcgcagggcagtcgggagctgctgctggctctgtcctggctcttggcccgaggacctgtgcccgagcagatgctggcccaggcccgagtgcctctgggtgacgagatgactgtgtgccagtgtgaggccctggccagccctggcccacctgcaccccacatggaagcagagggtcctgtggatgtccgccatgtgcagtggctgatgggaaagctgcggttccggtggcgccagctggtgtccagtcagcaggagcagtgcgccctcctgagcaagatccacctgtacacacgcggctgccacagcgaccagagccttagccatctgtctgtcactgaagcagagatgctcagggacccagagggaggccagcagctgctgcggactctggagcgtgagaaccagcgcctggaggctgtcctggcgtggcggcgctctgagctggtcttctggcggtggatg

SEQ ID NO: 118326 - DNA, 751 bp, Homo sapiens
  Payload ID: 3156
  Gene Symbol: C14orf80
  Gene Name: chromosome 14 open reading frame 80
  ENST ID: ENST00000421892
  CDS Start-End: 281-751
cacgaaggcgggaccctgccgacgcagtgattggatgcatgtccggccagcgcggtgattgggtacaggtctcgggagcgcggtgattggacctccgcgctctggcagctcctcttccgtgtgctctcgccactccctgcgggcaacgccttggcatcgctcgccctggggctacccgaggctggcactggcacaactacctgaggatggctcgcagggcagtcgggagctgctgctggctctgtcctggctcttggcccgaggacctgtgcccgagcagatgctggcccaggcccgagtgcctctgggtgacgagatgactgtgtgccagtgtgaggccctggccagccctggcccacctgcaccccacatggaagcagagggtcctgtggatgtccgccatgtgcagtggctgatgggaaagctgcggttccggtggcgccagctggtgtccagtcagcaggagcagtgcgccctcctgagcaagatccacctgtacacacgcggctgccacagcgaccagagccttagccatctgtctgtcactgaagcagagatgctcagggacccagagggaggccagcagctgctgcggactctggagcgtgagaaccagcgcctggaggctgtcctggcgtggcggcgctctgagctggtcttctggcggtggatggacacggtcctgggcacctgtgccccggaggtgcctgctgcagcctcacagcccaccttcctgccctgggtccccgag

SEQ ID NO: 118327 - DNA, 1144 bp, Homo sapiens
  Payload ID: 3156
  Gene Symbol: C14orf80
  Gene Name: chromosome 14 open reading frame 80
  ENST ID: ENST00000432805
  CDS Start-End: 237-1144
acggagggcgtgcggggagggagaggaggggcttgctggggggggggccccgaggcggggccgggagggccgcctggaagaggaggtcgggggcgaaggaggccgagaagaaagccctgccaggagcccggaagtgggtccgcacgagacagaatagactacactcaaactccaggggaaccgttcattgggcttggacacgaaggcgggaccctgccgacgcagtgattggatgcatgtccggccagcgcggtgattggacctccgcgctctggcagctcctcttccgtgtgctctcgccactccctgcgggcaacgccttggcatcgctcgccctggaggtccaagcccgcttggtgaagtcagcactatgctcccagggctacccgaggctggcactggcacaactacctgaggatggctcgcagggcagtcgggagctgctgctggctctgtcctggctcttggcccgaggacctgtgcccgagcagatgctggcccaggcccgagtgcctctgggtgacgagatgactgtgtgccagtgtgaggccctggccagccctggcccacctgcaccccacatggaagcagagggtcctgtggatgtccgccatgtgcagtggctgatgggaaagctgcggttccggtggcgccagctggtgtccagtcagcaggagcagtgcgccctcctgagcaagatccacctgtacacacgcggctgccacagcgaccagagccttagccatctgtctgtcactgaagcagagatgctcagggacccagagggaggccagcagctgctgcggactctggagcgtgagaaccagcgcctggaggctgtcctggcgtggcggcgctctgagctggtcttctggcggtggatggacacggtcctgggcacctgtgccccggaggtgcctgctgcagcctcacagcccaccttcctgccctgggtccccgagcgcgggggtggcgagttggacctggtagtgcgggagctgcaggcactggaggaggagctgcgggaggctgcggagcgcaggcgggcggcctgggaggccaaggctggaggctgtggacgggggccagagtggagtgccgcgcggcgggcctctcgggaggctgtggaaaaggagctgggagc

SEQ ID NO: 118328 - DNA, 522 bp, Homo sapiens
  Payload ID: 3156
  Gene Symbol: C14orf80
  Gene Name: chromosome 14 open reading frame 80
  ENST ID: ENST00000451719
  CDS Start-End: 359-522
atgattgggctcaggttccagccggagcggtaactgggcgcaggtcccagccgccgcactaaacccggcccgtgcggtgattggacgcaggccccgggccgcggcggaggcgggcgatccgaaagagacctccgcgctctggcagctcctcttccgtgtgctctcgccactccctgcgggcaacgccttggcatcgctcgccctggaggtccaagcccgcttggtgaagtcagcactatgctcccagggctacccgaggctggcactggcacaactacctgaggatggctcgcagggcagtcgggagctgctgctggctctgtcctggctcttggcccgaggacctgtgcccgagcagatgctggcccaggcccgagtgcctctgggtgacgagatgactgtgtgccagtgtgaggccctggccagccctggcccacctgcaccccacatggaagcagagggtcctgtggatgtccgccatgtgcagtggctgatgggaaagctgcggttccggtggcgcca

SEQ ID NO: 118329 - DNA, 1358 bp, Homo sapiens; identical to SEQ ID NO: 118317
  Payload ID: 3156
  Gene Symbol: C14orf80
  Gene Name: chromosome 14 open reading frame 80
  ENST ID: ENST00000548920
  CDS Start-End: 10-369

SEQ ID NO: 118330 - DNA, 3354 bp, Homo sapiens
  Payload ID: 3157
  Gene Symbol: C14orf93
  Gene Name: chromosome 14 open reading frame 93
  Uniprot ID: Q9H972
  ENST ID: ENST00000299088
  CDS Start-End: 431-2047
gagtcctcctttttgcacacacacgaatacaaagagccatacgaccttcggatgccggaaggtccttctgaatcccttccctgttccttaggttgcactagtcgggggttccatgctggggggcagaaggaatgctctctaccgtctgaaaccgttcatcaggaaggccttgatttgtgatgtgctaggagagcacaggatctgcaaatagaaggcacctgtctcccttctgcaggccgaggagaggccgccatggactgtgtgcttcttcatggcttgtttactcttctttcacagaccctacagcttggggcctgggctcctctgaccatcctcattgagaaaggaaagtgagtccagagaagttgatgcttcctacctgttggagcggcccagcagtgtaagcgtggttgttactgccccatccgccatgtccttcagtgccaccattctcttctcccctcccagtggcagcgaggccagatgctgctgctgcgcctgtaagagtgagactaatggaggcaacacaggctcccagggtgggaatcctcctcccagcacccccatcacagtgactggacatggcttggctgttcagagctcagagcagctcctgcatgttatctaccagcgggtcgataaggcagtgggtttggctgaagctgctctgggtcttgccagggccaacaatgagttgttaaaacgtctccaggaggaagtgggtgacctgaggcaagggaaagtgtccatccctgatgaagatggggaaagccgggcacatagttccccacctgaggagcctgggcctctcaaggaaagtcccggggaagcctttaaggctctgtctgccgtggaagaggagtgtgacagcgtgggcagcggcgtgcaggtggtgattgaggagctgcggcagctgggagcagcctcagtggggcctgggcctttgggcttcccagcaactcagagggacatgcggctcccagggtgcacgctggctgccagcgaggcggcccccctgctcaatcctctggtggatgattacgtggcctctgagggtgcagtacagcgagttctggtccctgcttatgccaagcaactctcaccagccacacaactggcaatccagcgggcaaccccagagacaggaccagaaaatggaaccaagctgccaccaccccgccctgaggacatgctcaatgccgctgctgcgctggacagtgccttggaagagtcaggccctgggagcactggggagctgagacactctctagggctgaccgtttccccatgcaggaccagaggaagtgggcagaagaactccaggcgcaagcgggatcttgtactctctaaactggtccacaatgtgcataaccacatcaccaatgacaagagattcaatgggtctgaaagcatcaagtcctcttggaatatttcagtagtgaagtttcttctggaaaagctcaagcaagagctggtgaccagtccccacaattacactgataaggagctaaaaggagcctgtgtggcctacttccttactaagaggcgtgagtaccgcaactccctgaacccctttaaaggcctgaaggaaaaagaggagaagaaacttcgaagtcgccgatatcggctttttgccaaccgatccagtatcatgaggcattttggacctgaggaccaacgtctgtggaatgatgtgacagaggaactgatgtcagatgaagaggacagtcttaacgagccaggtgtgtgggtggcccgccctccccgtttccgggcccagcgcctcacagagctctgctaccacctggatgctaactctaagcatggcaccaaagccaaccgtgtgtatgggcctccctcagacagactgccttctgctgaagcccagctccttccaccagaactttacaatcctaatttccaagaagaggaagatgagggaggggatgagaatgcacctggctccccatcttttgaccaaccccacaaaacctgctgtcctgacttgaactcattcattgaaatcaaggtggaaaaggatgaataaaatctacagccaagaataactctggcttccgccatgccccatgtctcagaaataggtggccatggggcttcacaaaataatgagatgctctgtgcagtctgagaaagcaaatttgcctcttttcttaacacagtctctactggggaagcagaacactggtgggataaaaacttatctagaaggggagaaactccctccactgtgaacagtaagccagaatatgcttattcctcagcataaacagtatctcggagaagcctgggatgagaaaatgaggaggatgggtccaagaaacatgaggccttcttgacatatgccctgtctctgagttgtttctgcccctgcccagttccacccaaagctctgaggaagcagcccaggttgtaccttttgcttccctgtgactacttgtcttgctctgcagtggaaaccgaacatgaccagtgcaggttaataccgccacctggtgggcagtttcagtcatgagcttgagtcttctgaccaagggaacacaagttctatcactattggggaattgggttcctgatataatagctattgtttattgaattacatgaggaaaattttactattcctatcttacagatgaggaaattaaggcttaaagagttcccgtgtctcaccggcagcctctctctcactatgtgaccaagcaaaatacacagctttgtagctgtttcttggtcctgtcagccaagctgtattttgaggaaggggtgtgcattttggatggattgaaaagcaaaaatggctttacatttattcagtcttataacaaacattgatcgctttactaggtgtcaggtactgtgctatggatacattgttgataaggttggatgctgttcagagatttttttagtttagtcaggaagccaggcagtggagtaggcaatgaaatgaactgtgataagggtgaccatggtggagtgtagtgcactatggcaatatacagcaggggtagctaacctactcttgcagtctggaaaggcttcttctgagagggtgtaatgtctaaactggggaagagttaaccagaaggaaaggggaggctaagagagtgttccaaacagggaactgcaggtacaaaagtccaggggcaagagagagtacagacaaggtccagttctactgcagacttttggggaagggataatgctagaggagaggctggagagtgagacagacctcataatacagagtacagacttcaacccaagggcagtgagaaatcattgaaagtttgttttagcagggaaataaaacgacaggttttgcctacaggc

SEQ ID NO: 118331 - DNA, 2221 bp, Homo sapiens
  Payload ID: 3157
  Gene Symbol: C14orf93
  Gene Name: chromosome 14 open reading frame 93
  Uniprot ID: Q9H972
  ENST ID: ENST00000341470
  CDS Start-End: 412-1908
cacacgaatacaaagagccatacgaccttcggatgccggaaggtccttctgaatcccttccctgttccttaggttgcactagtcgggggttccatgctggggggcagaaggaatgctctctaccgtctgaaaccgttcatcaggaaggccttgatttgtgatgtgctaggagagcacaggatctgcaaatagaaggcacctgtctcccttctgcaggccgaggagaggccgccatggactgtgtgcttcttcatggcttgtttactcttctttcacagaccctacagcttggggcctgggctcctctgaccatcctcattgagaaaggaaagtgagtccagagaagttgatgcttcctacctgttggagcggcccagcagtgtaagcgtggttgttactgccccatccgccatgtccttcagtgccaccattctcttctcccctcccagtggcagcgaggccagatgctgctgctgcgcctgtaagagtgagactaatggaggcaacacaggctcccagggtgggaatcctcctcccagcacccccatcacagtgactggacatggcttggctgttcagagctcagagcagctcctgcatgttatctaccagcgggtcgataaggcagtgggtttggctgaagctgctctgggtcttgccagggccaacaatgagttgttaaaacgtctccaggaggaagtgggtgacctgaggcaagggaaagtgtccatccctgatgaagatggggaaagccgggcacatagttccccacctgaggagcctgggcctctcaaggaaagtcccggggaagcctttaaggctctgtctgccgtggaagaggagtgtgacagcgtgggcagcggcgtgcaggtggtgattgaggagctgcggcagctgggagcagcctcagtggggcctgggcctttgggcttcccagcaactcagagggacatgcggctcccagggtgcacgctggctgccagcgaggcggcccccctgctcaatcctctggtggatgattacgtggcctctgagggtgcagtacagcgagttctggtccctgcttatgccaagcaactctcaccagccacacaactggcaatccagcgggcaaccccagagacaggaccagaaaatggaaccaagctgccaccaccccgccctgaggacatgctcaatgccgctgctgcgctggacagtgccttggaagagtcaggccctgggagcactggggagctgagacactctctagggctgaccgtttccccatgcaggaccagaggaagtgggcagaagaactccaggcgcaagcgggatcttgtactctctaaactggtccacaatgtgcataaccacatcaccaatgacaagagattcaatgggtctgaaagcatcaagtcctcttggaatatttcagtagtgaagtttcttctggaaaagctcaagcaagagctggtgaccagtccccacaattacactgataaggagctaaaaggagcctgtgtggcctacttccttactaagaggcgtgagtaccgcaactccctgaacccctttaaaggcctgaaggaaaaagaggagaagaaacttcgaagtcgccgatatcggctttttgccaaccgatccagtatcatgaggcattttggacctgaggaccaacgtctgtggaatgatgtgacagaggaactgatgtcagatgaagaggacagtcttaacgagccagacagactgccttctgctgaagcccagctccttccaccagaactttacaatcctaatttccaagaagaggaagatgagggaggggatgagaatgcacctggctccccatcttttgaccaaccccacaaaacctgctgtcctgacttgaactcattcattgaaatcaaggtggaaaaggatgaataaaatctacagccaagaataactctggcttccgccatgccccatgtctcagaaataggtggccatggggcttcacaaaataatgagatgctctgtgcagtctgagaaagcaaatttgcctcttttcttaacacagtctctactggggaagcagaacactggtgggataaaaacttatctagaaggggagaaactccctccactgtgaacagtaagccagaatatgcttattcctcagcataaacagtatctcggagaagcctgggatgagaaaatgaggaggatgggtccaagaaacatgaggccttcttgacat

SEQ ID NO: 118332 - DNA, 861 bp, Homo sapiens
  Payload ID: 3157
  Gene Symbol: C14orf93
  Gene Name: chromosome 14 open reading frame 93
  ENST ID: ENST00000397376
  CDS Start-End: 484-861
ctttttgcacacacacgaatacaaagagccatacgaccttcggtttcaggtttagctgtgcctcccagtgactataatgacaaggaagctgtaaatgtatttgagttaagcttttgcgagaaaccctacagcttggggcctgggctcctctgaccatcctcattgagaaaggaaagtgagtccagagaagttgatgcttcctacctgttggagcggcccagcagtgaggaagtgggtgacctgaggcaagggaaagtgtccatccctgatgaagatggggaaagccgggcacatagttccccacctgaggagcctgggcctctcaaggaaagtcccggggaagcctttaaggctctgtctgccgtggaagaggagtgtgacagcgtgggcagcggcgtgcaggtggtgattgaggagctgcggcagctgggagcagcctcagtggggcctgggcctttgggcttcccagcaactcagagggacatgcggctcccagggtgcacgctggctgccagcgaggcggcccccctgctcaatcctctggtggatgattacgtggcctctgagggtgcagtacagcgagttctggtccctgcttatgccaagcaactctcaccagccacacaactggcaatccagcgggcaaccccagagacaggaccagaaaatggaaccaagctgccaccaccccgccctgaggacatgctcaatgccgctgctgcgctggacagtgccttggaagagtcaggccctgggagcactggggagctgagacactctctagggctgaccgtttccccatgcaggaccagaggaagtgggcagaagaactccaggcgcaagcgggatcttgtactctct

SEQ ID NO: 118333 - DNA, 1776 bp, Homo sapiens
  Payload ID: 3157
  Gene Symbol: C14orf93
  Gene Name: chromosome 14 open reading frame 93
  ENST ID: ENST00000397377
  CDS Start-End: 630-1706
caaagagccatacgaccttcggatgccggaaggtccttctgaatcccttccctgttccttaggttgcactagtcgggggttccatgctggggggcagaaggaatgctctctaccgtctgaaaccgttcatcaggaaggccttgatttgtgatgtgctaggagagcacaggatctgcaaatagaaggcacctgtctcccttctgcaggccgaggagaggccgccatggactgtgtgcttcttcatggcttgtttactcttctttcacagaccctacagcttggggcctgggctcctctgaccatcctcattgagaaaggaaagtgagtccagagaagttgatgcttcctacctgttggagcggcccagcagtgaggaagtgggtgacctgaggcaagggaaagtgtccatccctgatgaagatggggaaagccgggcacatagttccccacctgaggagcctgggcctctcaaggaaagtcccggggaagcctttaaggctctgtctgccgtggaagaggagtgtgacagcgtgggcagcggcgtgcaggtggtgattgaggagctgcggcagctgggagcagcctcagtggggcctgggcctttgggcttcccagcaactcagagggacatgcggctcccagggtgcacgctggctgccagcgaggcggcccccctgctcaatcctctggtggatgattacgtggcctctgagggtgcagtacagcgagttctggtccctgcttatgccaagcaactctcaccagccacacaactggcaatccagcgggcaaccccagagacaggaccagaaaatggaaccaagctgccaccaccccgccctgaggacatgctcaatgccgctgctgcgctggacagtgccttggaagagtcaggccctgggagcactggggagctgagacactctctagggctgaccgtttccccatgcaggaccagaggaagtgggcagaagaactccaggcgcaagcgggatcttgtactctctaaactggtccacaatgtgcataaccacatcaccaatgacaagagattcaatgggtctgaaagcatcaagtcctcttggaatatttcagtagtgaagtttcttctggaaaagctcaagcaagagctggtgaccagtccccacaattacactgataaggagctaaaaggagcctgtgtggcctacttccttactaagaggcgtgagtaccgcaactccctgaacccctttaaaggcctgaaggaaaaagaggagaagaaacttcgaagtcgccgatatcggctttttgccaaccgatccagtatcatgaggcattttggacctgaggaccaacgtctgtggaatgatgtgacagaggaactgatgtcagatgaagaggacagtcttaacgagccaggtgtgtgggtggcccgccctccccgtttccgggcccagcgcctcacagagctctgctaccacctggatgctaactctaagcatggcaccaaagccaaccgtgtgtatgggcctccctcagacagactgccttctgctgaagcccagctccttccaccagaactttacaatcctaatttccaagaagaggaagatgagggaggggatgagaatgcacctggctccccatcttttgaccaaccccacaaaacctgctgtcctgacttgaactcattcattgaaatcaaggtggaaaaggatgaataaaatctacagccaagaataactctggcttccgccatgccccatgtctcagaaataggtggccatggggctt

SEQ ID NO: 118334 - DNA, 1949 bp, Homo sapiens
  Payload ID: 3157
  Gene Symbol: C14orf93
  Gene Name: chromosome 14 open reading frame 93
  Uniprot ID: Q9H972
  ENST ID: ENST00000397379
  CDS Start-End: 241-1857
cgaatacaaagagccatacgaccttcggtttcaggtttagctgtgcctcccagtgactataatgacaaggaagctgtaaatgtatttgagttaagcttttgcgagaaaccctacagcttggggcctgggctcctctgaccatcctcattgagaaaggaaagtgagtccagagaagttgatgcttcctacctgttggagcggcccagcagtgtaagcgtggttgttactgccccatccgccatgtccttcagtgccaccattctcttctcccctcccagtggcagcgaggccagatgctgctgctgcgcctgtaagagtgagactaatggaggcaacacaggctcccagggtgggaatcctcctcccagcacccccatcacagtgactggacatggcttggctgttcagagctcagagcagctcctgcatgttatctaccagcgggtcgataaggcagtgggtttggctgaagctgctctgggtcttgccagggccaacaatgagttgttaaaacgtctccaggaggaagtgggtgacctgaggcaagggaaagtgtccatccctgatgaagatggggaaagccgggcacatagttccccacctgaggagcctgggcctctcaaggaaagtcccggggaagcctttaaggctctgtctgccgtggaagaggagtgtgacagcgtgggcagcggcgtgcaggtggtgattgaggagctgcggcagctgggagcagcctcagtggggcctgggcctttgggcttcccagcaactcagagggacatgcggctcccagggtgcacgctggctgccagcgaggcggcccccctgctcaatcctctggtggatgattacgtggcctctgagggtgcagtacagcgagttctggtccctgcttatgccaagcaactctcaccagccacacaactggcaatccagcgggcaaccccagagacaggaccagaaaatggaaccaagctgccaccaccccgccctgaggacatgctcaatgccgctgctgcgctggacagtgccttggaagagtcaggccctgggagcactggggagctgagacactctctagggctgaccgtttccccatgcaggaccagaggaagtgggcagaagaactccaggcgcaagcgggatcttgtactctctaaactggtccacaatgtgcataaccacatcaccaatgacaagagattcaatgggtctgaaagcatcaagtcctcttggaatatttcagtagtgaagtttcttctggaaaagctcaagcaagagctggtgaccagtccccacaattacactgataaggagctaaaaggagcctgtgtggcctacttccttactaagaggcgtgagtaccgcaactccctgaacccctttaaaggcctgaaggaaaaagaggagaagaaacttcgaagtcgccgatatcggctttttgccaaccgatccagtatcatgaggcattttggacctgaggaccaacgtctgtggaatgatgtgacagaggaactgatgtcagatgaagaggacagtcttaacgagccaggtgtgtgggtggcccgccctccccgtttccgggcccagcgcctcacagagctctgctaccacctggatgctaactctaagcatggcaccaaagccaaccgtgtgtatgggcctccctcagacagactgccttctgctgaagcccagctccttccaccagaactttacaatcctaatttccaagaagaggaagatgagggaggggatgagaatgcacctggctccccatcttttgaccaaccccacaaaacctgctgtcctgacttgaactcattcattgaaatcaaggtggaaaaggatgaataaaatctacagccaagaataactctggcttccgccatgccccatgtctcagaaataggtggccatggggcttcacaaaataatgagatgctctg

SEQ ID NO: 118335 - DNA, 899 bp, Homo sapiens
  Payload ID: 3157
  Gene Symbol: C14orf93
  Gene Name: chromosome 14 open reading frame 93
  ENST ID: ENST00000397380
  CDS Start-End: 274-899
accaacctgggcaacatagcaagaccccgcctcttaaaaaaaaaaagattaaggaatcaggtttcaggtttagctgtgcctcccagtgactataatgacaaggaagctgtaaatgtatttgagttaagcttttgcgagaaaccctacagcttggggcctgggctcctctgaccatcctcattgagaaaggaaagtgagtccagagaagttgatgcttcctacctgttggagcggcccagcagtgtaagcgtggttgttactgccccatccgccatgtccttcagtgccaccattctcttctcccctcccagtggcagcgaggccagatgctgctgctgcgcctgtaagagtgagactaatggaggcaacacaggctcccagggtgggaatcctcctcccagcacccccatcacagtgactggacatggcttggctgttcagagctcagagcagctcctgcatgttatctaccagcgggtcgataaggcagtgggtttggctgaagctgctctgggtcttgccagggccaacaatgagttgttaaaacgtctccaggaggaagtgggtgacctgaggcaagggaaagtgtccatccctgatgaagatggggaaagccgggcacatagttccccacctgaggagcctgggcctctcaaggaaagtcccggggaagcctttaaggctctgtctgccgtggaagaggagtgtgacagcgtgggcagcggcgtgcaggtggtgattgaggagctgcggcagctgggagcagcctcagtggggcctgggcctttgggcttcccagcaactcagagggacatgcggctcccagggtgcacgctggctgccagcgaggcggcccccctgctcaatcctctggtggatgattacgtggcctctgaggg

SEQ ID NO: 118336 - DNA, 1986 bp, Homo sapiens
  Payload ID: 3157
  Gene Symbol: C14orf93
  Gene Name: chromosome 14 open reading frame 93
  Uniprot ID: Q9H972
  ENST ID: ENST00000397382
  CDS Start-End: 284-1900
cggctcgggctccgcgagtcctcctttttgcacacacacgaatacaaagagccatacgaccttcgggtatcctttttccattttttttcctccttaatcttgtgtgtgttttcaaattttttaaaaatagagatctgtagcagtgttgggaccctacagcttggggcctgggctcctctgaccatcctcattgagaaaggaaagtgagtccagagaagttgatgcttcctacctgttggagcggcccagcagtgtaagcgtggttgttactgccccatccgccatgtccttcagtgccaccattctcttctcccctcccagtggcagcgaggccagatgctgctgctgcgcctgtaagagtgagactaatggaggcaacacaggctcccagggtgggaatcctcctcccagcacccccatcacagtgactggacatggcttggctgttcagagctcagagcagctcctgcatgttatctaccagcgggtcgataaggcagtgggtttggctgaagctgctctgggtcttgccagggccaacaatgagttgttaaaacgtctccaggaggaagtgggtgacctgaggcaagggaaagtgtccatccctgatgaagatggggaaagccgggcacatagttccccacctgaggagcctgggcctctcaaggaaagtcccggggaagcctttaaggctctgtctgccgtggaagaggagtgtgacagcgtgggcagcggcgtgcaggtggtgattgaggagctgcggcagctgggagcagcctcagtggggcctgggcctttgggcttcccagcaactcagagggacatgcggctcccagggtgcacgctggctgccagcgaggcggcccccctgctcaatcctctggtggatgattacgtggcctctgagggtgcagtacagcgagttctggtccctgcttatgccaagcaactctcaccagccacacaactggcaatccagcgggcaaccccagagacaggaccagaaaatggaaccaagctgccaccaccccgccctgaggacatgctcaatgccgctgctgcgctggacagtgccttggaagagtcaggccctgggagcactggggagctgagacactctctagggctgaccgtttccccatgcaggaccagaggaagtgggcagaagaactccaggcgcaagcgggatcttgtactctctaaactggtccacaatgtgcataaccacatcaccaatgacaagagattcaatgggtctgaaagcatcaagtcctcttggaatatttcagtagtgaagtttcttctggaaaagctcaagcaagagctggtgaccagtccccacaattacactgataaggagctaaaaggagcctgtgtggcctacttccttactaagaggcgtgagtaccgcaactccctgaacccctttaaaggcctgaaggaaaaagaggagaagaaacttcgaagtcgccgatatcggctttttgccaaccgatccagtatcatgaggcattttggacctgaggaccaacgtctgtggaatgatgtgacagaggaactgatgtcagatgaagaggacagtcttaacgagccaggtgtgtgggtggcccgccctccccgtttccgggcccagcgcctcacagagctctgctaccacctggatgctaactctaagcatggcaccaaagccaaccgtgtgtatgggcctccctcagacagactgccttctgctgaagcccagctccttccaccagaactttacaatcctaatttccaagaagaggaagatgagggaggggatgagaatgcacctggctccccatcttttgaccaaccccacaaaacctgctgtcctgacttgaactcattcattgaaatcaaggtggaaaaggatgaataaaatctacagccaagaataactctggcttccgccatgccccatgtctcagaaataggtggccatggggcttcacaaaataatgagat

SEQ ID NO: 118337 - DNA, 852 bp, Homo sapiens
  Payload ID: 3157
  Gene Symbol: C14orf93
  Gene Name: chromosome 14 open reading frame 93
  ENST ID: ENST00000553675
  CDS Start-End: 256-852
ctttttgcacacacacgaatacaaagagccatacgaccttcggtttcaggtttagctgtgcctcccagtgactataatgacaaggaagctgtaaatgtatttgagttaagcttttgcgagaaaccctacagcttggggcctgggctcctctgaccatcctcattgagaaaggaaagtgagtccagagaagttgatgcttcctacctgttggagcggcccagcagtgtaagcgtggttgttactgccccatccgccatgtccttcagtgccaccattctcttctcccctcccagtggcagcgaggccagatgctgctgctgcgcctgtaagagtgagactaatggaggcaacacaggctcccagggtgggaatcctcctcccagcacccccatcacagtgactggacatggcttggctgttcagagctcagagcagctcctgcatgttatctaccagcgggtcgataaggcagtgggtttggctgaagctgctctgggtcttgccagggccaacaatgagttgttaaaacgtctccaggaggaagtgggtgacctgaggcaagggaaagtgtccatccctgatgaagatggggaaagccgggcacatagttccccacctgaggagcctgggcctctcaaggaaagtcccggggaagcctttaaggctctgtctgccgtggaagaggagtgtgacagcgtgggcagcggcgtgcaggtggtgattgaggagctgcggcagctgggagcagcctcagtggggcctgggcctttgggcttcccagcaactcagagggacatgcggctcccagggtgcacgctggctgccagcgaggcggcccccctgctcaatcct

SEQ ID NO: 118338 - DNA, 618 bp, Homo sapiens
  Payload ID: 3157
  Gene Symbol: C14orf93
  Gene Name: chromosome 14 open reading frame 93
  ENST ID: ENST00000555098
  CDS Start-End: 383-618
ctttttgcacacacacgaatacaaagagccatacgaccttcgggttgcactagtcgggggttccatgctggggggcagaaggaatgctctctaccgtctgaaaccgttcatcaggaaggccttgatttgtgatgtgctaggagagcacaggatctgcaaatagaaggcacctgtctcccttctgcaggccgaggagaggccgccatggactgtgtgcttcttcatggcttgtttactcttctttcacagaccctacagcttggggcctgggctcctctgaccatcctcattgagaaaggaaagtgagtccagagaagttgatgcttcctacctgttggagcggcccagcagtgtaagcgtggttgttactgccccatccgccatgtccttcagtgccaccattctcttctcccctcccagtggcagcgaggccagatgctgctgctgcgcctgtaagagtgagactaatggaggcaacacaggctcccagggtgggaatcctcctcccagcacccccatcacagtgactggacatggcttggctgttcagagctcagagcagctcctgcatgttatctaccagcgggtcgataaggcagtgggtttggctgaagctgc

SEQ ID NO: 118339 - DNA, 568 bp, Homo sapiens
  Payload ID: 3157
  Gene Symbol: C14orf93
  Gene Name: chromosome 14 open reading frame 93
  ENST ID: ENST00000555575
  CDS Start-End: 250-568
ctttttgcacacacacgaatacaaagagccatacgaccttcgggtttagctgtgcctcccagtgactataatgacaaggaagctgtaaatgtatttgagttaagcttttgcgagaaaccctacagcttggggcctgggctcctctgaccatcctcattgagaaaggaaagtgagtccagagaagttgatgcttcctacctgttggagcggcccagcagtgtaagcgtggttgttactgccccatccgccatgtccttcagtgccaccattctcttctcccctcccagtggcagcgaggccagatgctgctgctgcgcctgtaagagtgagactaatggaggcaacacaggctcccagggtgggaatcctcctcccagcacccccatcacagtgactggacatggcttggctgttcagagctcagagcagctcctgcatgttatctaccagcgggtcgataaggcagtgggtttggctgaagctgctctgggtcttgccagggccaacaatgagttgttaaaacgtctccaggaggaagtgggtgacctgaggcaagggaaagtgtcca

SEQ ID NO: 118340 - DNA, 467 bp, Homo sapiens
  Payload ID: 3157
  Gene Symbol: C14orf93
  Gene Name: chromosome 14 open reading frame 93
  ENST ID: ENST00000553606
  CDS Start-End: 440-467
ctttttgcacacacacgaatacaaagagccatacgaccttcggttttaatttggtttaacctttagtttcaggtttagctgtgcctcccagtgactataatgacaaggaagctgtaaatgtatttgagttaagcttttgcgagaagcaaagtgacagcatagctgttcaaacattcctgttgaattttggatccacccttaaggagcttgagaaatgaagataaggggccccacgggtgatttctctgggctcctggctggaagattcaggacagctagtttccattacagaggctcatggcccagaccctacagcttggggcctgggctcctctgaccatcctcattgagaaaggaaagtgagtccagagaagttgatgcttcctacctgttggagcggcccagcagtgtaagcgtggttgttactgccccatccgccatgtccttcagtgccaccattctcttct

SEQ ID NO: 118341 - DNA, 588 bp, Homo sapiens
  Payload ID: 3157
  Gene Symbol: C14orf93
  Gene Name: chromosome 14 open reading frame 93
  ENST ID: ENST00000553958
  CDS Start-End: 338-588
ctttttgcacacacacgaatacaaagagccatacgaccttcgggcaaagtgacagcatagctgttcaaacattcctgttgaattttggatccacccttaaggagcttgagaaatgaagataaggggccccacgggtgatttctctgggctcctggctggaagattcaggacagctagtttccattacagaggctcatggcccagaccctacagcttggggcctgggctcctctgaccatcctcattgagaaaggaaagtgagtccagagaagttgatgcttcctacctgttggagcggcccagcagtgtaagcgtggttgttactgccccatccgccatgtccttcagtgccaccattctcttctcccctcccagtggcagcgaggccagatgctgctgctgcgcctgtaagagtgagactaatggaggcaacacaggctcccagggtgggaatcctcctcccagcacccccatcacagtgactggacatggcttggctgttcagagctcagagcagctcctgcatgttatctaccagcgggtcgataaggcagtgggtttggctgaagctgctctgggtcttgccag

SEQ ID NO: 118342 - DNA, 499 bp, Homo sapiens
  Payload ID: 3157
  Gene Symbol: C14orf93
  Gene Name: chromosome 14 open reading frame 93
  ENST ID: ENST00000556419
  CDS Start-End: 467-499
ctttttgcacacacacgaatacaaagagccatacgaccttcgggtatcctttttccattttttttcctccttaatcttgtgtgtgttttcaaattttttaaaaatagagatctgtagcagtgttggggttgcactagtcgggggttccatgctggggggcagaaggaatgctctctaccgtctgaaaccgttcatcaggaaggccttgatttgtgatgtgctaggagagcacaggatctgcaaatagaaggcacctgtctcccttctgcaggccgaggagaggccgccatggactgtgtgcttcttcatggcttgtttactcttctttcacagaccctacagcttggggcctgggctcctctgaccatcctcattgagaaaggaaagtgagtccagagaagttgatgcttcctacctgttggagcggcccagcagtgtaagcgtggttgttactgccccatccgccatgtccttcagtgccaccattctcttctcccct

SEQ ID NO: 118343 - DNA, 571 bp, Homo sapiens
  Payload ID: 3157
  Gene Symbol: C14orf93
  Gene Name: chromosome 14 open reading frame 93
  ENST ID: ENST00000555998
  CDS Start-End: 423-571
acacacgaatacaaagagccatacgaccttcggagactgggtcttgctatgctgccgaggttggtctcaaactcctgggctcaagcgatcctcctcctcccaaagtgctgggattacaggcatgagccaccatgcccagccatgaatgtcttactaccctatcagttaatcctatacattgctcaaggctcaactggaagcttttcttcttttcaggtttagctgtgcctcccagtgactataatgacaaggaagctgtaaatgtatttgagttaagcttttgcgagaaaccctacagcttggggcctgggctcctctgaccatcctcattgagaaaggaaagtgagtccagagaagttgatgcttcctacctgttggagcggcccagcagtgtaagcgtggttgttactgccccatccgccatgtccttcagtgccaccattctcttctcccctcccagtggcagcgaggccagatgctgctgctgcgcctgtaagagtgagactaatggaggcaacacaggctcccagggtgggaatcctcctcccagcacccccatcacagtgactgg

SEQ ID NO: 118344 - DNA, 585 bp, Homo sapiens
  Payload ID: 3157
  Gene Symbol: C14orf93
  Gene Name: chromosome 14 open reading frame 93
  ENST ID: ENST00000553931
  CDS Start-End: 177-585
ctttttgcacacacacgaatacaaagagccatacgaccttcggaccctacagcttggggcctgggctcctctgaccatcctcattgagaaaggaaagtgagtccagagaagttgatgcttcctacctgttggagcggcccagcagtgtaagcgtggttgttactgccccatccgccatgtccttcagtgccaccattctcttctcccctcccagtggcagcgaggccagatgctgctgctgcgcctgtaagagtgagactaatggaggcaacacaggctcccagggtgggaatcctcctcccagcacccccatcacagtgactggacatggcttggctgttcagagctcagagcagctcctgcatgttatctaccagcgggtcgataaggcagtgggtttggctgaagctgctctgggtcttgccagggccaacaatgagttgttaaaacgtctccaggaggaagtgggtgacctgaggcaagggaaagtgtccatccctgatgaagatggggaaagccgggcacatagttccccacctgaggagcctgggcctctcaaggaaagtcccggggaagcctttaagg

SEQ ID NO: 118345 - DNA, 441 bp, Homo sapiens
  Payload ID: 3157
  Gene Symbol: C14orf93
  Gene Name: chromosome 14 open reading frame 93
  ENST ID: ENST00000554179
  CDS Start-End: 414-441
gagtcctcctttttgcacacacacgaatacaaagagccatacgaccttcgggtatcctttttccattttttttcctccttaatcttgtgtgtgttttcaaattttttaaaaatagagatctgtagcagtgttgggaatgtcttactaccctatcagttaatcctatacattgctcaaggctcaactggaagcttttcttcttttcaggtttagctgtgcctcccagtgactataatgacaaggaagctgtaaatgtatttgagttaagcttttgcgagaaaccctacagcttggggcctgggctcctctgaccatcctcattgagaaaggaaagtgagtccagagaagttgatgcttcctacctgttggagcggcccagcagtgtaagcgtggttgttactgccccatccgccatgtccttcagtgccaccattctcttct

SEQ ID NO: 118346 - DNA, 4517 bp, Homo sapiens
  Payload ID: 3158
  Gene Symbol: C15orf39
  Gene Name: chromosome 15 open reading frame 39
  Uniprot ID: Q6ZRI6
  ENST ID: ENST00000360639
  CDS Start-End: 321-3464
actcagcaactgccatacagcaaaaggagggattgcaactaccatgcagcaactgccaccttgaaagagaaggggttgaagagtagtctctaatatccagcaccagttggccttaggttccctgcctccagaccttattctcctgcaacatcaccactggttgaaaccttactacaaatcaagctgtgaagtcactggagccctgtagcaagtcatgtccctgtaacgatgagtgagctgacagctaaggggcttgcctaaaccacacaggtcagaagttgagtagcaggggcctaggagggctcgaagccttcacagcgatggcagagaagcgacccctgagaaccctggggcctgtgatgtatggcaagctgccccgcttagagacagactccgggctcgagcacagcctgccccactctgttggtaaccaggatccctgcacctacaaggggtcctacttctcctgccccatggcaggtactcctaaggccgagtctgagcagttggcgtcctggaccccatacccacccttgtactctaccggtatggcaggacccccacttcaggcagacaacctgctgaccaactgcctgttctaccgctcgccagcagaaggccctgagaagatgcaggactccagccctgttgagctcctgcccttcagtccccaggctcactcctacccaggcccaccactggcagcacccaaacctgtctaccgcaaccctctgtgctatgggctctcaacttgtctgggggaaggagcagtgaagaggccactggatgttgactggactctggcgactgggcccctgttgccctcagctgacccaccctgctctctggccccagctcctagcaagggccagactctggatggcaccttcttgcggggggtgccagctgaggggtccagtaaagactcctcagggagcttctccccatgccagcccttcctggagaaatatcagaccatccacagcacgggcttcctggcctccaggtacacaggtccttaccctaggaactccaagcaagcaatgtctgaggggccctcaagtccttggacccagctggcccagcccctggggccaccctgtcaggacaccgggcccacccactacccaccaccccaccacccaccaccccaccctccacaggccctgccttgccctccagcctgtcgccacccagagaagcagggcagctacagcccagcactcccactgcagcctctggggggccacaaggggaccgggtaccaggctggtgggctgggcagcccctacctgaggcagcaggcagcccaggcaccttacattcccccactggggctggacgcttacccctacccctctgcccctctcccagcaccctctccaggcctcaagctggagccgcctctcactccacggtgcccattggactttgccccccagacactgagttttccttatgcccgggatgacctctctctctatggagcatcccctgggcttggagggacaccaccttcccagaacaatgtgcgggctgtgccacagcctggtgccttccagagggcatgccagcctttgccagcgagccagccctgctcagagcctgtgaggcctgcacaggaagccgaagagaagacctggctgcccagctgcaggaaagagaagctccagccccggctcagtgagcactctgggccgcccatcgtcatccgagacagtccagttccctgtacccccccagcactgcccccctgtgcccgggagtgccagtctcttccacagaaggagggcgcaaggccacccagctctccaccaatgcctgtcattgacaatgtcttcagcctggccccctaccgtgactatctggatgtgccggcacccgaggccacaactgagcctgactctgccacagctgagcctgactcagccccagccaccagtgaaggtcaggacaaaggctgcagggggaccctgcctgcccaggagggcccctcagggagtaaacccctaaggggctcacttaaggaggaggtagccctggatttgagtgtgaggaagcccacagcagaggcctcccctgtcaaggcttcccgttctgtggagcatgccaagcctactgcagccatggatgtgccagatgtgggcaacatggtgtcagatctgccaggcctgaaaaagatagacacagaagcaccaggcttgcctggggtgccagtgaccacagatgccatgccaaggaccaacttccacagctctgtggccttcatgttccgaaagttcaagatcctccgtccggcacctttgcctgcagccgtggtcccgtccacgcccacctcagctcctgctcccacacagcctgcacccacccccacatctgggcccattggactgcggattctcgctcaacagcccttgtctgtgacctgcttcagcctggcactgcccagccctccagccgtagctgtggcctcccctgcccctgctccagctccatcccctgctccggctcgagctcaggctccagcttcagcccgggatccagctccagctccagctccagttgcaggccctgctccagcatctacttcagccccaggggactccctggagcagcattttacaggactacatgcgtccctgtgtgatgctatttctggctccgtcgcccactctcctccagagaagcttcgcgagtggctagagacggctgggccctggggccaggctgcgtggcaggactgccagggtgtgcaggggctgctggccaagctgctgtctcagctgcagcgcttcgatcgcacccaccggtgccccttcccccatgtggtgcgagctggcgccatcttcgtgcccattcacctggtgaaggagcggctcttccctcggctgccacccgcttctgtggaccatgtgctgcaggagcatcgtgtggagctgcggcccaccacgctgtcggaggagcgggcactgcgggagctcgccctgccaggctgcacctcacgcatgctgaagttactggcgctgcgccagctgccggacatttaccccgaccttctcggcctgcagtggcgcgactgtgtacgccgccagctgggtgactttgacactgaggctggagctgtgtcctcctcagagcccactgtggccagaggtgagccagagagcctagccctggctcagaagtcaccggcccccaaggtcaggaagccaggcaggaagccaccaacccctggcccggagaaagcagaggcagctgctggggaagagtcctgtggtgcctcccctacccctgctaccagtgccagcccacctggccccacactgaaggcccgcttccgcagtctgctggagaccgcctggctcaatggcctggctctgcccacctggggccacaagtcctcaagaccagaccagccctcaccctgcccacagctgctggacagccagagccatcacctgtagcactggttgccagtgctgtgtgtatagcagtcactctccacccttcccttctgcctgcccagctgccccggggccacgagtggatgctggggctgtggctgctcccctggaggggttccatctctgaccctgtggcccattcagggtgggctgaagagcccctgagcttttaacgtgagggtctttattggataggactactccctatttcttgcctagagaacacacatgggctttggagcccgacagacctgggcttgaatcccggctcgtgttcttgctgcaggacctgggcaagaaacttcacctctgctgagccctcattccccatgtgtaaaatgggacaacgcaacctacctcacagggttgttgtggggatgctgcctgatacataccctgtcaccatttggtctctgcttcctctctgggacagggcctagaattggaggcagagaaccttcctatagaaagtcttcgtgtgtcctaggacttggctatcgtagagtggtaccttaggcagtggatgtgactcacactttcaggagtcaccccccagcatttggggttgggttggccctactccagcctggagctccctgagggagcctgcactccctgctcccaatccccgctactggtgcagggatgcagcctggagctggcgtccttgttctgggcctgctgctgccgccaccccaggaggccccaggcctgtcctgaattgacatcagtgcttccctgaactgcctcccccacccctggcattatcccaggaaacttatgttttctagaagctaagcagctgctgggactcagggactggtgcaggtaggctgagtggcagctcagtcctagaaggtctctgaagatctggactgaggaccctgctgctccccaagccagagcccatcagccaggcctgctgtgagccacctgcctgtggagtgctgagctcaaccaaaggctggcaagctctgggcctcatttaagggattctgatgagccgatgggccctggaggcagcccattaaagcatctggctcgtttttggaa

SEQ ID NO: 118347 - DNA, 4430 bp, Homo sapiens
  Payload ID: 3158
  Gene Symbol: C15orf39
  Gene Name: chromosome 15 open reading frame 39
  Uniprot ID: Q6ZRI6
  ENST ID: ENST00000394987
  CDS Start-End: 234-3377
accgcagacggcgcccagcggcggcgcgaacggcagctaggagggttgctccgggcttggtgctcactgcgacttcccgcgcagggcccggtcggactaggacccgcggcctgagagacgctggaggatgcggacgcggaggccgcctggggtagcggcggcgggagtcctggcgctctgcaggtcagaagttgagtagcaggggcctaggagggctcgaagccttcacagcgatggcagagaagcgacccctgagaaccctggggcctgtgatgtatggcaagctgccccgcttagagacagactccgggctcgagcacagcctgccccactctgttggtaaccaggatccctgcacctacaaggggtcctacttctcctgccccatggcaggtactcctaaggccgagtctgagcagttggcgtcctggaccccatacccacccttgtactctaccggtatggcaggacccccacttcaggcagacaacctgctgaccaactgcctgttctaccgctcgccagcagaaggccctgagaagatgcaggactccagccctgttgagctcctgcccttcagtccccaggctcactcctacccaggcccaccactggcagcacccaaacctgtctaccgcaaccctctgtgctatgggctctcaacttgtctgggggaaggagcagtgaagaggccactggatgttgactggactctggcgactgggcccctgttgccctcagctgacccaccctgctctctggccccagctcctagcaagggccagactctggatggcaccttcttgcggggggtgccagctgaggggtccagtaaagactcctcagggagcttctccccatgccagcccttcctggagaaatatcagaccatccacagcacgggcttcctggcctccaggtacacaggtccttaccctaggaactccaagcaagcaatgtctgaggggccctcaagtccttggacccagctggcccagcccctggggccaccctgtcaggacaccgggcccacccactacccaccaccccaccacccaccaccccaccctccacaggccctgccttgccctccagcctgtcgccacccagagaagcagggcagctacagcccagcactcccactgcagcctctggggggccacaaggggaccgggtaccaggctggtgggctgggcagcccctacctgaggcagcaggcagcccaggcaccttacattcccccactggggctggacgcttacccctacccctctgcccctctcccagcaccctctccaggcctcaagctggagccgcctctcactccacggtgcccattggactttgccccccagacactgagttttccttatgcccgggatgacctctctctctatggagcatcccctgggcttggagggacaccaccttcccagaacaatgtgcgggctgtgccacagcctggtgccttccagagggcatgccagcctttgccagcgagccagccctgctcagagcctgtgaggcctgcacaggaagccgaagagaagacctggctgcccagctgcaggaaagagaagctccagccccggctcagtgagcactctgggccgcccatcgtcatccgagacagtccagttccctgtacccccccagcactgcccccctgtgcccgggagtgccagtctcttccacagaaggagggcgcaaggccacccagctctccaccaatgcctgtcattgacaatgtcttcagcctggccccctaccgtgactatctggatgtgccggcacccgaggccacaactgagcctgactctgccacagctgagcctgactcagccccagccaccagtgaaggtcaggacaaaggctgcagggggaccctgcctgcccaggagggcccctcagggagtaaacccctaaggggctcacttaaggaggaggtagccctggatttgagtgtgaggaagcccacagcagaggcctcccctgtcaaggcttcccgttctgtggagcatgccaagcctactgcagccatggatgtgccagatgtgggcaacatggtgtcagatctgccaggcctgaaaaagatagacacagaagcaccaggcttgcctggggtgccagtgaccacagatgccatgccaaggaccaacttccacagctctgtggccttcatgttccgaaagttcaagatcctccgtccggcacctttgcctgcagccgtggtcccgtccacgcccacctcagctcctgctcccacacagcctgcacccacccccacatctgggcccattggactgcggattctcgctcaacagcccttgtctgtgacctgcttcagcctggcactgcccagccctccagccgtagctgtggcctcccctgcccctgctccagctccatcccctgctccggctcgagctcaggctccagcttcagcccgggatccagctccagctccagctccagttgcaggccctgctccagcatctacttcagccccaggggactccctggagcagcattttacaggactacatgcgtccctgtgtgatgctatttctggctccgtcgcccactctcctccagagaagcttcgcgagtggctagagacggctgggccctggggccaggctgcgtggcaggactgccagggtgtgcaggggctgctggccaagctgctgtctcagctgcagcgcttcgatcgcacccaccggtgccccttcccccatgtggtgcgagctggcgccatcttcgtgcccattcacctggtgaaggagcggctcttccctcggctgccacccgcttctgtggaccatgtgctgcaggagcatcgtgtggagctgcggcccaccacgctgtcggaggagcgggcactgcgggagctcgccctgccaggctgcacctcacgcatgctgaagttactggcgctgcgccagctgccggacatttaccccgaccttctcggcctgcagtggcgcgactgtgtacgccgccagctgggtgactttgacactgaggctggagctgtgtcctcctcagagcccactgtggccagaggtgagccagagagcctagccctggctcagaagtcaccggcccccaaggtcaggaagccaggcaggaagccaccaacccctggcccggagaaagcagaggcagctgctggggaagagtcctgtggtgcctcccctacccctgctaccagtgccagcccacctggccccacactgaaggcccgcttccgcagtctgctggagaccgcctggctcaatggcctggctctgcccacctggggccacaagtcctcaagaccagaccagccctcaccctgcccacagctgctggacagccagagccatcacctgtagcactggttgccagtgctgtgtgtatagcagtcactctccacccttcccttctgcctgcccagctgccccggggccacgagtggatgctggggctgtggctgctcccctggaggggttccatctctgaccctgtggcccattcagggtgggctgaagagcccctgagcttttaacgtgagggtctttattggataggactactccctatttcttgcctagagaacacacatgggctttggagcccgacagacctgggcttgaatcccggctcgtgttcttgctgcaggacctgggcaagaaacttcacctctgctgagccctcattccccatgtgtaaaatgggacaacgcaacctacctcacagggttgttgtggggatgctgcctgatacataccctgtcaccatttggtctctgcttcctctctgggacagggcctagaattggaggcagagaaccttcctatagaaagtcttcgtgtgtcctaggacttggctatcgtagagtggtaccttaggcagtggatgtgactcacactttcaggagtcaccccccagcatttggggttgggttggccctactccagcctggagctccctgagggagcctgcactccctgctcccaatccccgctactggtgcagggatgcagcctggagctggcgtccttgttctgggcctgctgctgccgccaccccaggaggccccaggcctgtcctgaattgacatcagtgcttccctgaactgcctcccccacccctggcattatcccaggaaacttatgttttctagaagctaagcagctgctgggactcagggactggtgcaggtaggctgagtggcagctcagtcctagaaggtctctgaagatctggactgaggaccctgctgctccccaagccagagcccatcagccaggcctgctgtgagccacctgcctgtggagtgctgagctcaaccaaaggctggcaagctctgggcctcatttaagggattctgatgagccgatgggccctggaggcagcccattaaagcatctggctcgtttttggaa

SEQ ID NO: 118348 - DNA, 3152 bp, Homo sapiens
  Payload ID: 3158
  Gene Symbol: C15orf39
  Gene Name: chromosome 15 open reading frame 39
  ENST ID: ENST00000565074
  CDS Start-End: 1-2422
tgtctaccgcaaccctctgtgctatgggctctcaacttgtctgggggaaggagcagtgaagaggccactggatgttgactggactctggcgactgggcccctgttgccctcagctgacccaccctgctctctggccccagctcctagcaagggccagactctggatggcaccttcttgcggggggtgccagctgaggggtccagtaaagactcctcagggagcttctccccatgccagcccttcctggagaaatatcagaccatccacagcacgggcttcctggcctccaggtacacaggtccttaccctaggaactccaagcaagcaatgtctgaggggccctcaagtccttggacccagctggcccagcccctggggccaccctgtcaggacaccgggcccacccactacccaccaccccaccacccaccaccccaccctccacaggccctgccttgccctccagcctgtcgccacccagagaagcagggcagctacagcccagcactcccactgcagcctctggggggccacaaggggaccgggtaccaggctggtgggctgggcagcccctacctgaggcagcaggcagcccaggcaccttacattcccccactggggctggacgcttacccctacccctctgcccctctcccagcaccctctccaggcctcaagctggagccgcctctcactccacggtgcccattggactttgccccccagacactgagttttccttatgcccgggatgacctctctctctatggagcatcccctgggcttggagggacaccaccttcccagaacaatgtgcgggctgtgccacagcctggtgccttccagagggcatgccagcctttgccagcgagccagccctgctcagagcctgtgaggcctgcacaggaagccgaagagaagacctggctgcccagctgcaggaaagagaagctccagccccggctcagtgagcactctgggccgcccatcgtcatccgagacagtccagttccctgtacccccccagcactgcccccctgtgcccgggagtgccagtctcttccacagaaggagggcgcaaggccacccagctctccaccaatgcctgtcattgacaatgtcttcagcctggccccctaccgtgactatctggatgtgccggcacccgaggccacaactgagcctgactctgccacagctgagcctgactcagccccagccaccagtgaaggtcaggacaaaggctgcagggggaccctgcctgcccaggagggcccctcagggagtaaacccctaaggggctcacttaaggaggaggtagccctggatttgagtgtgaggaagcccacagcagaggcctcccctgtcaaggcttcccgttctgtggagcatgccaagcctactgcagccatggatgtgccagatgtgggcaacatggtgtcagatctgccaggcctgaaaaagatagacacagaagcaccaggcttgcctggggtgccagtgaccacagatgccatgccaaggaccaacttccacagctctgtggccttcatgttccgaaagttcaagatcctccgtccggcacctttgcctgcagccgtggtcccgtccacgcccacctcagctcctgctcccacacagcctgcacccacccccacatctgggcccattggactgcggattctcgctcaacagcccttgtctgtgacctgcttcagcctggcactgcccagccctccagccgtagctgtggcctcccctgcccctgctccagctccatcccctgctccggctcgagctcaggctccagcttcagcccgggatccagctccagctccagctccagttgcaggccctgctccagcatctacttcagccccaggggactccctggagcagcattttacaggactacatgcgtccctgtgtgatgctatttctggctccgtcgcccactctcctccagagaagcttcgcgagtggctagagacggctgggccctggggccaggctgcgtggcaggactgccagggtgtgcaggggctgctggccaagctgctgtctcagctgcagcgcttcgatcgcacccaccggtgccccttcccccatgtggtgcgagctggcgccatcttcgtgcccattcacctggtgaaggagcggctcttccctcggctgccacccgcttctgtggaccatgtgctgcaggagcatcgtgtggagctgcggcccaccacgctgtcggaggagcgggcactgcgggagctcgccctgccaggctgcacctcacgcatgctgaagttactggcgctgcgccagctgccggacatttaccccgaccttctcggcctgcagtggcgcgactgtgtacgccgccagctgggtgagcatggggcagccccagtggccaccggagctgtgtgagcaagtgacaggtgtgtgtgctgtgtgagtgcgtcacagctggggctgagtgattccaaggactcctgcccgggtagggggctttaggatgagctctaggtacccccaccccttgaccctccagacaatcagtgagcaccttcatagcctcttttgtaggcttctgaacatgccagctgctctgtccccatggaaactcctcggcctcccctggtgctgcaccttcttggattccctcctcctctgcctgtgccttctccatctttggtgcagtgtttccggcactctggttaggccctgttttctagctgagataatttccctgatctccagcctagcatcccctttgtgagctctagccctaaataacccactgcatgctgggcctcagcccctgggtctctctcccacactgaactcatcccaaatcacactcccgagccttcccctcagctcacttcccacaaccagttcttttccatgtcagtgaagggcaccccctttcacaaagctcctcatgctctagacctggtgagggccacagctgcctttttgaacgtgtagttttgcagtcctccccggcccttacatacacagaagtgtgcgcataagtcgcattgttttgtggtttgcttttcctctactaaatgatgtgcctgctgttctccagcttgttttcttttaatgtcctggaggaccacacaactgccgaagtgttgtgtggcgtgta

SEQ ID NO: 118349 - DNA, 581 bp, Homo sapiens
  Payload ID: 3158
  Gene Symbol: C15orf39
  Gene Name: chromosome 15 open reading frame 39
  ENST ID: ENST00000563905
  CDS Start-End: 518-581
aatgagggggcagcagccaaccacctggccagacccagccgcctcagccagccttagaaaggcttccacgatagtccacctggcctgcccacgctgccactcagcaactgccatacagcaaaaggagggattgcaactaccatgcagcaactgccaccttgaaagagaaggggttgaagagtagtctctaatatccagcaccagttggccttaggttccctgcctccagaccttattctcctgcaacatcaccactggttgaaaccttactacaaatcaagctgtgaagtcactggagccctgtagcaagtcatgtccctgtaacgatgagtgagctgacagctaaggggcttgcctaaaccacacagggcccggtcggactaggacccgcggcctgagagacgctggaggatgcggacgcggaggccgcctggggtagcggcggcgggagtcctggcgctctgcaggtcagaagttgagtagcaggggcctaggagggctcgaagccttcacagcgatggcagagaagcgacccctgagaaccctggggcctgtgatgtatggcaagctgccccgcttag

SEQ ID NO: 118350 - DNA, 353 bp, Homo sapiens
  Payload ID: 3158
  Gene Symbol: C15orf39
  Gene Name: chromosome 15 open reading frame 39
  ENST ID: ENST00000564848
  CDS Start-End: 273-353
ggcttctggctgccgccggccccccgcgaacgggctgcggggcaggggtggcgctgctgctccgactttccccggacttcgaggctcccgggacctggtagcgctctgggtctccggcggagaacaggcgcctaatctggcgagaaggaactcaggccgagccctccggcctcccgcaggaccctgtcacgtggattgctgggggatggcgttgaggaggaggtcagaagttgagtagcaggggcctaggagggctcgaagccttcacagcgatggcagagaagcgacccctgagaaccctggggcctgtgatgtatggcaagctgccccgcttagagacagactccgggctc

SEQ ID NO: 118351 - DNA, 532 bp, Homo sapiens
  Payload ID: 3158
  Gene Symbol: C15orf39
  Gene Name: chromosome 15 open reading frame 39
  ENST ID: ENST00000562637
  CDS Start-End: 446-532
agaggcactttcactttccagctgccactcagcaactgccatacagcaaaaggagggattgcaactaccatgcagcaactgccaccttgaaagagaaggggttgaagagtagtctctaatatccagcaccagttggccttaggttccctgcctccagaccttattctcctgcaacatcaccactggttgaaaccttactacaaatcaagctgtgaagtcactggagccctgtagcaagtcatgtccctgtaacgatgagtgagctgacagctaaggggcttgcctaaaccacacagggcccggtcggactaggacccgcggcctgagagacgctggaggatgcggacgcggaggccgcctggggtagcggcggcgggagtcctggcgctctgcaggtcagaagttgagtagcaggggcctaggagggctcgaagccttcacagcgatggcagagaagcgacccctgagaaccctggggcctgtgatgtatggcaagctgccccgcttagagacagactccgggctcgagcac

SEQ ID NO: 118352 - DNA, 4249 bp, Homo sapiens
  Payload ID: 3158
  Gene Symbol: C15orf39
  Gene Name: chromosome 15 open reading frame 39
  Uniprot ID: Q6ZRI6
  ENST ID: ENST00000567617
  CDS Start-End: 1-2817
atggcagagaagcgacccctgagaaccctggggcctgtgatgtatggcaagctgccccgcttagagacagactccgggctcgagcacagcctgccccactctgttggtaaccaggatccctgcacctacaaggggtcctacttctcctgccccatggcaggtactcctaaggccgagtctgagcagttggcgtcctggaccccatacccacccttgtactctaccggtatggcaggacccccacttcaggcagacaacctgctgaccaactgcctgttctaccgctcgccagcagaaggccctgagaagatgcaggactccagccctgttgagctcctgcccttcagtccccaggctcactcctacccaggcccaccactggcagcacccaaacctgtctaccgcaaccctctgtgctatgggctctcaacttgtctgggggaaggagcagtgaagaggccactggatgttgactggactctggcgactgggcccctgttgccctcagctgacccaccctgctctctggccccagctcctagcaagggccagactctggatggcaccttcttgcggggggtgccagctgaggggtccagtaaagactcctcagggagcttctccccatgccagcccttcctggagaaatatcagaccatccacagcacgggcttcctggcctccaggtacacaggtccttaccctaggaactccaagcaagcaatgtctgaggggccctcaagtccttggacccagctggcccagcccctggggccaccctgtcaggacaccgggcccacccactacccaccaccccaccacccaccaccccaccctccacaggccctgccttgccctccagcctgtcgccacccagagaagcagggcagctacagcccagcactcccactgcagcctctggggggccacaaggggaccgggtaccaggctggtgggctgggcagcccctacctgaggcagcaggcagcccaggcaccttacattcccccactggggctggacgcttacccctacccctctgcccctctcccagcaccctctccaggcctcaagctggagccgcctctcactccacggtgcccattggactttgccccccagacactgagttttccttatgcccgggatgacctctctctctatggagcatcccctgggcttggagggacaccaccttcccagaacaatgtgcgggctgtgccacagcctggtgccttccagagggcatgccagcctttgccagcgagccagccctgctcagagcctgtgaggcctgcacaggaagccgaagagaagacctggctgcccagctgcaggaaagagaagctccagccccggctcagtgagcactctgggccgcccatcgtcatccgagacagtccagttccctgtacccccccagcactgcccccctgtgcccgggagtgccagtctcttccacagaaggagggcgcaaggccacccagctctccaccaatgcctgtcattgacaatgtcttcagcctggccccctaccgtgactatctggatgtgccggcacccgaggccacaactgagcctgactctgccacagctgagcctgactcagccccagccaccagtgaaggtcaggacaaaggctgcagggggaccctgcctgcccaggagggcccctcagggagtaaacccctaaggggctcacttaaggaggaggtagccctggatttgagtgtgaggaagcccacagcagaggcctcccctgtcaaggcttcccgttctgtggagcatgccaagcctactgcagccatggatgtgccagatgtgggcaacatggtgtcagatctgccaggcctgaaaaagatagacacagaagcaccaggcttgcctggggtgccagtgaccacagatgccatgccaaggaccaacttccacagctctgtggccttcatgttccgaaagttcaagatcctccgtccggcacctttgcctgcagccgtggtcccgtccacgcccacctcagctcctgctcccacacagcctgcacccacccccacatctgggcccattggactgcggattctcgctcaacagcccttgtctgtgacctgcttcagcctggcactgcccagccctccagccgtagctgtggcctcccctgcccctgctccagctccatcccctgctccggctcgagctcaggctccagcttcagcccgggatccagctccagctccagctccagttgcaggccctgctccagcatctacttcagccccaggggactccctggagcagcattttacaggactacatgcgtccctgtgtgatgctatttctggctccgtcgcccactctcctccagagaagcttcgcgagtggctagagacggctgggccctggggccaggctgcgtggcaggactgccagggtgtgcaggggctgctggccaagctgctgtctcagctgcagcgcttcgatcgcacccaccggtgccccttcccccatgtggtgcgagctggcgccatcttcgtgcccattcacctggtgaaggagcggctcttccctcggctgccacccgcttctgtggaccatgtgctgcaggagcatcgtgtggagctgcggcccaccacgctgtcggaggagcgggcactgcgggagctcgccctgccaggctgcacctcacgcatgctgaagttactggcgctgcgccagctgccggacatttaccccgaccttctcggcctgcagtggcgcgactgtgtacgccgccagctgggtgagcatggggcagccccagtggccaccggagctgtgtgagcaagtgacaggtgactttgacactgaggctggagctgtgtcctcctcagagcccactgtggccagaggtgagccagagagcctagccctggctcagaagtcaccggcccccaaggtcaggaagccaggcaggaagccaccaacccctggcccggagaaagcagaggcagctgctggggaagagtcctgtggtgcctcccctacccctgctaccagtgccagcccacctggccccacactgaaggcccgcttccgcagtctgctggagaccgcctggctcaatggcctggctctgcccacctggggccacaagtcctcaagaccagaccagccctcaccctgcccacagctgctggacagccagagccatcacctgtagcactggttgccagtgctgtgtgtatagcagtcactctccacccttcccttctgcctgcccagctgccccggggccacgagtggatgctggggctgtggctgctcccctggaggggttccatctctgaccctgtggcccattcagggtgggctgaagagcccctgagcttttaacgtgagggtctttattggataggactactccctatttcttgcctagagaacacacatgggctttggagcccgacagacctgggcttgaatcccggctcgtgttcttgctgcaggacctgggcaagaaacttcacctctgctgagccctcattccccatgtgtaaaatgggacaacgcaacctacctcacagggttgttgtggggatgctgcctgatacataccctgtcaccatttggtctctgcttcctctctgggacagggcctagaattggaggcagagaaccttcctatagaaagtcttcgtgtgtcctaggacttggctatcgtagagtggtaccttaggcagtggatgtgactcacactttcaggagtcaccccccagcatttggggttgggttggccctactccagcctggagctccctgagggagcctgcactccctgctcccaatccccgctactggtgcagggatgcagcctggagctggcgtccttgttctgggcctgctgctgccgccaccccaggaggccccaggcctgtcctgaattgacatcagtgcttccctgaactgcctcccccacccctggcattatcccaggaaacttatgttttctagaagctaagcagctgctgggactcagggactggtgcaggtaggctgagtggcagctcagtcctagaaggtctctgaagatctggactgaggaccctgctgctccccaagccagagcccatcagccaggcctgctgtgagccacctgcctgtggagtgctgagctcaaccaaaggctggcaagctctgggcctcatttaagggattctgatgagccgatgggccctggaggcagcccattaaagcatctggctcgtttttggaa

SEQ ID NO: 118353 - DNA, 11244 bp, Homo sapiens
  Payload ID: 3159
  Gene Symbol: C15orf40
  Gene Name: chromosome 15 open reading frame 40
  Uniprot ID: Q8WUR7
  ENST ID: ENST00000304177
  CDS Start-End: 9-470
aggcggggatgctgcggctccgcagcgggctgaggcaccttcgggcaacacccaatactcggggctccgctcggcttctttgcgccgagatgcctaagaaggctggtgcgacgaccaagggtaaaagccagagcaaggaaccagagagaccacttcctcccttaggtcctgtggcagttgatcctaaaggatgcgtcaccatagccatccatgcaaaacctggctccaaacaaaatgctgtaacagatttgacagcagaggctgtaaatgtagctattgcagcacctccatcagagggagaggctaatgctgagctctgtcggtatctttccaaggtcctagaactcaggaagagtgatgtggttttggataagggtggtaaatctcgtgaaaaggtggtgaagcttttggcttctacaactccagaagagatcttggagaaattaaaaaaggaagccaaaaaaacataaaagcaagaaatgaggccgggcgcagtggctcatgcctgtaatcccagcactttgggaggccgtggtgggcggatcacctgaggtcaggagttcgagaccagcctgaccaacatggtgaaaccccatctctacgaaaaatacaaaattagccagatgtgatggcgcatgcctgtaatcccagttactcaggaggctgaggcaggagaatcacttgaacctggggggcggaggttgcagtaagccgagatcgcgccgttgcactccagcctgggcaacaagagtgaaactctctccccccgaaaaaaaagaaataaaaaatacatccttgagaaacttttttattgctaatggtgaagaggctgttaaatagaaaaatatactacatgcacagaagaacatgggggacatatatatatgtatatattcgaataagactccaaaaagtagaaatttaaaaagtgctatacattgcatcaggttctaaaatcccaaaccccaaacagcctggaacatgttactctgatttcatggcgttgtaaaataacagagctgggaagaatattcaagatgacctgatttaacacctttcattctgttggggggcctttgatttcctatatccagaagttgagagacttactcaagattgtaccatgcaagctggcaactagaacccaaatccttggactacttgttgaatgcagtttttctagattgtaaattaaaaatcatatctccacaacggttctggaattctggggattgccttctaatccagtttacaagtgacagaaaacctgttatgctgctttgtagtcttaccttagatttttaaatgcttatttaaatgtaaaaaaaattttttttttacatcttttaaagactatatttaccattttgttgaaaaagtaaagaaaaatcatgacttgtaattaaatgtgaattataatttttgagaagtcactgaattttcatcttcctctaataacttaaataatcagcaaattcagtagtttttatgaatctccaaagatccttaaaagaagaaagaggacttggaagctattttcagtatttgtaaaagcttgtcagaaattacatctatattaaagtttcaaaagctaataatatatttttacatcttcaggtcaagttatagtaatttattaaagaaaataaaattaatttcctttgctgatcaggagagctgatctgcagttgtgcgctttgtccagcaagtacatgagaaagatgtattgatggaccaaatcattaaaaacaaaatccacaaggaagaacaataataaaaattgctgatggtagctgggcttggtggctcacgcctgtaatcccagcgctttggaaggttgaggcaggaggaacacttgagcccaggagtttgagaccagcctgggcaacgaagtgagaccctgtatctgtctctgtctctttctttatagatagatagatatacatagatagattttatacatagatatatatatttatatgtaagattatatataagacctcatatataagaagtccaggccgggtgtggtggctcatgcctgtaatcccagcactttgggaggtcgaggcgggtggatcacctgaggttaggagtttgagaccagcccggccaacatagtaaaaccccatctctactaaaaatataaaaactagccaggcatggtggtgggtgcctgtaatctcagctactcgggaggctgaggcaggagaattgcttgaacccaggagacggaagttgcagtgagcccacacggtgccactgcactccagcctcggcgacaagagtgagactccgtctcaaaaagaaagaaaaaatcccagacagtgaaagagaagctactcgtctagtacaactcttaacttgtaccaaataggtatcaagggcaagaaaaggtggcttatgtgagatcacagtgcacattaatggcagagcttggtttaagcccagctgctttgtcttctaaactgtgccatatactgcctgcaaatgtgcttctgttttacatggtcttaagagcttttcccactctttctcaagaccattgccatgtgtgctgtaaagccgttttacttgtggattttacatggatcactgttagaatgtcataaaatgatatcataaaagatcaactttcctggccgggcatggtagctcacacctgtaatcccagcactttgggaggccaaggcaggtggatcacctgaggtcgggaattcgagaccagcctgaccaacatggagaaaccccatctctactaaaaatacaaaaaattagctgggcgtggtggcacatgcctgtaattgcagctactcgggaggctgaggtaggagaatcgcttgaacccgggagttggaggttgcggtgagctgagatcgtgccattgcactctagcctgggcaaaaggagcgaaactccatctcaaaaaaaaaaaaaaaaaaaaaggatcaacttttggtcaggcgtgttggcttacgcctgtaattccagcgctttgggaggccgaggcaggcagatcacgaggtcaggagttcaagatcaccctggccaacatggtgaaaccccgtctctactaaaaatacaaaagttacctgggcatagtggcagatgcttgtaatcccagctactcgggaggctgaggcaggagaattgcttgtgaaccgggaccctggaggcagaggttgcagtgagccaagatcgcacaactgcgaactgcgctccagcgtgggctgcagaggcagactccgtctcaagaaaaaaaaaaatcagctttctttccttcccctgaatcttctgcagtgccagtttcatcctcaggcccacttgtttcatgtagacaaaaggccaaccaggtttcatattcacgtatcaacccctgcagtaggagaaaaggccactcctaggagctctggtattttccagaagctttcagtcagccttcccttgtatcagcccaaatcaagtcacatgaaatttctaagccagcccctgtgatcagggaatgccattctataacacaagttccctaaagcagtaactatagaagaaagaattaccctaattgtttcaggccaattaaggcccatcctagaggtggaaatggggtcagcatactcagaagcaaagaagtagagagagttggatacctgaataaaattgggaaaagttacaaagagaggaatggatgctggagaggaaccaccagtttctactacgataacctatttacttcattttaaacggtgatattttaaacgtgggaacattttgcctagtgagtttttttctttgagaaacgtagcagtatcttgtaacaaagaagatatggggacactctgtcatcaaaaactactttggggccgggcatggtggctcacacctgtaatcccagcactttgggaggccaaggtgggtggatcacctgaggtcaggagttcaagaccagcctggccaccatggtgaaaccccacctctactaaaaattacaaaaattagctgggcgtggtggtacatgactgtaatctcagctacttgggaggctgaagcaggagaattgcttgaacccgggaatcagaagctgcagtgagccgggatcacaccactgcactccagcctgggtgacagagcaaggctctgtctcaataacaacaacaaaaaaacagaaacaaacaaaacaaaacaaactactgttggaggtaggaactggcccaggggctgtattcccagaacacgattcccttttccccactgcaaacaagatagtctacagcagcctcacaacttaattgtctcacacaggactattcctactgttaagagatcacagctaaggcttgggcaccttgacctgctgtagaagctcagttaatgtacttttcatcatctgggccctggtattcccctgtaaatactgaagtagacccagtgacctagtgcccaagacacaaaatattcagcctccgtaacatttgtctaatgacatggttctagctttgctcactcccattaatttcaagtgagtactggctaggcagtctatagtgacttgattacactgtctttcttgtcctgtgctgtcctgagaatcctggatttgaagcagcctatgaataaggtttgaaaaatatttatccaactatgccgacatatgatgttctagcactgcatctgtcatctatcacccgcaccttaataaatgataattacttgtgcaaacatgatgtattaatcacttattaacttggttgcttacttgacagacactgctaggtggtttgcctatgctgtacttcgacagatcctgggaaagaacagcctggctcattatgccctggaggcaggagcagagatttcagacttctgatttctgtgagccattccacactttcctctcggttaggggagggacagcaataaccagaggatgaaggtggaacctttgcagtgcacacctaggccagtgcagtggcttatgcctgtaatcccagcactttgggaggctgaggcgggtggatcacttgaagtcaggagtttaagaccagcctgaccaatatggcgaaaccctgtttctactacaaatacaaatattcgctgggcatggcaatgcatgcctgtagtcccagctacttgggaggctgaggcctgagaattgcttgaacccaggaggcagaggttgcagtgagccaagatcatgccactgcattccagcctgggcgacagagattccatcttgaaaaataaagttccaaatacctaaatgctcaaactttaggaggcagctctctgggctgtgggctgtcagcatccccctcctagattccagggatttggttacatagttctttagctgtaatgcagagtataaattttagaacccacatggccccaaattcaaattgttttaatgcatgtaactagtgactaaaaacttagaatttcaatttacatccaagaggtggcaccataacacaacagcaaaaagccacacaaactgaaactcgtttccttttgtagtgaacagcactattaggtagtctgcagtgcctgactacgggctcacatgctgtgatccttctcgttttctcagagccattccttaagcttagtccccttgtatcttaaatttagctcaggtcggagtgttgttaacttggggccagctgggttcgtgagagtctcagcccattgccatggtggagtcagcatggtcttgagttccttccttaactctgcaggtttcagaaatccacgtagccagtgtttctgaaaatggatctaggctgggcaattggcaaggagctaatttcttatcaagatgccagcttattaacttgagtgaagaacacaactgccaaatagactgtatagtgggatctgctagtgagaacattctgtccctttgggaaatctctttaagagaatcatcatttgaaggctgcttggagagcctggaatcagagccagggaaattaggggccagggtaagggagctatgaccatctatagctcccatttctgctgcagggatggacctatggtatcagccagccacagaaggtcttttgggacaacactggagataatgatccttcatagtacaggaactccctttttctaggttgcaggaagaccacctatttctacccacataggcattcctcagacaatcctcataatttagttattaagggtttttgcattttataatcctgtctgcctcagggtccatcggtcccctagatagagtttggggagggaagaatccccaaactttgcagccacaagttacgtactccctggtcatttctacagaaaactaatctgtgatgtgtttttactatcgcagtgacgttcaaactgtttcaaagccttaggtttccccagagatgcctagggggattggggcactgtggacaataagggagtgagtcaagtcaacagaaatgctagctagcctttagttctcttctacagccgtactgggtggcatgtacacgtgatagctgctcacaccacatgtggctattgagcacttgaaatgtggctaacataatttaaaagtaaaaggtaaggctggccatgttggctcacgcttgtaatcccagcactttgggaagctgaggtaggaggatagtttgtggccaggagtttgagaccagcttgggcgacgtggtaagaccccatttctccaaaaaaaattaaaaaaattaactaggcatggtggtgtgtgcctgtagtctcagctacttgcgaggctgaggcaggaggatcacttgagctcaggagttcgacgtagtgagccatgattgcgccactgcactccagcttgggtgagagggcaagacgctgtctcaaataaataaaaatgagccccctccccctccccctccccctctccctcaccctctccctctccccacggtctccctctgatgccaagccaaagctggactgtactgctgccatctcggctcactgcaacctccctgcctgattctcctgcctcagcctgcccagtgcctgtgattgcaggcgcgcgccgccacgcctgactggttttggtggagacggggtttcgctgtgttggccgggccggtctccagcccctaaccacgagtgatccgccaacctcggcctcccgaggtgccgggattgcagacggagtctcgttcactcagtgctcaatggtgcccaggctggagtgcagtggcgtgatctcggctcactacaacctacacctcccagccgcctgccttggcctcccaaagtgccgagattgcagcctctgcccggccgccaccccgtctgggaagtgaggagtgtctctgcctggccgcccatcgtctgggatgtgaggagcccctctgcctggctgcccagtctggaaagtgaggagcgtctccgcccggccgccatcccatctaggaagtgaggagcgcctcttcccagccgccatcacatctaggaagtgaggagcgtctctgcccggccgcccatcatctgagatgtggggagcgcctctgccccgccgccccatctgggatgtgaggagcgcctctgcccggccgagaccccgtctgggaggtgaggagcgtctctgcccggccgccccgtctgagaagtgaggagaccctctgcctggcaaccaccccgtctgagaagtgaggagcccctccgcccggcagctgccccatctgagaagtgaggagcctctccgcccggcagccaccccatctgggaagtgaggagcgtctccgcccggcagccaccccgtccgggagggaggtgggggggggtcagtcccccgcccggccagccaccccatccgggagggaggtgggggggtcagccccccgcctggccagccgtgccgtccgggagggaggtggggggtcagccccccgcccggccagccgccccgtccgggaggtgaggggcgcctctgcccggccgcccctactgggaagtgaggagcccctcagcccggccagccaccccgtccgggagggagatggggggtcagccgccccgtccgggagggaggtgggggggtcagccccccgcctggccagccgccccgtccgggagggaggtgggggggtcagccctccgcccggccagccgccccgtctgggaggtgaggggcgcctctgcccggccgcccctactgggaagtgaggagcccctctgcccggccagccgccccgtccgggagggaggtgggggggggtcagcccccctgccctgccagccgccccgtctgggaggtgaggggcgcctctgcccggccgcccctactgggaagtgaggagcccctctgcccggccaccaccccgtctgggaggtgtgcccaacagctcattgagaacgggccaggatgacaatggcggctttgtggaatagaaaggcgggaaaggtggggaaaagattgagagatcggatggttgctgtgtctgtgtggaaagaagtagacatgggagacttttcattttgttctgcactaagaaaaattcctctgccttgggatcctgttgatctgtgaccttgcccccaaccctgtgctctctgaaacatgcgctgtgtccactcagggttaaatggattaagggcggtgcaagatgtgctttgttaaacagatgcttgaaggcagcatgctcgttaagagtcatcaccactccctaatctcaagtaatcagggacacaaacactgcggaaggccgcagggtcctctgcctaggaaaaccagagacctttgttcacttgtttatctgctgaccttccctgccaaatccccctctgtgagaaacacccaagaattatcaataaaaaaataaattaaaaaaaaataaaaataaataaataaaaatgaaaaacaaaagcataatagaaataaagaccatgttggaaacagtgcaacagagaagaggctgaaaacggtatgaaatttagaaggcaagatagagaacagtgaataaagacaggaaaataacagctatagaagtcagttaaaaataataataataattattattattattattattatttgagacgaagtttcgctcttgttgcctaggctggagtgcagtggttcaatcttggctcactgcaacctccgcctcccaggttcaagcgattctcctgcctcagccttccaagtagctgggattacaggcctgagccaccatgcctggctaaatttttttcttgttgttgtatttttagtagagacggggtttcaccatgttggccaggctggtctcagactcctgacctcaggcgatccatccgccttggcctcccaaattactgggattacaggcgtgaaccactgcatccagccaaaattattcatttttgtattgtttcactttttatattttttattttattttattattttattttattttaattttattttgagacggagtctcactctgtcacccaggctggagtgcagtgtcgcagtctcggcctactgcaagttctgcgtcctgggttcacgccattctcctgcctcagcctcctgagtagctgggactgcaggtgcccgccaccacgcccggctaatttctttttgtatttttagtagagacggggtttcaccgtgttagccagaatggtctcgatctcctgacctcgtgatccgcctgcctcggcctcccaaagtactgggattacaggcgtgagccaccgcgccagctttattattttgtaaacacacaagttgaggaaattttaaaatgagaaaaatacacacacaaacaacaaagctctagccattagcaattagaacagctttatttacctaattcagacaaagagactggagattctttagggagttaaaggcacgagcagtggaaaaaaaccatgagatcatcatcacatcatcccctgaagctgtctcaggaggagtcactgaaacccagagaaaatctaactggtaattaatacatagggctctcgtgtccctgagggaaaggagtgaaaacaccaactgaattagcccatacatggggctgtctgtgccctttagggagaggagtgaaaacaactgaaatcagcccatcagcccatgaagacactggtgaaaattatgcgacttgtccttcttgcacctaagcagcccacagataactcactcttatatacgaacctgactgactgggtagccattatgtgcctagcttagtgctgcatgctttatgctctctcttaatcctgcaatggggcagtcgaatcacatattagctgtttttgttgcctgtttgtttttgagacggagtctcgctcggtcacccaggctggagtgcagtggtgcaatcttggctcactgcaacctccgcctcctgggttcaagcgattctcctgcctcagcctccggagtagctgggattacagtcatgtaccaccacacccagctaatttttgtatttttagtagagatggggttttgccatgttggccaggctggtctggaactcctgacctcaggtgatccttccaccttggcctcccaaagtgatgggattacaggcgtgagccaccgtgcctggccagctgttctgactgaagacttgtcttcttcgttaacctgctcctcctgtttcatcctgcaaatgtttaaatctgaggggtattatccacagctcatctccacttttctaatctgacagcactgataattgaattcctcagaagcaagatgtttctctggcacccagaggcctcagcagtgtcacgacagctgaagtgtcacttattcctcatcctgggcacaccatgatggagtgcagccccactgattgggacccatgcagccagcctggcccagggccactctctctcccagaatgtgcacaagtcaagggatctctacttccatccttattttcctcaaaagctggtgccagcagtaatcaaccagacttctagaaaagaggagataatctgctctcaaggctgctgtgggctccagtgttgtaatctactacttgaatctagttgtttatttcattctataataatttaatacagcagatgtcaggagaaatctttgtttagatattatgtcatatctggatatatctgaatcctgaatgattaatctaaatattaacaatattcacttctgccaatgtcaagagtattttctgctactgggcttaaatcaattttaaaatttgagagttttaaaagcatatctttctgtgttcataaataaacagaacgaagatt

SEQ ID NO: 118354 - DNA, 518 bp, Homo sapiens
  Payload ID: 3159
  Gene Symbol: C15orf40
  Gene Name: chromosome 15 open reading frame 40
  Uniprot ID: Q8WUR7
  ENST ID: ENST00000451195
  CDS Start-End: 1-504
atgctgcggctccgcagcgggctgaggcaccttcgggcaacacccaatactcggggctccgctcggcttctttgcgccgagatgcctaagaaggctggtgcgacgaccaagggtaaaagccagagcaaggaaccagagagaccacttcctcccttaggtcctgtggcagttgatcctaaaggatgcgtcaccatagccatccatgcaaaacctggctccaaacaaaatgctgtaacagatttgacagcagaggctgtaaatgtagctattgcagcacctccatcagagggagaggctaatgctgagctctgtcggtatctttccaaggtcctagaactcaggaagagtgatgtggttttggataagacaggatcttgctacattgcccaggctggcctcgaactcctggcttcaagtgatcttcccgcctcggcctcccagagtgctgggataacaggtgtgagccaccatacccaaccagctttattactgatttccctctaaaaagagactcaagt

SEQ ID NO: 118355 - DNA, 287 bp, Homo sapiens
  Payload ID: 3159
  Gene Symbol: C15orf40
  Gene Name: chromosome 15 open reading frame 40
  ENST ID: ENST00000510873
  CDS Start-End: 1-287
ctgcggctccgcagcgggctgaggcaccttcgggcaacacccaatactcggggctccgctcggcttctttgcgccgagatgcctaagaaggctggtgcgacgaccaagggtaaaagccagagcaaggaaccagagagaccacttcctcccttaggtcctgtggcagttgatcctaaaggatgcgtcaccatagccatccatgcaaaacctggctccaaacaaaatgctgtaacagctctgctattccattcctcaacaattggaggagactcaggagggcgtttcag

SEQ ID NO: 118356 - DNA, 505 bp, Homo sapiens
  Payload ID: 3159
  Gene Symbol: C15orf40
  Gene Name: chromosome 15 open reading frame 40
  ENST ID: ENST00000512638
  CDS Start-End: 1-110
ccgctcggcttctttgcgccgagatgcctaagaaggctggtgcgacgaccaaggccagtagcagggtaaaagccagagcaaggaaccagagagaccacttcctcccttaggtcctgtggcagttgatcctaaaggatgcgtcaccatagccatccatgcaaaacctggctccaaacaaaatgctgtaacagatttgacagcagaggctgtaaatgtagctattgcagcacctccatcagagggagaggctaatgctgagctctgtcggtatctttccaaggtcctagaactcaggaagagtgatgtggttttggataagacaggatcttgctacattgcccaggctggcctcgaactcctggcttcaagtgatcttcccgcctcggcctcccagagtgctgggataacagctttattactgatttccctctaaaaagagactcaagtgtggagctgactcatctatagattaaggaatcacaaagtaccatagtcacttaacaaa

SEQ ID NO: 118357 - DNA, 457 bp, Homo sapiens
  Payload ID: 3159
  Gene Symbol: C15orf40
  Gene Name: chromosome 15 open reading frame 40
  ENST ID: ENST00000514272
  CDS Start-End: 1-258
aatgctgagctctgtcggtatctttccaaggtcctagaactcaggaagagtgatgtggttttggataagggtctctcactttgtcacccaggctggagcacagcggcacaacctcgggtcactgcagccttgacttccctggctcaaacaatcctcccacctcagcctcccaagttgctggaactacaggtgcatgccacccacacccggctaattttcgtattttttgaagagacgggatctcgccatgttgcctaggctggaagtcttgggcttcggtgatcctcctgccttggcttcccaaagtgctgggattacaggcatgagccactgtgcctggcccgaattatttttcttactttattaacttccaataaaaggtttgggacaaaaagatgtgacaatggaagctattgtgataacttcttcattagtctgcctttcctccaaacatatg

SEQ ID NO: 118358 - DNA, 561 bp, Homo sapiens
  Payload ID: 3159
  Gene Symbol: C15orf40
  Gene Name: chromosome 15 open reading frame 40
  Uniprot ID: Q8WUR7
  ENST ID: ENST00000538348
  CDS Start-End: 1-450
atgctgcggctccgcagcgggctgaggcaccttcgggcaacacccaatactcggggctccgctcggcttctttgcgccgagatgcctaagaaggctggtgcgacgaccaagggtaaaagccagagcaaggaaccagagagaccacttcctcccttaggtcctgtggcagttgatcctaaaggatgcgtcaccatagccatccatgcaaaacctggctccaaacaaaatgctgtaacagatttgacagcagaggctgtaaatgtagctattgcagcacctccatcagagggagaggctaatgctgagctctgtcggtatctttccaaggtcctagaactcaggaagagtgatgtggttttggataagctctgctattccattcctcaacaattggaggagactcaggagggcgtttcaggtattcctgatactccttgtcattttctgtgaatctactagcaaacatctcttcaaactttggaacagcttcggcagtgtcagtcattctgaaaatctgtacaattttaaagacatttccattaaaaaaaatttaaaaattaa

SEQ ID NO: 118359 - DNA, 419 bp, Homo sapiens
  Payload ID: 3159
  Gene Symbol: C15orf40
  Gene Name: chromosome 15 open reading frame 40
  ENST ID: ENST00000563387
  CDS Start-End: 1-104
ggcttctttgcgccgagatgcctaagaaggctggtgcgacgaccaaggccagtagcagggtaaaagccagagcaaggaaccagagagaccacttcctcccttaggtcctgtggcagttgatcctaaaggatgcgtcaccatagccatccatgcaaaacctggctccaaacaaaatgctgtaacagatttgacagcagaggctgtaaatgtagctattgcagcacctccatcagagggagaggctaatgctgagctctgtcggtatctttccaaggtcctagaactcaggaagagtgatgtggttttggataagaagttgagagacttactcaagattgtaccatgcaagctggcaactagaacccaaatccttggactacttgttgaatgcagtttttctagattgtaaattaaaaatc

SEQ ID NO: 118360 - DNA, 631 bp, Homo sapiens
  Payload ID: 3159
  Gene Symbol: C15orf40
  Gene Name: chromosome 15 open reading frame 40
  ENST ID: ENST00000508990
  CDS Start-End: 1-440
tgaggcaccttcgggcaacacccaatactcggggctccgctcggcttctttgcgccgagatgcctaagaaggctggtgcgacgaccaagggtaaaagccagagcaaggaaccagagagaccacttcctcccttaggtcctgtggcagttgatcctaaaggatgcgtcaccatagccatccatgcaaaacctggctccaaacaaaatgctgtaacagatttgacagcagaggctgtaaatgtagctattgcagcacctccatcagagggagaggctaatgctgagctctgtcggtatctttccaaggtcctagaactcaggaagagtgatgtggttttggataagaagttgagagacttactcaagattgtaccatgcaagctggcaactagaacccaaatccttggactacttgttgaatgcagtttttctagattgtaaattaaaaatcatatctccacaacggttctggaattctggggattgccttctaatccagtttacaagtgacagaaaacctgttatgctgctttgtagtcttaccttagatttttaaatgcttatttaaatgtaaaaaaaattttttttttacatcttttaaagactatatttaccattttgttgaaaaagta

SEQ ID NO: 118361 - DNA, 559 bp, Homo sapiens
  Payload ID: 3159
  Gene Symbol: C15orf40
  Gene Name: chromosome 15 open reading frame 40
  ENST ID: ENST00000565712
  CDS Start-End: 35-241
gcagagggctcttccggcgccttcccaggcggggatgctgcggctccgcagcgggctgaggcaccttcgggcaacacccaatactcggggctccgctcggcttctttgcgccgagatgcctaagaaggctggtgcgacgaccaagggtggtaaatctcgtgaaaaggtggtgaagcttttggcttctacaactccagaagagatcttggagaaattaaaaaaggaagccaaaaaaacataaaagcaagaaatgaggccgggcgcagtggctcatgcctgtaatcccagcactttgggaggccgtggtgggcggatcacctgaggtcaggagttcgagaccagcctgaccaacatggtgaaaccccatctctacgaaaaatacaaaattagccagatgtgatggcgcatgcctgtaatcccagttactcaggaggctgaggcaggagaatcacttgaacctggggggcggaggttgcagtaagccgagatcgcgccgttgcactccagcctgggcaacaagagtgaaactctctccccccgaaaaaaaagaaataaaaaa

SEQ ID NO: 118362 - DNA, 2578 bp, Homo sapiens
  Payload ID: 3160
  Gene Symbol: C15orf41
  Gene Name: chromosome 15 open reading frame 41
  Uniprot ID: Q9Y2V0
  ENST ID: ENST00000338183
  CDS Start-End: 249-800
agattgcatactcaagaagaggaggaacataaaatacgtgatgtcttctcttaagtcaatcgcaggccactctgctgagcatcttctcccaggagtaccagaaacacattaaaagaacacatgccaaacatcatacttcggaagcaattgaaagttattaccagaggtacctgaatggagtggtgaaaaatggagctgccccagtgctcctggacctggccaatgaggtggactatgcgccctcattaatggctcggcttatactggagaggtttctacaggaacacgaggaaactccaccctccaagtctattataaatagtatgctacgggacccttctcagattccagatggagttctagcaaatcaggtctatcagtgcattgtgaacgactgctgttacggaccactagtggactgcatcaagcatgccattggtcatgagcatgaggtcctgctgagagacttgcttctagagaaaaacctgtccttcctagatgaagatcagcttcgtgcaaagggttatgacaaaacaccagacttcattttacaagtaccagttgctgtagaagggcacataattcactggattgaaagcaaagcctcatttggtgatgaatgtagccaccacgcctacctgcatgaccagttctggagctactggaatagatttgggccaggcttagtcatctattggtatggatttatccaggagctggactgcaaccgggaaaggggcatcctgctcaaagcctgtttccccacgaacattgtcaccttatgccacagcatagcttgaccctgaagatcctggaagagaagctgggaggaaaaggtgaatccggaagcaattttactttcctgcactgtaagatcctggcaacatctgccctgaacttcagctgaactcttgctgcccgtagtcacaccactacctctttagacaaacatatcaagagtttctgttttccttcatcccttgctgatgtgaacagccaagaactacagacacaacccactcattatcagcatttctgtctctgtcaaacaattagtttatagatagtcataatctttctttcttccggatggtttatccttgtatgctgaacaaaagaaaaaatgtgaagactgaaaggtgtgatttttcaattctcctcccagttaccgaatcaccctcttatttttttttccctaagcctccgttcactgtctctccctctccctttctcttcatgtgcactcacagagacccagcattgcattaccatcgtggaataatctagcgcaaacctaggaaagctgaagccacaaagtccaaagccacctttgtactcacctgcagagctccagaagaccttgatggcagcctgcctatgctgtgtgtttgctatattcaatctttacggcttcctgacttctgtgacagtaagccaagtgcaaaaatacacttgatgagaatttcctcttttaataatgttatttgaacaccacatattttagatttatcttatttgaaagtattagttccattgtgcctggaaaccacactcctttagattgggggccgagaggcgacaacccaacattgaggagagtttatttttaaacatggctagttgtcagtatgtacgtgagctagtatttttatgagtcgagttttttaaaggcacattctgtatactgcttagtatatgcattttataccatgtaattataaaacactcgagtaagttcagcattagaaatgtttagctttgtatgaactgagtgtgccagaaataaacctggagcaatttttaaataagcaaaataaaggagatttttctatttgttcactttaatttattcacttttgtgtacttttatgtactgcaaatcagatttcagtctaaagcgaaacatcagtaagttaataataaacctatcttttgggaagttgaatattaatctgtacccaaaacgtatttagtaaaatatttgcccccgccaccctgccatgctgacataacaacttttataatgttgaatagatgatatgggaaatactaataacaacaatgtaatttttgcagacagctttaacttatatacattgcttgatttttttcaaaagactaaatatgtcatttatactttgtttattttctaccaaagaaggtttgtaaaaatatgcctgctgcttttccttttgaaggacacaaacctggtcccaacatgtgtggattttaactctgagtggggtgcattaaatcaaaagagagaggcagaagatgaaatgctaaagaagggtcaggcaaacttctgtttcagtataaaattcatcatgcaggcttctgagtgaaatagaatgatttgaaaccactactgtattgcctggatacacacacacacacacacacacactttatacaaaaatgttaaaagcaggtttcctggcatgttctaaactgttttttctttaggaataaattacatttatctgcacagatgttgaaaatcctgttaaacccttgtcaaggatttgtttattttacattaaacaaatttattatgatgaacgtgaacaaataaatt

SEQ ID NO: 118363 - DNA, 2240 bp, Homo sapiens
  Payload ID: 3160
  Gene Symbol: C15orf41
  Gene Name: chromosome 15 open reading frame 41
  Uniprot ID: Q9Y2V0
  ENST ID: ENST00000437989
  CDS Start-End: 18-863
ctggtccctggcccaacatgatactgaccaaagctcagtacgacgagatagcccagtgcctagtgtctgtgccgcctaccaggcagagcctgaggaagctgaagcagaggtttcccagtcaatcgcaggccactctgctgagcatcttctcccaggagtaccagaaacacattaaaagaacacatgccaaacatcatacttcggaagcaattgaaagttattaccagaggtacctgaatggagtggtgaaaaatggagctgccccagtgctcctggacctggccaatgaggtggactatgcgccctcattaatggctcggcttatactggagaggtttctacaggaacacgaggaaactccaccctccaagtctattataaatagtatgctacgggacccttctcagattccagatggagttctagcaaatcaggtctatcagtgcattgtgaacgactgctgttacggaccactagtggactgcatcaagcatgccattggtcatgagcatgaggtcctgctgagagacttgcttctagagaaaaacctgtccttcctagatgaagatcagcttcgtgcaaagggttatgacaaaacaccagacttcattttacaagtaccagttgctgtagaagggcacataattcactggattgaaagcaaagcctcatttggtgatgaatgtagccaccacgcctacctgcatgaccagttctggagctactggaatagatttgggccaggcttagtcatctattggtatggatttatccaggagctggactgcaaccgggaaaggggcatcctgctcaaagcctgtttccccacgaacattgtcaccttatgccacagcatagcttgaccctgaagatcctggaagagaagctgggaggaaaagagacccagcattgcattaccatcgtggaataatctagcgcaaacctaggaaagctgaagccacaaagtccaaagccacctttgtactcacctgcagagctccagaagaccttgatggcagcctgcctatgctgtgtgtttgctatattcaatctttacggcttcctgacttctgtgacagtaagccaagtgcaaaaatacacttgatgagaatttcctcttttaataatgttatttgaacaccacatattttagatttatcttatttgaaagtattagttccattgtgcctggaaaccacactcctttagattgggggccgagaggcgacaacccaacattgaggagagtttatttttaaacatggctagttgtcagtatgtacgtgagctagtatttttatgagtcgagttttttaaaggcacattctgtatactgcttagtatatgcattttataccatgtaattataaaacactcgagtaagttcagcattagaaatgtttagctttgtatgaactgagtgtgccagaaataaacctggagcaatttttaaataagcaaaataaaggagatttttctatttgttcactttaatttattcacttttgtgtacttttatgtactgcaaatcagatttcagtctaaagcgaaacatcagtaagttaataataaacctatcttttgggaagttgaatattaatctgtacccaaaacgtatttagtaaaatatttgcccccgccaccctgccatgctgacataacaacttttataatgttgaatagatgatatgggaaatactaataacaacaatgtaatttttgcagacagctttaacttatatacattgcttgatttttttcaaaagactaaatatgtcatttatactttgtttattttctaccaaagaaggtttgtaaaaatatgcctgctgcttttccttttgaaggacacaaacctggtcccaacatgtgtggattttaactctgagtggggtgcattaaatcaaaagagagaggcagaagatgaaatgctaaagaagggtcaggcaaacttctgtttcagtataaaattcatcatgcaggcttctgagtgaaatagaatgatttgaaaccactactgtattgcctggatacacacacacacacacacacacactttatacaaaaatgttaaaagcaggtttcctggcatgttctaaactgttttttctttaggaataaattacatttatctgcacagatgttgaaaatcctgttaaacccttgtcaaggatttgtttattttacattaaacaaatttattatgatgaacgtgaacaaataaattaaaaaataaaaaa

SEQ ID NO: 118364 - DNA, 715 bp, Homo sapiens
  Payload ID: 3160
  Gene Symbol: C15orf41
  Gene Name: chromosome 15 open reading frame 41
  ENST ID: ENST00000562489
  CDS Start-End: 70-387
gacttcaggtgaaggacaggcagcaggagcagatgagatttagaataccaagactgtgtgtacacgcagatgtcagtggcagagaatgaagatcagcttcgtgcaaagggttatgacaaaacaccagacttcattttacaagtaccagttgctgtagaagggcacataattcactggattgaaagcaaagcctcatttggtgatgaatgtagccaccacgcctacctgcatgaccagttctggagctactggaatagatttgggccaggcttagtcatctattggtatggatttatccaggagctggactgcaaccgggaaaggggcatcctgctcaaagcctgtttccccacgaacattgtcaccttatgccacagcatagcttgaccctgaagatcctggaagagaagctgggaggaaaaggtgaatccggaagcaattttactttcctgcactgtaagatcctggcaacatctgccctgaacttcagctgaactcttgctgcccgtagtcacaccactacctctttagacaaacatatcaagagtttctgttttccttcatcccttgctgatgtgaacagccaagaactacagacacaacccactcattatcagcatttctgtctctgtcaaacaattagtttatagatagtcataatctttctttcttccggatggtttatccttgtatgctgaacaaaagaaaaaatgtg

SEQ ID NO: 118365 - DNA, 564 bp, Homo sapiens
  Payload ID: 3160
  Gene Symbol: C15orf41
  Gene Name: chromosome 15 open reading frame 41
  ENST ID: ENST00000566807
  CDS Start-End: 198-564
tctttaataccaccccatttcctcaaagctcagctttctgtttagttgtgaaacacattaaaagaacacatgccaaacatcatacttcggaagcaattgaaagttattaccagaggtacctgaatggagtggtgaaaaatggagctgccccagtgctcctggacctggccaatgaggtggactatgcgccctcattaatggctcggcttatactggagaggtttctacaggaacacgaggaaactccaccctccaagtctattataaatagtatgctacgggacccttctcagattccagatggagttctagcaaatcaggtctatcagtgcattgtgaacgactgctgttacggaccactagtggactgcatcaagcatgccattggtcatgagcatgaggtcctgctgagagacttgcttctagagaaaaacctgtccttcctagatgaagatcagcttcgtgcaaagggttatgacaaaacaccagacttcattttacaagtaccagttgctgtagaagggcacataattcactggattgaaagcaaagcctcatttggtg

SEQ ID NO: 118366 - DNA, 2866 bp, Homo sapiens
  Payload ID: 3160
  Gene Symbol: C15orf41
  Gene Name: chromosome 15 open reading frame 41
  Uniprot ID: Q9Y2V0
  ENST ID: ENST00000566621
  CDS Start-End: 251-1096
aagccaagctagggcactctggtgtacagccagtccccgccgcggaggtgccggtggagcctgggaccgggcgagtctccgccccgcttttgcagctaggggtgtgtttcaggggggattggggcaagccaagcaggcgaggacccgggcctgtgccgctttgcctacccctcatccctcggcaccaaggctacttgagccccagggtgttttttccttgttcccgccacctcctggtccctggcccaacatgatactgaccaaagctcagtacgacgagatagcccagtgcctagtgtctgtgccgcctaccaggcagagcctgaggaagctgaagcagaggtttcccagtcaatcgcaggccactctgctgagcatcttctcccaggagtaccagaaacacattaaaagaacacatgccaaacatcatacttcggaagcaattgaaagttattaccagaggtacctgaatggagtggtgaaaaatggagctgccccagtgctcctggacctggccaatgaggtggactatgcgccctcattaatggctcggcttatactggagaggtttctacaggaacacgaggaaactccaccctccaagtctattataaatagtatgctacgggacccttctcagattccagatggagttctagcaaatcaggtctatcagtgcattgtgaacgactgctgttacggaccactagtggactgcatcaagcatgccattggtcatgagcatgaggtcctgctgagagacttgcttctagagaaaaacctgtccttcctagatgaagatcagcttcgtgcaaagggttatgacaaaacaccagacttcattttacaagtaccagttgctgtagaagggcacataattcactggattgaaagcaaagcctcatttggtgatgaatgtagccaccacgcctacctgcatgaccagttctggagctactggaatagatttgggccaggcttagtcatctattggtatggatttatccaggagctggactgcaaccgggaaaggggcatcctgctcaaagcctgtttccccacgaacattgtcaccttatgccacagcatagcttgaccctgaagatcctggaagagaagctgggaggaaaaggtgaatccggaagcaattttactttcctgcactgtaagatcctggcaacatctgccctgaacttcagctgaactcttgctgcccgtagtcacaccactacctctttagacaaacatatcaagagtttctgttttccttcatcccttgctgatgtgaacagccaagaactacagacacaacccactcattatcagcatttctgtctctgtcaaacaattagtttatagatagtcataatctttctttcttccggatggtttatccttgtatgctgaacaaaagaaaaaatgtgaagactgaaaggtgtgatttttcaattctcctcccagttaccgaatcaccctcttatttttttttccctaagcctccgttcactgtctctccctctccctttctcttcatgtgcactcacagagacccagcattgcattaccatcgtggaataatctagcgcaaacctaggaaagctgaagccacaaagtccaaagccacctttgtactcacctgcagagctccagaagaccttgatggcagcctgcctatgctgtgtgtttgctatattcaatctttacggcttcctgacttctgtgacagtaagccaagtgcaaaaatacacttgatgagaatttcctcttttaataatgttatttgaacaccacatattttagatttatcttatttgaaagtattagttccattgtgcctggaaaccacactcctttagattgggggccgagaggcgacaacccaacattgaggagagtttatttttaaacatggctagttgtcagtatgtacgtgagctagtatttttatgagtcgagttttttaaaggcacattctgtatactgcttagtatatgcattttataccatgtaattataaaacactcgagtaagttcagcattagaaatgtttagctttgtatgaactgagtgtgccagaaataaacctggagcaatttttaaataagcaaaataaaggagatttttctatttgttcactttaatttattcacttttgtgtacttttatgtactgcaaatcagatttcagtctaaagcgaaacatcagtaagttaataataaacctatcttttgggaagttgaatattaatctgtacccaaaacgtatttagtaaaatatttgcccccgccaccctgccatgctgacataacaacttttataatgttgaatagatgatatgggaaatactaataacaacaatgtaatttttgcagacagctttaacttatatacattgcttgatttttttcaaaagactaaatatgtcatttatactttgtttattttctaccaaagaaggtttgtaaaaatatgcctgctgcttttccttttgaaggacacaaacctggtcccaacatgtgtggattttaactctgagtggggtgcattaaatcaaaagagagaggcagaagatgaaatgctaaagaagggtcaggcaaacttctgtttcagtataaaattcatcatgcaggcttctgagtgaaatagaatgatttgaaaccactactgtattgcctggatacacacacacacacacacacacactttatacaaaaatgttaaaagcaggtttcctggcatgttctaaactgttttttctttaggaataaattacatttatctgcacagatgttgaaaatcctgttaaacccttgtcaaggatttgtttattttacattaaacaaatttattatgatgaacgtgaaca

SEQ ID NO: 118367 - DNA, 772 bp, Homo sapiens
  Payload ID: 3160
  Gene Symbol: C15orf41
  Gene Name: chromosome 15 open reading frame 41
  ENST ID: ENST00000563167
  CDS Start-End: 160-360
tcattccctggtatttcgagaatatgggagagaaccagtgtgccacacttaccaggtctttatcacctctgtgctgagtccagcaaggagaagcgttgatgcctttattcaacaaattcctatgaggactggagtagataaataagtttgaccccgaacatgatttgggccaggcttagtcatctattggtatggatttatccaggagctggactgcaaccgggaaaggggcatcctgctcaaagcctgtttccccacgaacattgtcaccttatgccacagcatagcttgaccctgaagatcctggaagagaagctgggaggaaaagagacccagcattgcattaccatcgtggaataatctagcgcaaacctaggaaagctgaagccacaaagtccaaagccacctttgtactcacctgcagagctccagaagaccttgatggcagcctgcctatgctgtgtgtttgctatattcaatctttacggcttcctgacttctgtgacagtaagccaagtgcaaaaatacacttgatgagaatttcctcttttaataatgttatttgaacaccacatattttagatttatcttatttgaaagtattagttccattgtgcctggaaaccacactcctttagattgggggccgagaggcgacaacccaacattgaggagagtttatttttaaacatggctagttgtcagtatgtacgtgagctagtatttttatgagtcgagttttttaaaggcacattctgtatactgcttagta

SEQ ID NO: 118368 - DNA, 1325 bp, Homo sapiens
  Payload ID: 3160
  Gene Symbol: C15orf41
  Gene Name: chromosome 15 open reading frame 41
  ENST ID: ENST00000569302
  CDS Start-End: 14-877
tccctggcccaacatgatactgaccaaagctcagtacgacgagatagcccagtgcctagtgtctgtgccgcctaccaggcagagcctgaggaagctgaagcagaggtttcccagtcaatcgcaggccactctgctgagcatcttctcccaggagtaccagaaacacattaaaagaacacatgccaaacatcatacttcggaagcaattgaaagttattaccagaggtacctgaatggagtggtgaaaaatggagctgccccagtgctcctggacctggccaatgaggtggactatgcgccctcattaatggctcggcttatactggagaggtttctacaggaacacgaggaaactccaccctccaagtctattataaatagtatgctacgggacccttctcagattccagatggagttctagcaaatcaggtctatcagtgcattgtgaacgactgctgttacggaccactagtggactgcatcaagcatgccattggtcatgagcatgaggtcctgctgagagacttgcttctagagaaaaacctgtccttcctagatgaagatcagcttcgtgcaaagggttatgacaaaacaccagacttcattttacaagtaccagttgtaatgctttgtcccttagctgtagaagggcacataattcactggattgaaagcaaagcctcatttggtgatgaatgtagccaccacgcctacctgcatgaccagttctggagctactggaatagatttgggccaggcttagtcatctattggtatggatttatccaggagctggactgcaaccgggaaaggggcatcctgctcaaagcctgtttccccacgaacattgtcaccttatgccacagcatagcttgaccctgaagatcctggaagagaagctgggaggaaaaggtgaatccggaagcaattttactttcctgcactgtaagatcctggcaacatctgccctgaacttcagctgaactcttgctgcccgtagtcacaccactacctctttagacaaacatatcaagagtttctgttttccttcatcccttgctgatgtgaacagccaagaactacagacacaacccactcattatcagcatttctgtctctgtcaaacaattagtttatagatagtcataatctttctttcttccggatggtttatccttgtatgctgaacaaaagaaaaaatgtgaagactgaaaggtgtgatttttcaattctcctcccagttaccgaatcaccctcttatttttttttccctaagcctccgttcactgtctctccctctccctttctcttcatgtgcactcac

SEQ ID NO: 118369 - DNA, 2618 bp, Homo sapiens
  Payload ID: 3160
  Gene Symbol: C15orf41
  Gene Name: chromosome 15 open reading frame 41
  Uniprot ID: Q9Y2V0
  ENST ID: ENST00000567389
  CDS Start-End: 274-825
aagctcagctttctgtttagttgtgagattgcatactcaagaagaggaggaacataaaatacgtgatgtcttctcttaagtcaatcgcaggccactctgctgagcatcttctcccaggagtaccagaaacacattaaaagaacacatgccaaacatcatacttcggaagcaattgaaagttattaccagaggtacctgaatggagtggtgaaaaatggagctgccccagtgctcctggacctggccaatgaggtggactatgcgccctcattaatggctcggcttatactggagaggtttctacaggaacacgaggaaactccaccctccaagtctattataaatagtatgctacgggacccttctcagattccagatggagttctagcaaatcaggtctatcagtgcattgtgaacgactgctgttacggaccactagtggactgcatcaagcatgccattggtcatgagcatgaggtcctgctgagagacttgcttctagagaaaaacctgtccttcctagatgaagatcagcttcgtgcaaagggttatgacaaaacaccagacttcattttacaagtaccagttgctgtagaagggcacataattcactggattgaaagcaaagcctcatttggtgatgaatgtagccaccacgcctacctgcatgaccagttctggagctactggaatagatttgggccaggcttagtcatctattggtatggatttatccaggagctggactgcaaccgggaaaggggcatcctgctcaaagcctgtttccccacgaacattgtcaccttatgccacagcatagcttgaccctgaagatcctggaagagaagctgggaggaaaaggtgaatccggaagcaattttactttcctgcactgtaagatcctggcaacatctgccctgaacttcagctgaactcttgctgcccgtagtcacaccactacctctttagacaaacatatcaagagtttctgttttccttcatcccttgctgatgtgaacagccaagaactacagacacaacccactcattatcagcatttctgtctctgtcaaacaattagtttatagatagtcataatctttctttcttccggatggtttatccttgtatgctgaacaaaagaaaaaatgtgaagactgaaaggtgtgatttttcaattctcctcccagttaccgaatcaccctcttatttttttttccctaagcctccgttcactgtctctccctctccctttctcttcatgtgcactcacagagacccagcattgcattaccatcgtggaataatctagcgcaaacctaggaaagctgaagccacaaagtccaaagccacctttgtactcacctgcagagctccagaagaccttgatggcagcctgcctatgctgtgtgtttgctatattcaatctttacggcttcctgacttctgtgacagtaagccaagtgcaaaaatacacttgatgagaatttcctcttttaataatgttatttgaacaccacatattttagatttatcttatttgaaagtattagttccattgtgcctggaaaccacactcctttagattgggggccgagaggcgacaacccaacattgaggagagtttatttttaaacatggctagttgtcagtatgtacgtgagctagtatttttatgagtcgagttttttaaaggcacattctgtatactgcttagtatatgcattttataccatgtaattataaaacactcgagtaagttcagcattagaaatgtttagctttgtatgaactgagtgtgccagaaataaacctggagcaatttttaaataagcaaaataaaggagatttttctatttgttcactttaatttattcacttttgtgtacttttatgtactgcaaatcagatttcagtctaaagcgaaacatcagtaagttaataataaacctatcttttgggaagttgaatattaatctgtacccaaaacgtatttagtaaaatatttgcccccgccaccctgccatgctgacataacaacttttataatgttgaatagatgatatgggaaatactaataacaacaatgtaatttttgcagacagctttaacttatatacattgcttgatttttttcaaaagactaaatatgtcatttatactttgtttattttctaccaaagaaggtttgtaaaaatatgcctgctgcttttccttttgaaggacacaaacctggtcccaacatgtgtggattttaactctgagtggggtgcattaaatcaaaagagagaggcagaagatgaaatgctaaagaagggtcaggcaaacttctgtttcagtataaaattcatcatgcaggcttctgagtgaaatagaatgatttgaaaccactactgtattgcctggatacacacacacacacacacacacactttatacaaaaatgttaaaagcaggtttcctggcatgttctaaactgttttttctttaggaataaattacatttatctgcacagatgttgaaaatcctgttaaacccttgtcaaggatttgtttattttacattaaacaaatttattatgatgaacgtgaacaaataaattaaaaaataaaaaagg

SEQ ID NO: 118370 - DNA, 524 bp, Homo sapiens
  Payload ID: 3160
  Gene Symbol: C15orf41
  Gene Name: chromosome 15 open reading frame 41
  ENST ID: ENST00000564586
  CDS Start-End: 220-524
agtccccgccgcggaggtgccggtggagcctgggaccgggcgagtctccgccccgcttttgcagctaggggtgtgtttcaggggggattggggcaagccaagcaggcgaggacccgggcctgtgccgctttgcctacccctcatccctcggcaccaaggctacttgagccccagggtgttttttccttgttcccgccacctcctggtccctggcccaacatgatactgaccaaagctcagtacgacgagatagcccagtgcctagtgtctgtgccgcctaccaggcagagcctgaggaagctgaagcagaggtttcccaggtacctgaatggagtggtgaaaaatggagctgccccagtgctcctggacctggccaatgaggtggactatgcgccctcattaatggctcggcttatactggagaggtttctacaggaacacgaggaaactccaccctccaagtctattataaatagtatgctacgggacccttctcagattccagatggagttctagcaaatca

SEQ ID NO: 118371 - DNA, 764 bp, Homo sapiens
  Payload ID: 3160
  Gene Symbol: C15orf41
  Gene Name: chromosome 15 open reading frame 41
  Uniprot ID: Q9Y2V0
  ENST ID: ENST00000562877
  CDS Start-End: 213-764
agctttctgtttagttgtgtcaatcgcaggccactctgctgagcatcttctcccaggagtaccagaaacacattaaaagaacacatgccaaacatcatacttcggaagcaattgaaagttattaccagaggtacctgaatggagtggtgaaaaatggagctgccccagtgctcctggacctggccaatgaggtggactatgcgccctcattaatggctcggcttatactggagaggtttctacaggaacacgaggaaactccaccctccaagtctattataaatagtatgctacgggacccttctcagattccagatggagttctagcaaatcaggtctatcagtgcattgtgaacgactgctgttacggaccactagtggactgcatcaagcatgccattggtcatgagcatgaggtcctgctgagagacttgcttctagagaaaaacctgtccttcctagatgaagatcagcttcgtgcaaagggttatgacaaaacaccagacttcattttacaagtaccagttgctgtagaagggcacataattcactggattgaaagcaaagcctcatttggtgatgaatgtagccaccacgcctacctgcatgaccagttctggagctactggaatagatttgggccaggcttagtcatctattggtatggatttatccaggagctggactgcaaccgggaaaggggcatcctgctcaaagcctgtttccccacgaacattgtcaccttatgccacagcatagcttga

SEQ ID NO: 118372 - DNA, 1281 bp, Homo sapiens
  Payload ID: 3161
  Gene Symbol: C15orf43
  Gene Name: chromosome 15 open reading frame 43
  Uniprot ID: Q8NHR7
  ENST ID: ENST00000340827
  CDS Start-End: 18-680
acaggcttggcgacgccatgtttcaagggcagcgcggttggttttgcggcagcgttagccaggatctgaggcaattctgggtggctgaagggggaacgatcagtgacccgcgagccgccgacttcttgttcagctgtgatgcctcgcacccagacacgctgagaatatatcagagccttgattacatagaagataatgctacagtttttcatgcctactatctctctgcggtagctaatgccaaaataaaaaactcggtggctttgggtcatttcattcttcctcctgcgtgcctgcaaaaagaaataagaagaaaaattggtagttttatttgggaacaagaccaacattttctgatagaaaagcatgatgaagtaacaccaaatgaaataaagacccttagggaaaacagtgaactagcaacagagcacaaaaaagaattatccaaaagcccagaaaagcattttataagaactccagttgtagaaaagcagatgtacttccctctacagaattacccagttaacaacatggtaacaggttatatatcaattgatgccatgaagaaattccttggggagctacatgacttcattcctggaacctcaggatatttggcatatcatgttcaaaatgaaattaatatgtctgctataaaaaacaaattgaagaggaaatagtaaattaaattgtaaataccttggcatttattttctataaaatattatacagatgtgcatatcataaaatgctcccttttggtactgggggatagtgaaatgggaaataatttttctgtttctcaaagtatatctttaggaaatacagaatcattttggttctgtgttttgacatttttcccctagcttttaacaacatgttcaaatattctcaatgcacagttgttaatgagtaattgccgttaaaatatatttcataagaagtctcaatctcaaactctccatctctcaatcctcctcctcctcctctttcttgctttctcttttccctctctctttctctcctccccttctctctttctgtctttcaaatgttcttttggctttaacattctattaattatattttttctagattgaatactgtgaatgctaagttttattaatctggtcatcttattttgattttaaaaattaggatgctagttgcattctgaattactgtttctggtttgaaacatggagaaaaacattttaataattcatatttcatgttggatggtttctaataataaatatctcaaaagtgacttaacataaa

SEQ ID NO: 118373 - DNA, 775 bp, Homo sapiens
  Payload ID: 3161
  Gene Symbol: C15orf43
  Gene Name: chromosome 15 open reading frame 43
  ENST ID: ENST00000557864
  CDS Start-End: 1-131
gcggttggttttgcggcagcgttagccaggatctgaggcaattctggggtaggaagctgagtggaagcagcgggttaggtggtgaggggagcatcctcctctctctgatgctttgggtccagggtgcttgataggttcaccctgtgctcttacctccacagtggctgaagggggaacgatcagtgacccgcgagccgccgacttcttgttcagctgtgatgcctcgcacccagacacgctgagaatatatcagagccttgattacatagaagataatgctacagtttttcatgcctactatctctctgcggtagctaatgccaaaataaaaaactcggtggctttgggtcatttcattcttcctcctgcgtgcctgcaaaaagcatgatgaagtaacaccaaatgaaataaagacccttagggaaaacagtgaactagcaacagagcacaaaaaagaattatccaaaagcccagaaaagcattttataagaactccagttgtagaaaagcagatgtacttccctctacagaattacccagttaacaacatggtaacagagatgaggtctcactgtgttgcccaggctggtctcgaactcctgggctcaagcaatcctcctgccttggcctcccaaagtgctgggattccaggttatatatcaattgatgccatgaagaaattccttggggagctacatgacttcattcctggaacctcaggatatttggcatatcatgttcaaaatgaaattaatatgtctgctataaaaaacaa

SEQ ID NO: 118374 - DNA, 796 bp, Homo sapiens
  Payload ID: 3161
  Gene Symbol: C15orf43
  Gene Name: chromosome 15 open reading frame 43
  ENST ID: ENST00000559137
  CDS Start-End: 10-156
ggcgacgccatgtttcaagggcagcgcggttggttttgcggcagcgttagccaggatctgaggcaattctggggtaggaagctgagtggaagcagcgggttaggtggtgaggggagcatcctcctctctctgatgctttgggtccagggtgcttgataggttcaccctgtgctcttacctccacagtggctgaagggggaacgatcagtgacccgcgagccgccgacttcttgttcagctgtgatgcctcgcacccagacacgctgagaatatatcagagccttgattacatagaagataatgctacagtttttcatgcctactatctctctgcggtagctaatgccaaaataaaaaactcggtggctttgggtcatttcattcttcctcctgcgtgcctgcaaaaagaaataagaagaaaaattggtagttttatttgggaacaagaccaacattttctgatagaaaagcatgatgaagtaacaccaaatgaaataaagacccttagggaaaacagtgaactagcaacagagcacaaaaaagaattatccaaaagcccagaaaagcattttataagaactccagttgtagaaaagcagatgtacttccctctacagaattacccagttaacaacatggtaacaggttatatatcaattgatgccatgaagaaattccttggggagctacatgacttcattcctggaacctcaggatatttggcatatcatgttcaaaatgaaattaatatgtctgctataaaaaacaaattgaagaggaaatagtaaattaaatt

SEQ ID NO: 118375 - DNA, 875 bp, Homo sapiens
  Payload ID: 3162
  Gene Symbol: C15orf48
  Gene Name: chromosome 15 open reading frame 48
  Uniprot ID: Q9C002
  ENST ID: ENST00000344300
  CDS Start-End: 191-442
gttcggttccgggcgttaccatcgtccgtgcgcaccgcccggcgtccaggtgagtctcccatctgcagagacgcggacgcgccggcccgcagttggcctgcggagcgcggtggacggtttggcgcccaccaggcgatcaatactttggatttttaatttctagatttggcaattcttcgctgaagtcatcatgagctttttccaactcctgatgaaaaggaaggaactcattcccttggtggtgttcatgactgtggcggcgggtggagcctcatctttcgctgtgtattctctttggaaaaccgatgtgatccttgatcgaaaaaaaaatccagaaccttgggaaactgtggaccctactgtacctcaaaagcttataacaatcaaccaacaatggaaacccattgaagagttgcaaaatgtccaaagggtgaccaaatgacgagccctcgcctctttcttctgaagagtactctataaatctagtggaaacatttctgcacaaactagattctggacaccagtgtgcggaaatgcttctgctacatttttagggtttgtctacattttttgggctctggataaggaattaaaggagtgcagcaataactgcactgtctaaaagtttgtgcttattttcttgtaaatttgaatattgcatattgaaatttttgtttatgatctatgaatgtttttcttaaaatttacaaagctttgtaaattagattttctttaataaaatgccatttgtgcaagatttctcaaagattaggtatatatttaaatggaagagaaaatatttttatgggagaaaaatacatttgaaccatgaaatttcatcttttaaataacatccagtacagatttctgtgtaa

SEQ ID NO: 118376 - DNA, 732 bp, Homo sapiens
  Payload ID: 3162
  Gene Symbol: C15orf48
  Gene Name: chromosome 15 open reading frame 48
  Uniprot ID: Q9C002
  ENST ID: ENST00000396650
  CDS Start-End: 155-406
gcgtgaccagagcgcgctggcccggcccacccggggcggttgtggtcgctatatataaggtggggaggccgccggcccgttcggttccgggcgttaccatcgtccgtgcgcaccgcccggcgtccagatttggcaattcttcgctgaagtcatcatgagctttttccaactcctgatgaaaaggaaggaactcattcccttggtggtgttcatgactgtggcggcgggtggagcctcatctttcgctgtgtattctctttggaaaaccgatgtgatccttgatcgaaaaaaaaatccagaaccttgggaaactgtggaccctactgtacctcaaaagcttataacaatcaaccaacaatggaaacccattgaagagttgcaaaatgtccaaagggtgaccaaatgacgagccctcgcctctttcttctgaagagtactctataaatctagtggaaacatttctgcacaaactagattctggacaccagtgtgcggaaatgcttctgctacatttttagggtttgtctacattttttgggctctggataaggaattaaaggagtgcagcaataactgcactgtctaaaagtttgtgcttattttcttgtaaatttgaatattgcatattgaaatttttgtttatgatctatgaatgtttttcttaaaatttacaaagctttgtaaattagattttctttaataaaatgccatttgtgcaagatttctcaaaga

SEQ ID NO: 118377 - DNA, 500 bp, Homo sapiens
  Payload ID: 3162
  Gene Symbol: C15orf48
  Gene Name: chromosome 15 open reading frame 48
  ENST ID: ENST00000558435
  CDS Start-End: 105-500
atatataaggtggggaggccgccggcccgttcggttccgggcgttaccatcgtccgtgcgcaccgcccggcgtccagatttggcaattcttcgctgaagtcatcatgagctttttccaactcctgatgaaaaggaaggaactcattcccttggtggtgttcatgactgtggcggcgggtggagcctcatctttcgctgtgtattctctttggaaaaccgatgtgatccttgatcgaaaaaaaaatccagaaccttgggaaactgtggaccctactgtacctcaaaaggtctcggctcctgcatactgcaagctgggtgccttccttctacagaacccatgcccccttgcaaggaaaccatggaatttccccaggagtcttcgacaactccaggccacaggaaggtcacaaatggtcagaaaaggaatgaatttgaaggaggaagaaccagccctgcccacgttgtctggggcccctcccaaggggacaggaaagctccac

SEQ ID NO: 118378 - DNA, 4717 bp, Homo sapiens
  Payload ID: 3163
  Gene Symbol: C15orf52
  Gene Name: chromosome 15 open reading frame 52
  Uniprot ID: Q6ZUT6
  ENST ID: ENST00000397536
  CDS Start-End: 37-1011
ggtgctacggagatcctccccattttacacgaggaaatgagacacagagagggttcttgggagccctggagccggccggtgggggagcccccggaggcgggctgggactatgcccagtggaagcaggagcgggagcagatcgacctagcccgcctcgcccggcacagagacgcacagggtgactggcgccgcccgtgggacctggacaaggccaagtccacgctacaggactgcagccagctgaggggagaaggcccggccagggcaggcagcagaaggggtcccaggagccaccagaaactacagcccccaccattgctccctgatggaaaaggtcggggcgggcaagccagcagaccctcggtggcaccagccacaggcagcaaagcccggggcaaggagaggctgactggcagggcccgaaggtgggatatgaaggaagacaaggaggagctggaaggtcaggagggaagccaaagcaccagagagactcccagtgaggaggagcaagcccagaagcagagcgggatggagcagggccgactggggagcgcccctgcagccagcccagccctggcatccccagaggggccgaagggggagtcagtggcttccacagccagctcagtcccctgctctccacaggagcctgacttggctcctcttgacctctccctaggaggggctggcatccctgggcccagggagagcgggtgtgtgctcggtctgaggcctggggcccaggagagccctgtgtcttggccagagggctctaagcagcagcccctggggtggagcaatcaccaggctgagctggaagtacagacttgccctgagccacagagaggagcagggctcccagagcccggagaagacaggtctggcaagtctggggcccagcagggcctggccccgagaagccggcccacgagaggaggcagccaaaggtcgagaggcacagcaggtgtgaggcgcaggacagggcgccctggcccggcaggaagatgctgaacacagctcctgggagctggggagtccccggggagaggaaaagggaatcactctgttaaaggccctccgcgtgatggccatgtggttgccggtggcttgcgccattgtcactgagcagtgtggcaaactctccagcatggcgaccttgtgagggcaaggagtggcctccctgcacctcacacgctcatctctgtgcacatgtgtgttttcacgcacgggcacagcccctggtgtattcctgtactagtatctggcatctgaggctggtgcaccctgacctgggcctactgctgcccaggccacaagccttctccactatgatgagagaacaaggcttggtggcacccagcacctggctctcctggctccccgtcacccccccagggcctggcctccctctccagctgcaggctttcacctcttgcctgggctggattcccccagtcccagattcccaggatgcccaaccaggggaatcccagtaaccatgcgccagcctcctgcctctcctgagtggtggctgaggcctggaggaggagaggccacacagctggcagggtctggcctgggcaaagaagagtagagctcacgtcttcttggtgaaaaggaggatctctggaaagtcctcctctctgaaatgggttgggatggggagcgacaacctcctcttcccacagcaggatgggagagcttactcccaggcccccacacccaggtcagacatcacgtgcaccctgaatgtaggcaagggcctggccctgcagcccagggtcatttcctgctctttccacttcctctttccccaccgtcctgcactagcaccagggccaggccaaggcaagaatcagacagctactccacagacagagaaacaacttccagctaagtatgacatcaggacttgtctttcctactaagcctccatccccgcccctcccctgaggcccacgtctgctgaattatccggactccgcacaagctgtggcttcctctcagttcaacaaacatttcctgagcacccactaccagtaatccagccggtaggcgacggagactgccagcaggagggagggaagaaagccagtcatccggcagatctgggctgttctgggcgggagctgttctgggccacaggtgccctacagggctgggggcaggatggcggtaggagccccaggggaccctcccacctctgcctggcagaagcaagtgcccttctttcttgttatgtgtgccttctgctcctgagccctagtgtggacctcaccgcatggtcccctctgccccctccttctggtcctgccatggctgctgctctctgctgaaggctgtggggctctagggagagtccagatcaccctgggatttctccactgcccaatgtgaagcctaaactgtggggtcccagctcagccttcctcactggctctcaactccaccccacccctctattcaggaaggtgaggggcatctctttagcagaccagactgttttgagaagtgtctctcatactttaactgaagagtcatgcagattctaatggtctggggagggcctgagagttcgtcttttttttttttttttttttttagttagggtcctgctgttatcacctaggctggagtgcagtggcacaatcatggctcactgcagcctcgaaccctccaggctcaggcgatcctctcacatcaacctcttgagtagccgggactacaggtgtgccaccacacctggctaatttttgtattttttgtagaggcagggtttcaccatgttgcccaggctggtctccaactcctgggctcaagcaatctgctcgccttggcctcctaaactgctgggattacaggcatgagccaccacacctggccgagaattcgtatttctaagaggcttcaggtgaagcccatgctggttcctggaccatggttttgagtagttaagggtttggactagaatatatgaagggctgggggtgaagacagactctagactctaaaggttggtggctggctatgtaggggatgggggagtgctacccctgtcaggtggtgggggcttcctggctgcagagttgggtgggagacttggggaagatgctttggaaggcagtgagtgggtggtgtcaacttctagtagtgcagtgggagagctggtcagggatgggatggagtgaagggggcagaggcatttggtgtggggttgatcagaggaattttggaaaggcttggaaacattcctatgtatgtgagacacacctatgccagggcaaagactccaagctcaagtttttctcttgccttctagtcacaagaacatggctttggagtgtgacactggcctaggaatccatgactcccaaaggacggggctaggggtagaggaggttcaggcaaagcccttagattttggagacatcaggcagatgtctccaaaaatgattgtgatcaagaatctgaattataagattcacagtctgctccccaacccagtgctgccaactgtacagctgcgcctccacgaaggggcatatgccaggctcgtctgaccctggaatgaggatgtaggaagcaggcagagctcgggttcagccctcacaatgggactgaagcaggagagaaggctgggcagaagggctgtggggaagtagggcttgtctccatggatgacgtccagaaggatgtcaggaggaggaatatcacaggagttatagacattggagggaacagagactggcacaggacctcttcattgcaggaagatggtagtgtaggcaggtaacattgagctcttttcaaaaaaggagagctcttcttcaagataaggaagtggtagttatggtggtaacccccggctatcagtccggatggttgccacccctcctgctgtaggatggaagcagccatggagtgggagggaggcgcaataagacacccctccacagagcttggcatcatgggaagctggttctacctcttcctggctcctttgtttaaaggcctggctgggagccttccttttgggtgtctttctcttctccaaccaacagaaaagactgctcttcaaaggtggagggtcttcatgaaacacagctgccaggagcccaggcacagggctgggggcctggaaaaaggagggcacacaggaggagggaggagctggtagggagatgctggctttacctaaggtctcgaaacaaggagggcagaataggcagaggcctctccgtcccaggcccatttttgacagatggcgggacggaaatgcaatagaccagcctgcaagaaagacatgtgttttgatgacaggcagtgtggccgggtggaacaagcacaggccttggaatccaatggactgaatcagaaccctaggcctgccatctgtcagccgggtgacctgggtcaattttagcctctaaaagcctcagtctccttatctgcaaaatgaggcttgtgatacctgttttgaagggttgctgagaaaattaaagataagggtatccaaaatagtctacggccataccaccctgaacgtgcctaatctcgtaagctaagcagggtcaggcctggttagtacctggatggggagagtatggaaaacatacctgcccgcagttggagttggactctgtcttaacagtagcgtggcacacagaaggcactcagtaaatacttgttgaataaatgaagtagcgatttggtgtga

SEQ ID NO: 118379 - DNA, 541 bp, Homo sapiens
  Payload ID: 3163
  Gene Symbol: C15orf52
  Gene Name: chromosome 15 open reading frame 52
  ENST ID: ENST00000558858
  CDS Start-End: 438-541
aaaccatttccacgggagagctggaacaggcctaatttttagctggagatgtggaaaccttgagagaggaagcgcctggagtctccaaaccccaccccaagcctcttcctgcttctccccctcactctgagtgtcttctccctacagggttcttgggagccctggagccggccggtgggggagcccccggaggcgggctgggactatgcccagtggaagcaggagcgggagcagatcgacctagcccgcctcgcccggcacagagacgcacagggtgactggcgccgcccgtgggacctggacaaggccaagtccacgctacaggactgcagccagctgaggggagaaggcccggccagggcaggcagcagaaggggtcccaggagccaccagaaactacagcccccaccattgctccctgatggaaaaggtgggatatgaaggaagacaaggaggagctggaaggtcaggagggaagccaaagcaccagagagactcccagtgaggaggagcaagcccagaagcagagcgggatggagca

SEQ ID NO: 118380 - DNA, 572 bp, Homo sapiens
  Payload ID: 3163
  Gene Symbol: C15orf52
  Gene Name: chromosome 15 open reading frame 52
  ENST ID: ENST00000560922
  CDS Start-End: 52-572
aggagcttgggttccctgcctctgcagggaactcccagagccgagtcccccatgagcaggcaggagaaggacgcagagctggatcggaggatagttgccctgcgcaagaagaaccaggccttgctccgcaggtaccaggagatccaggaggaccgtcggcaggcagagcagggggggatggctgtgaccacaccagcactcctccagcctgatggcctcaccgttaccatcagccaggttcccggtgaaaagcgggtggttagcaggaactgggcaaggggtacctgtggacccagagtgaccaacgagatgcttgaggatgaggatgctgaggaccacgggggtactttctgcttaggggagctggtggagctggctgtgaccatggagaacaaagcagagggcaaacggattgtaagtgaaaagcctaccagagcaaggaaccaaggcatagaggggtcacctggagggcgtgtgacccgaagcccccccacgcaggtggccatcagctcagattctgcacggaagggttcttgggagccctggagccggccggtgggggagcccccgga

SEQ ID NO: 118381 - DNA, 3022 bp, Homo sapiens
  Payload ID: 3163
  Gene Symbol: C15orf52
  Gene Name: chromosome 15 open reading frame 52
  Uniprot ID: Q6ZUT6
  ENST ID: ENST00000559313
  CDS Start-End: 17-1621
cttttgtaatcacaacatgatctcgtgtgctgagcagcgaagccggcagggagaggccggcagaggcccggctccggtggctccagctttcctcccactctggctccccaggggctgctctggaattctctcggtgcccgccgttgccatgcactcggctggaactcccagagccgagtcccccatgagcaggcaggagaaggacgcagagctggatcggaggatagttgccctgcgcaagaagaaccaggccttgctccgcaggtaccaggagatccaggaggaccgtcggcaggcagagcagggggggatggctgtgaccacaccagcactcctccagcctgatggcctcaccgttaccatcagccaggttcccggtgaaaagcgggtggttagcaggaactgggcaaggggtacctgtggacccagagtgaccaacgagatgcttgaggatgaggatgctgaggaccacgggggtactttctgcttaggggagctggtggagctggctgtgaccatggagaacaaagcagagggcaaacggattgtaagtgaaaagcctaccagagcaaggaaccaaggcatagaggggtcacctggagggcgtgtgacccgaagcccccccacgcaggtggccatcagctcagattctgcacggaagggttcttgggagccctggagccggccggtgggggagcccccggaggcgggctgggactatgcccagtggaagcaggagcgggagcagatcgacctagcccgcctcgcccggcacagagacgcacagggtgactggcgccgcccgtgggacctggacaaggccaagtccacgctacaggactgcagccagctgaggggagaaggcccggccagggcaggcagcagaaggggtcccaggagccaccagaaactacagcccccaccattgctccctgatggaaaaggtcggggcgggcaagccagcagaccctcggtggcaccagccacaggcagcaaagcccggggcaaggagaggctgactggcagggcccgaaggtgggatatgaaggaagacaaggaggagctggaaggtcaggagggaagccaaagcaccagagagactcccagtgaggaggagcaagcccagaagcagagcgggatggagcagggccgactggggagcgcccctgcagccagcccagccctggcatccccagaggggccgaagggggagtcagtggcttccacagccagctcagtcccctgctctccacaggagcctgacttggctcctcttgacctctccctaggaggggctggcatccctgggcccagggagagcgggtgtgtgctcggtctgaggcctggggcccaggagagccctgtgtcttggccagagggctctaagcagcagcccctggggtggagcaatcaccaggctgagctggaagtacagacttgccctgagccacagagaggagcagggctcccagagcccggagaagacaggtctggcaagtctggggcccagcagggcctggccccgagaagccggcccacgagaggaggcagccaaaggtcgagaggcacagcaggtgtgaggcgcaggacagggcgccctggcccggcaggaagatgctgaacacagctcctgggagctggggagtccccggggagaggaaaagggaatcactctgttaaaggccctccgcgtgatggccatgtggttgccggtggcttgcgccattgtcactgagcagtgtggcaaactctccagcatggcgaccttgtgagggcaaggagtggcctccctgcacctcacacgctcatctctgtgcacatgtgtgttttcacgcacgggcacagcccctggtgtattcctgtactagtatctggcatctgaggctggtgcaccctgacctgggcctactgctgcccaggccacaagccttctccactatgatgagagaacaaggcttggtggcacccagcacctggctctcctggctccccgtcacccccccagggcctggcctccctctccagctgcaggctttcacctcttgcctgggctggattcccccagtcccagattcccaggatgcccaaccaggggaatcccagtaaccatgcgccagcctcctgcctctcctgagtggtggctgaggcctggaggaggagaggccacacagctggcagggtctggcctgggcaaagaagagtagagctcacgtcttcttggtgaaaaggaggatctctggaaagtcctcctctctgaaatgggttgggatggggagcgacaacctcctcttcccacagcaggatgggagagcttactcccaggcccccacacccaggtcagacatcacgtgcaccctgaatgtaggcaagggcctggccctgcagcccagggtcatttcctgctctttccacttcctctttccccaccgtcctgcactagcaccagggccaggccaaggcaagaatcagacagctactccacagacagagaaacaacttccagctaagtatgacatcaggacttgtctttcctactaagcctccatccccgcccctcccctgaggcccacgtctgctgaattatccggactccgcacaagctgtggcttcctctcagttcaacaaacatttcctgagcacccactaccagtaatccagccggtaggcgacggagactgccagcaggagggagggaagaaagccagtcatccggcagatctgggctgttctgggcgggagctgttctgggccacaggtgccctacagggctgggggcaggatggcggtaggagccccaggggaccctcccacctctgcctggcagaagcaagtgcccttctttcttgttatgtgtgccttctgctcctgagccctagtgtggacctcaccgcatggtcccctctgccccctccttctggtcctgccatggctgctgctctctgctgaaggctgtggggctctagggagagtccagatcaccctgggatttctccactgcccaatgtgaagcctaaactgtggg

SEQ ID NO: 118382 - DNA, 2043 bp, Homo sapiens
  Payload ID: 3164
  Gene Symbol: C15orf53
  Gene Name: chromosome 15 open reading frame 53
  Uniprot ID: Q8NAA6
  ENST ID: ENST00000318792
  CDS Start-End: 11-550
ctgttctgatatggagctacaaggggcccaagaggacctgggcatttccctctctagtccccggaggaaccatgaaaccaggccaggaagcaaggctaagggcaggagcagcatctgtctccaggcgtctgtttggatggctggaggaaagctgaggctcagagcaagtgaacatctaacccagggccaccaacaagagctcagggattggaatctgggagaagatgcttcccttctcttctccaagagtccttttggggctggcaagttgatacaagctccagctcatgtcttcagacaatgctgggtccaaggaaatgcatggatctcctgcattacaaagtttgactccaagagaagcccagaagtggcttccagcccctcctacctaactgtgccccgccgttcaccacttcctgtcttcctgcgacccagtgacagatgtgtctgtgggggctgctacttgggaaagtccaccaggaggagagcatgccaatctctcctctcagatcctctgggggttactttccccacccaaactaggccttgatgtcaaggcctagttacagggatgtcaaactaggaggttgatgtcggtgtggtgtgtaagatgttggggagaagctgcaggtgccttcttaccagctcttcctgaaaacttgtctctccctctccttgttagtctgttttataactcacactccagccggggggaagtaaaggagcttatcccgttcacagatcctgtaacccatggtggttattacctcatagctggtgcagtgttctttgagcctagcagtttggtttagactcaagtgtctattctttgcagtctttctggggttggtagcagagaaagagaagagaacaggtaattcgatcactcaggttattcgtgtgtaaaagttgaagccctaccacaaacgtatgagtggatgttatagtgtaataacctggacattgccaagacagcttcctcagggcttttgtttcctcaagcctacctgaaggctctcttctcagtcacgggggatggaattgtttcatccctggcttgctctgggcctcagtttccctattccaggatagtttccctattccctattctgcatcataaaaaaaaaaatacactcctgatagaagtcggttgatgcttttggcctgcagcctccttaaggttaatagtccacataatttcctcaggggccctggctggcctgttgtgggtgtacccatgaagtatcttgatttgctatgataggagccaccttggcttcctgtggagataagccctgcccctcgttcccactttaagcttgaaaagtcccttatccaactttggaatgggaactagaaagactaagcagtgtctctcaggggttccttctggggtcactcagaagaggagaaccaagcagtcttggcggagagacacctgaagttggtcactcggcacattaccaggggctcagcaatgaccagcctgcaaccatcctgcctttccccaggggtctgggctccagccatggagggtggactggagactcctttgcctttcaacactgtctggcctgtctcgggtccggcacgtcttttctctactgattttgtggctgtggttaacttagctaacctttcagtgaaataatgtctagtggcattcctttacattttccatgtgctgttttttccataactccattttcttcagggctgagtttgggtcttcatttttccacccacaggcctagttaagcttggtcttgtgctccaacttacctgccccagacttcttggatggacattgtcaatctggtcatattgagagtgaaactgccacctagtggtcactggaggtgtgcctgccttttcatgagctctcttgctgctggttaccggaaacatcagttgatggttttcttctaagctaactcagaagctgtgatgtgaatcagaccaaacaatttatctgcttcaaatccatattgtaaagaggtttaatataaagacatattttcaaatcaaaataaataatgaagc

SEQ ID NO: 118383 - DNA, 1704 bp, Homo sapiens
  Payload ID: 3165
  Gene Symbol: C15orf57
  Gene Name: chromosome 15 open reading frame 57
  Uniprot ID: Q9BV29
  ENST ID: ENST00000358005
  CDS Start-End: 275-832
gggactccgcccctcccgatttcctccgggctacaggcgacagagctgagccaagcgtttactgggcagctgttacggtaagtgaggaggggctggggtgcccagcgttttggatctcccactctggcccggccccggaataccacatagaggccttgggacctgattcatcccgtccagacagccctagagacctgagcgactgaggcctgggatctggacgccggaatttcctgcgtggttctggacgccctgccctgggctcagattccaaatgaaaatgtttgagagcgctgactctacagccacaagatctggccaggatctctgggctgaaatttgttcctgtctgccaaatcctgaacaagaagatggtgccaacaatgcattctcagactcctttgtggattcttgccctgaaggtgaaggccagagggaggtggctgactttgctgtccagccagctgtaaagccttgggctcccttgcaggattcagaagtgtatttagcatctctagagaagaagctaagaagaatcaaaggtttaaatcaggaagtgacttccaaggacatgcttcgaactctggcccaagccaagaaggaatgctgggatcggttcctccaggagaagttagcttcagagttctttgtggatggacttgattctgatgagagcaccttggaacatttcaagaggtggctccagccagataaagtagccgtcagcacagaggaggtccagtatctgattcctccagagtcacaggttgagaagccagtggccgaggacgagccagcagccggggacaagccagcagcagcagaacagtaaattacacacacacacacacacacacacacacacacacacacacacacacacacacacacacacacgccgagcagctgtctcgggtccagagcgagcagcgtggagctcagtgacagcagcagggagaaatccactgaaggaaaaaacccaaatttccactccacaaagaaaacagctgcaagcccccagggacttacctggggctggcatgtgtgactgtctcggatgaagtgactgacccagtgcacactggatcaaaatgctgctttcctctgtgtctcacagcttggctgagctctgtctctgcaggttagaagtctgctaaagatcaaatgtgaaagtacttggagaaactgaggcctcttatgtgtaatgtgtaagttaagtgagccatatattttcttgcctcttccggacattcatgcttgtgtcccaagcattcccttggtgaattgtcacgtgagtggggccagtaagagtgaagtctgctccttgaatccaagccccatctggggcttctctaacaaatctgtagtaagtatacggactccagggagagaggctgggcttctttctctcatttgttccttgtggaacaaatgggcaaaagaagtgtgaaaatgtgggtgtttatgtctgtgtatatgtattttttacttcatgcatggcttctcctccaacttcctcctgcacttaaaaagggccaggttccaaattagacttgtaaatatggtgttagtgtttgacactactcctggatagttccaaacatcttccttgtggcaggtttcctggctgagcccgagcttccctccctgtttattgtgttcatgatcagtatgtgtttccatataaaacttttctcaacggaa

SEQ ID NO: 118384 - DNA, 1519 bp, Homo sapiens
  Payload ID: 3165
  Gene Symbol: C15orf57
  Gene Name: chromosome 15 open reading frame 57
  Uniprot ID: Q9BV29
  ENST ID: ENST00000416810
  CDS Start-End: 95-652
actaggggactccgcccctcccgatttcctccgggctacaggcgacagagctgagccaagcgtttactgggcagctgttacgctcagattccaaatgaaaatgtttgagagcgctgactctacagccacaagatctggccaggatctctgggctgaaatttgttcctgtctgccaaatcctgaacaagaagatggtgccaacaatgcattctcagactcctttgtggattcttgccctgaaggtgaaggccagagggaggtggctgactttgctgtccagccagctgtaaagccttgggctcccttgcaggattcagaagtgtatttagcatctctagagaagaagctaagaagaatcaaaggtttaaatcaggaagtgacttccaaggacatgcttcgaactctggcccaagccaagaaggaatgctgggatcggttcctccaggagaagttagcttcagagttctttgtggatggacttgattctgatgagagcaccttggaacatttcaagaggtggctccagccagataaagtagccgtcagcacagaggaggtccagtatctgattcctccagagtcacaggttgagaagccagtggccgaggacgagccagcagccggggacaagccagcagcagcagaacagtaaattacacacacacacacacacacacacacacacacacacacacacacacacacacacacacacacgccgagcagctgtctcgggtccagagcgagcagcgtggagctcagtgacagcagcagggagaaatccactgaaggaaaaaacccaaatttccactccacaaagaaaacagctgcaagcccccagggacttacctggggctggcatgtgtgactgtctcggatgaagtgactgacccagtgcacactggatcaaaatgctgctttcctctgtgtctcacagcttggctgagctctgtctctgcaggttagaagtctgctaaagatcaaatgtgaaagtacttggagaaactgaggcctcttatgtgtaatgtgtaagttaagtgagccatatattttcttgcctcttccggacattcatgcttgtgtcccaagcattcccttggtgaattgtcacgtgagtggggccagtaagagtgaagtctgctccttgaatccaagccccatctggggcttctctaacaaatctgtagtaagtatacggactccagggagagaggctgggcttctttctctcatttgttccttgtggaacaaatgggcaaaagaagtgtgaaaatgtgggtgtttatgtctgtgtatatgtattttttacttcatgcatggcttctcctccaacttcctcctgcacttaaaaagggccaggttccaaattagacttgtaaatatggtgttagtgtttgacactactcctggatagttccaaacatcttccttgtggcaggtttcctggctgagcccgagcttccctccctgtttattgtgttcatgatcagtatgtgtttccatataaaacttttctcaa

SEQ ID NO: 118385 - DNA, 1075 bp, Homo sapiens
  Payload ID: 3165
  Gene Symbol: C15orf57
  Gene Name: chromosome 15 open reading frame 57
  Uniprot ID: Q9BV29
  ENST ID: ENST00000558871
  CDS Start-End: 80-484
ccctcccgatttcctccgggctacaggcgacagagctgagccaagcgtttactgggcagctgttacgctcagattccaaatgaaaatgtttgagagcgctgactctacagccacaagatctggccaggatctctgggctgaaatttgttcctgtctgccaaatcctgaacaagaagatggtgccaacaatgcattctcagactcctttgtggattcttgccctgaaggtgaaggccagagggaggtggctgactttgctgtccagccagctgtaaagccttgggctcccttgcaggattcagaagtgtatttagcatctctagagaagaagctaagaagaatcaaaggtttaaatcaggaagtgacttccaaggacatgcttcgaactctggcccaagccaagaaggaatgctgggatcggttcctccaggagaagttagcttcagagttctttgtggatggacttgattctgatgagaggtaatcgattccccgtctagttccagctgaaatcatcctttatgtagttgttctatttgtttttagcccagcagtagatttttaagaacagacttttttgccaaaaggcaaatactgcagctacgtgttggtcacagattgaatagagttaaggataaagcattgtgttcatttttaagtatgcaatgaacttgagaaagtagtaactaatcagtctctcatgttcttgaattctttctcatgaggtttggaaaccatgttactgtaacaaaaggaaaaaccatttactcctcagagagattattttctggaactatctcttcatctcttcttacctctgaatttccactgctttacagattttttttttttttttttgagatggaatctcgctctgttgcccaggctggagtgcagtggcacgatctcggctcactgcaatctctgcctcctgggttcaagcaattcttgtgcctcagcttcctgagtagccgggactacaggcgtgtgccacaacacccggctaatttttgtatttttagtagagatggagtttcaccatgttggccaggctggtctcaaacttctgacctca

SEQ ID NO: 118386 - DNA, 814 bp, Homo sapiens
  Payload ID: 3165
  Gene Symbol: C15orf57
  Gene Name: chromosome 15 open reading frame 57
  Uniprot ID: Q9BV29
  ENST ID: ENST00000558750
  CDS Start-End: 201-785
ttacggtaagtgaggaggggctggggtgcccagcgttttggatctcccactctggcccggccccggaataccacatagaggccttgggacctgattcatcccgtccagacagccctagagacctgagcgactgaggcctgggatctggacgccggaatttcctgcgtggttctggacgccctgccctggggtaaggggccatgcggggctctggtctcagattccaaatgaaaatgtttgagagcgctgactctacagccacaagatctggccaggatctctgggctgaaatttgttcctgtctgccaaatcctgaacaagaagatggtgccaacaatgcattctcagactcctttgtggattcttgccctgaaggtgaaggccagagggaggtggctgactttgctgtccagccagctgtaaagccttgggctcccttgcaggattcagaagtgtatttagcatctctagagaagaagctaagaagaatcaaaggtttaaatcaggaagtgacttccaaggacatgcttcgaactctggcccaagccaagaaggaatgctgggatcggttcctccaggagaagttagcttcagagttctttgtggatggacttgattctgatgagagcaccttggaacatttcaagaggtggctccagccagataaagtagccgtcagcacagaggaggtccagtatctgattcctccagagtcacaggttgagaagccagtggccgaggacgagccagcagccggggacaagccagcagcagcagaacagtaaattacacacacacacacacacacacacac

SEQ ID NO: 118387 - DNA, 576 bp, Homo sapiens
  Payload ID: 3165
  Gene Symbol: C15orf57
  Gene Name: chromosome 15 open reading frame 57
  ENST ID: ENST00000558113
  CDS Start-End: 49-570
agagctgagccaagcgtttactgggcagctgttacgctcagattccaaatgaaaatgtttgagagcgctgactctacagccacaagatctggccaggatctctgggctgaaatttgttcctgtctgccaaatcctgaacaagaagatggtgccaacaatgcattctcagactcctttgtggattcttgccctgaaggtgaaggccagagggaggtggctgactttgctgtccagccagctgtaaagccttgggctcccttgcaggattcagaagtgtatttagcatctctagagaagaagctaagaagaatcaaaggtttaaatcaggaagtgacttccaaggacatgcttcgaactctggcccaagccaagaaggaatgctgggatcggttcctccaggagaagttagcttcagagttctttgtggatggacttgattctgatgagaggccctgtaactccagaacccctggcagcagcagcttttctgaggatggagcgtgggacagccaccagtgtgctgagcagaggtggcgaaggacatttccagcccagcagtcgtcatggtaacagcca

SEQ ID NO: 118388 - DNA, 6131 bp, Homo sapiens
  Payload ID: 3165
  Gene Symbol: C15orf57
  Gene Name: chromosome 15 open reading frame 57
  Uniprot ID: Q9BV29
  ENST ID: ENST00000559291
  CDS Start-End: 27-584
gggcagctgttacgctcagattccaaatgaaaatgtttgagagcgctgactctacagccacaagatctggccaggatctctgggctgaaatttgttcctgtctgccaaatcctgaacaagaagatggtgccaacaatgcattctcagactcctttgtggattcttgccctgaaggtgaaggccagagggaggtggctgactttgctgtccagccagctgtaaagccttgggctcccttgcaggattcagaagtgtatttagcatctctagagaagaagctaagaagaatcaaaggtttaaatcaggaagtgacttccaaggacatgcttcgaactctggcccaagccaagaaggaatgctgggatcggttcctccaggagaagttagcttcagagttctttgtggatggacttgattctgatgagagcaccttggaacatttcaagaggtggctccagccagataaagtagccgtcagcacagaggaggtccagtatctgattcctccagagtcacaggttgagaagccagtggccgaggacgagccagcagccggggacaagccagcagcagcagaacagtaaattacacacacacacacacacacacacacacacacacacacacacacacacacacacacacacacgccgagcagctgtctcgggtccagagcgagcagcgtggagctcagtgacagcagcagggagaaatccactgaaggaaaaaacccaaatttccactccacaaagaaaacagctgcaagcccccagggacttacctggggctggcatgtgtgactgtctcggatgaagtgactgacccagtgcacactggatcaaaatgctgctttcctctgtgtctcacagcttggctgagctctgtctctgcaggttagaagtctgctaaagatcaaatgtgaaagtacttggagaaactgaggcctcttatgtgtaatgtgtaagttaagtgagccatatattttcttgcctcttccggacattcatgcttgtgtcccaagcattcccttggtgaattgtcacgtgagtggggccagtaagagtgaagtctgctccttgaatccaagccccatctggggcttctctaacaaatctgtagccctgtaactccagaacccctggcagcagcagcttttctgaggatggagcgtgggacagccaccagtgtgctgagcagaggtggcgaaggacatttccagcccagcagtcgtcatggtaacagccagggcgggccaggcagggatgtgcagaaccatgtgggattgacctttctgtggtgtcaggtttgagcgggagctggggagaaacagcaacaactacttccctctggcccagccctcagggcttctgggctgggctgaatgaagaaagggagaagctgagaagtgggacagctggcgagagagccaagagagagacagggctttagtcagagccagctagagaacccatgggaagagggacaggctggtcaccagcaggctcctgcggtgagcccacctgtggcaagcactagacctcaggcccccagttggcagcgctcatgggtgggtactaaaggtcagttccctatactcagagctcccccagactccttcagatcaaatgtcaccttttccatattgcaaaagcctttattgctctaaggaaaacatgctaaattaaaaagaaccaaattattcttttaaaaatagaaatattttaaatggaaaagttcaaagaaaataaaaggctttccaatcctccctctgcttctcccagctctaaaattcctccacagttgcttcccatgcctgccaggttggaggaaagggacaggcctgggcccagcggcctcttctctgacaagggcacagaaagggaagccggattggtcgttgcctgaatttgaggggggcttggactcacaggcttcccgctaattcgaaccagtgaaggagactcatttccctctatgccccctctttctcctattggggcggacatacaggcagcagaaagaggtgcccacaggtgccctgtgaccccttgagggagaggcgaggggtgcagggcagcctcaggtgagctccatggagaacatagcttaccagtggatcccatttccagactttcaaatcatggccatgcaagagatctcgagctttctgggacacactgctatggaaaacaagaccatagcctcagaataaaaaatgtggtcttcttatttactgaaaatctaccttcaggaaagacatgaagggggcactcaccagccaataggtgggtaacttaacacagcagcaccacaggctttcttttatacaggagtacagtccccaaatccccttggagaactgcctctgggccacttgtacaggggaaggggacacttggcaggagaggggaccgcagaccttgtagtcataagttagcatgctgctaaaagactatttgaaatgagtgctgattacatatatttaaaagtggtcagcattactgaagctccagcttttttttctgaggcggagtcttactctatcacccaggctggaatgcagtggcaccatctcggctcactgcaacctccacctcccaggttcaagcaattctcctgcctcagcctccccagtagctgagattacaggtgcccactgccatgcctggctaatttttctatttttagtagagacggggtttcaccatgttggccaggttggtcttgaactcctgacctcaagtgatccgcccacctcagcctcccaaagtgctgggattacaggcatgagccaacgcgtctggccaagagccagcatttttgagactcgaacctttctctgactgacatgtattgtggagctcaaaataaacattctgtattttgggagttggtcatcactctctagttatgctcctgtagagctattactgaacctctggcctcttccctgggttctggaaaccttcatgtacccgtggcccccagagcaaggggtaggagacaggaaggctgctagtgccccgatggtcccacacgaggctgggaccttgggacacaggcactgcatcattcactgttccctgcatgggcttcaggagtggatgagagcccagggccaagccccttcctctttcgttctgcccaagccccttccctccagctgccttccctccttgagtcccttgattcctctgtgatcccccctccagctcagcacctggggctggcaccactccccagggatactgataaagtcacagagcatctgcccagcgcctgaggtggtgtaagttggggaaggtgggtcatcctgttagttgctcctgccaggcctggagcccctggtggtcctttagaattctagattctcttggttcctttctccagaatccttcccttctcgctccactcatgctctgggccaggcccaccacgtctcctggcagctgactatctcatgccacctgcctttgttctctattccctttgccaaaaccatattttctggtgaatccctcttctacttcaaggttcagttcaagtgccaccatataagtgaagctgtcctcagtcgaccctaggtgactctgtggccccatggaactttttctcatcaccatcgtagcagtcatgactctgttttgacctccacttctccactggagagtgtgttccgtggaatgaactggcttgtagtgtgacctgtgaacctccagagcttggctctgtgttgctcattgagtacttgttcttgcagtgggcccttgccaagagaggcccctgttctgggatgtgagccagagaaggtccgagactcataatttcatgtgtcatactcgtcctccacccagctccccctggccagatcacagccccctcctgctgcagggcctgtagtgccaggctggttgcaagacaggggtcctcacctctgagaaaatcatggcttggcccattggcaccccacctgggatgcagaatggagcagcaacagctggctggtgtctgaacgctatttccccagccctgggcagccatctcctgtagctgttccctcatcccatggctttaccaacccctccttgctgcactggagagcctgagagcaagtaggttcagagtgggaagacagggctaaaggcatcttcccggtcttctctccttccccttcctcccagcagttgcagctgtgctgcgtgatgatgtggaacagagcacagtcttaattactgctcagccctgctcattagtgcttctggaagcccaagaagccagagttaggaagcctcaatcacagtggagacccaggctgcaggcctcctgggtgatcgctagtcctgtgtctcctggtgacttgggacccctttgggggactccagcaaaagacactccctccaaccctgagactggggaagggctgaagctggagggagtcactgctggattaagggagtcgctgctggattaaccttcctcatgggcagctctgatcaaatacctatgtttctcttgctgacagcatagagtctggagtccttggcttagcagtcaagctcctccacaatttggtcccacaggactttcccaacctgatttcctccttcaatcctggcagacaaggagggaaggcaaaggctaggccccctcatgggctctcactagtgtgtgcagagcatttcagggacagcatatggtggaacgtgtgaaactccactgcaatcagagaaagatgaacgaatgattaaataaaccacatgtgctcaaatcccgcacactgatgacttccctgcttttggagagacttagcaaggagcctggtgtgttgttcagcatgcactattttttttcttttttttttttggttgtgaaaaggaataaagaaccatgaagtgcctgaagactgaacgaaaggaagctgagtggaggaggagagaaggggcgggccctgaaaactataaatctataggcccaatttcaatatgtggaaaaactccttcaaaatataaatttgtaaacaccctagatcaaatgagagaatgctcatgaaagcactttttgaactgcaaagggttagaaatataaagcattattctgtaatatttctgttcagtgcagactttaaaacagatgctatggagaggctggagatctatgataatggctcatcacctacaaggtgctcatacagtttgggctgtttcatttaattagtcattgcctctcatgtagactactgcagaagtctcctaagtggcctccccacctctgcattctcccccattccattcatcttatatgccaccgtcacgttaatcttcctgatgcacagctctgatcaaatacctgtaatgattctcctgctgactgcacagagcctggagtcgctggcttagcagtcaagaccctccacagtctggtcccccaggactttcccaaactgatttccttccatcacggcaggcatgggctcgggaagatcaagtcactaaacccaagaccacacagataccaagtggcagatcatacagccaagccttcagaccctgacatctgactccaagaccattctgagcccatcacttcctcactttgatggtgcaatggactgtgtgtttgtgtccctctaaaatatacatgttgaaacactaatcctgatgtgatggtatatggagatggaactttggggaggtaattaggtcatgagagtggaccctttatcaatgggattagtgcccttacaaaaaggggccagagacctagctagttctcttctgccatgtgaggatacaatgagaagtagacagttggtgatatggtttggctgtgtcccaatccaagtctcatcttgaattgtagttcccacaatccccacgtgtggtgggaaggacccagcgggaggtaactgaatcaagggggcagtttccctcatgctattcttgtgatagtaagttctcacgagatctgatggttttagaaggggcttcccccttcagtcggctctcattctccttcctgctgccctgtgaagaagaacatatttgcttccccttctgccatgaatgtaagtttcttgaggcgtccccagccatgccaaactgtgagccaattaaacctctttcctgtacaaa

SEQ ID NO: 118389 - DNA, 349 bp, Homo sapiens
  Payload ID: 3165
  Gene Symbol: C15orf57
  Gene Name: chromosome 15 open reading frame 57
  ENST ID: ENST00000558918
  CDS Start-End: 98-349
caggcgacagagctgagccaagcgtttactgggcagctgttacgagaagaagctaagaagaatcaaaggtttaaatcaggaagtgacttccaaggacatgcttcgaactctggcccaagccaagaaggaatgctgggatcggttcctccaggagaagttagcttcagagttctttgtggatggacttgattctgatgagagcaccttggaacatttcaagaggtggctccagccagataaagtagccgtcagcacagaggaggtccagtatctgattcctccagagtcacaggttgagaagccagtggccgaggacgagccagcagccggggacaagccagcagcagca

SEQ ID NO: 118390 - DNA, 557 bp, Homo sapiens
  Payload ID: 3165
  Gene Symbol: C15orf57
  Gene Name: chromosome 15 open reading frame 57
  ENST ID: ENST00000560305
  CDS Start-End: 49-498
agagctgagccaagcgtttactgggcagctgttacgctcagattccaaatgaaaatgtttgagagcgctgactctacagccacaagatctggccaggatctctgggctgaaatttgttcctgtctgccaaatcctgaacaagaagatggtgccaacaatgcattctcagactcctttgtggattcttgccctgaaggtgaaggccagagggaggtggctgactttgctgtccagccagctgtaaagccttgggctcccttgcaggattcagaagtgtatttagcatctctagagaagaagctaagaagaatcaaaggtttaaatcaggaagtgacttccaaggacatgcttcgaactctggcccaagccaagaaggaatgctgggatcggttcctccaggagaagttagcttcagagttctttgtggatggacttgattctgatgagagttttttgagaaatgggatctgtgctaagggctttgggcaggccagctaggaggacggaagaagtttcccattcgcttgtggacaaggcctgcacccatataatcaact

SEQ ID NO: 118391 - DNA, 677 bp, Homo sapiens
  Payload ID: 3165
  Gene Symbol: C15orf57
  Gene Name: chromosome 15 open reading frame 57
  ENST ID: ENST00000559911
  CDS Start-End: 49-660
agagctgagccaagcgtttactgggcagctgttacgctcagattccaaatgaaaatgtttgagagcgctgactctacagccacaagatctggccaggatctctgggctgaaatttgttcctgtctgccaaatcctgaacaagaagatggtgccaacaatgcattctcagactcctttgtggattcttgccctgaaggtgaaggccagagggaggtggctgactttgctgtccagccagctgtaaagccttgggctcccttgcaggattcagaagtgtatttagcatctctagagaagaagctaagaagaatcaaaggtttaaatcaggaagtgacttccaaggacatgcttcgaactctggcccaagccaagaaggaatgctgggatcggttcctccaggagaagttagcttcagagttctttgtggatggacttgattctgatgagaggccctgtaactccagaacccctggcagcagcagcttttctgaggatggagcgtgggacagccaccagtgtgctgagcagaggtggcgaaggacatttccagcccagcagtcgtcatggcatgggctcgggaagatcaagtcactaaacccaagaccacacagataccaagtggcagatcatacagccaagccttcagaccctgacatctgactccaagaccattctga

SEQ ID NO: 118392 - DNA, 1918 bp, Homo sapiens
  Payload ID: 3165
  Gene Symbol: C15orf57
  Gene Name: chromosome 15 open reading frame 57
  Uniprot ID: Q9BV29
  ENST ID: ENST00000559153
  CDS Start-End: 13-570
ctcagattccaaatgaaaatgtttgagagcgctgactctacagccacaagatctggccaggatctctgggctgaaatttgttcctgtctgccaaatcctgaacaagaagatggtgccaacaatgcattctcagactcctttgtggattcttgccctgaaggtgaaggccagagggaggtggctgactttgctgtccagccagctgtaaagccttgggctcccttgcaggattcagaagtgtatttagcatctctagagaagaagctaagaagaatcaaaggtttaaatcaggaagtgacttccaaggacatgcttcgaactctggcccaagccaagaaggaatgctgggatcggttcctccaggagaagttagcttcagagttctttgtggatggacttgattctgatgagagcaccttggaacatttcaagaggtggctccagccagataaagtagccgtcagcacagaggaggtccagtatctgattcctccagagtcacaggttgagaagccagtggccgaggacgagccagcagccggggacaagccagcagcagcagaacagtaaattacacacacacacacacacacacacacacacacacacacacacacacacacacacacacacacgccgagcagctgtctcgggtccagagcgagcagcgtggagctcagtgacagcagcagggagaaatccactgaaggaaaaaacccaaatttccactccacaaagaaaacagctgcaagcccccagggacttacctggggctggcatgtgtgactgtctcggatgaagtgactgacccagtgcacactggatcaaaatgctgctttcctctgtgtctcacagcttggctgagctctgtctctgcaggttagaagtctgctaaagatcaaatgtgaaagtacttggagaaactgaggcctcttatgtgtaatgtgtgactacaattgcaaagtagaatttgctttgacacctgatgccaggacaatagtatgttaccatccttctatagacattccatatgaacgcacaaaacctatcccttgaccagatcctgtgtataataatgaagaaacacatggtcaagtgctgaaaactagagaagaaaaaagtgaacaccttgagcgagaacccataatagaacaacttagcaaaatgttctttatgctaagtacggttggcatcttcgtggacattagcacagatgtcagaagaaaccggaacctccagaagacagatgatattgaggttcttggggaattaaagagaaatattaccctctgcctcatttgccattggagacagtgcaatctggtgtatgcactaataataataataacatgtcttttcatatttaaaaaaaaaacacaaaatctttaggaagccgaggtgggtggatcgcttgagtcaggagtttgagagcagcctgagcaacatagaccccatctctaaaaaaaattagccaagtgtggtgatgtgtgtctgtggtgccagctacttggaaggctgaggtaggaggattgcttgagctcaggaggttgaggctgcagagagtggtgatcatgcctctgcattccagccttggtgacagagcaagaccctgtctcaaacaacaacaacaacaaaaatcaaaatctatgcaaaatttaaacccaatcttgcgctagtcttgtgggaatgaagattaatttacctaaaaatgctcctctggtttttgtaattctttttgttactttttaaaaatataaatttggccaggcacggtggctcacacctgtaatatcagctactcgggaagctgaggcaggagaatcgcttgaacctgggaggcggaggttgcagtgagccgaggtcccgccactgcactccagcctgggtgacagagtgagactctgtctcaaaaaaaaaa

SEQ ID NO: 118393 - DNA, 557 bp, Homo sapiens
  Payload ID: 3165
  Gene Symbol: C15orf57
  Gene Name: chromosome 15 open reading frame 57
  ENST ID: ENST00000559103
  CDS Start-End: 47-557
gacagagctgagccaagcgtttactgggcagctgttacgattccaaatgaaaatgtttgagagcgctgactctacagccacaagatctggccaggatctctgggctgaaatttgttcctgtctgccaaatcctgaacaagaagatggtgccaacaatgcattctcagactcctttgtggattcttgccctgaaggtgaaggccagagggaggtggctgactttgctgtccagccagctgtaaagccttgggctcccttgcaggattcagaagtgtatttagcatctctagagaagaagctaagaagaatcaaaggtttaaatcaggaagtgacttccaaggacatgcttcgaactctggcccaagccaagaaggaatgctgggatcggttcctccaggagaagttagcttcagagttctttgtggatggacttgattctgatgagagcaccttggaacatttcaagaggtggctccagccagataaagtagccgtcagcacagaggaggtccagtatctgattcctccagagtcacaggttgagaagccagtggccg

SEQ ID NO: 118394 - DNA, 1577 bp, Homo sapiens
  Payload ID: 3165
  Gene Symbol: C15orf57
  Gene Name: chromosome 15 open reading frame 57
  Uniprot ID: Q9BV29
  ENST ID: ENST00000561011
  CDS Start-End: 215-619
actgggcagctgttacggtaagtgaggaggggctggggtgcccagcgttttggatctcccactctggcccggccccggaataccacatagaggccttgggacctgattcatcccgtccagacagccctagagacctgagcgactgaggcctgggatctggacgccggaatttcctgcgtggttctggacgccctgccctgggctcagattccaaatgaaaatgtttgagagcgctgactctacagccacaagatctggccaggatctctgggctgaaatttgttcctgtctgccaaatcctgaacaagaagatggtgccaacaatgcattctcagactcctttgtggattcttgccctgaaggtgaaggccagagggaggtggctgactttgctgtccagccagctgtaaagccttgggctcccttgcaggattcagaagtgtatttagcatctctagagaagaagctaagaagaatcaaaggtttaaatcaggaagtgacttccaaggacatgcttcgaactctggcccaagccaagaaggaatgctgggatcggttcctccaggagaagttagcttcagagttctttgtggatggacttgattctgatgagaggtgactacaattgcaaagtagaatttgctttgacacctgatgccaggacaatagtatgttaccatccttctatagacattccatatgaacgcacaaaacctatcccttgaccagatcctgtgtataataatgaagaaacacatggtcaagtgctgaaaactagagaagaaaaaagtgaacaccttgagcgagaacccataatagaacaacttagcaaaatgttctttatgctaagtacggttggcatcttcgtggacattagcacagatgtcagaagaaaccggaacctccagaagacagatgatattgaggttcttggggaattaaagagaaatattaccctctgcctcatttgccattggagacagtgcaatctggtgtatgcactaataataataataacatgtcttttcatatttaaaaaaaaaacacaaaatctttaggaagccgaggtgggtggatcgcttgagtcaggagtttgagagcagcctgagcaacatagaccccatctctaaaaaaaattagccaagtgtggtgatgtgtgtctgtggtgccagctacttggaaggctgaggtaggaggattgcttgagctcaggaggttgaggctgcagagagtggtgatcatgcctctgcattccagccttggtgacagagcaagaccctgtctcaaacaacaacaacaacaaaaatcaaaatctatgcaaaatttaaacccaatcttgcgctagtcttgtgggaatgaagattaatttacctaaaaatgctcctctggtttttgtaattctttttgttactttttaaaaatataaatttggccaggcacggtggctcacacctgtaatatcagctactcgggaagctgaggcaggagaatcgcttgaacctgggaggcggaggttgcagtgagccgaggtcccgccactgcactccagcctgggtgacagagtgagactctgtctc

SEQ ID NO: 118395 - DNA, 801 bp, Homo sapiens
  Payload ID: 3165
  Gene Symbol: C15orf57
  Gene Name: chromosome 15 open reading frame 57
  ENST ID: ENST00000625629
  CDS Start-End: 280-801
actaggggactccgcccctcccgatttcctccgggctacaggcgacagagctgagccaagcgtttactgggcagctgttacggtaagtgaggaggggctggggtgcccagcgttttggatctcccactctggcccggccccggaataccacatagaggccttgggacctgattcatcccgtccagacagccctagagacctgagcgactgaggcctgggatctggacgccggaatttcctgcgtggttctggacgccctgccctgggctcagattccaaatgaaaatgtttgagagcgctgactctacagccacaagatctggccaggatctctgggctgaaatttgttcctgtctgccaaatcctgaacaagaagatggtgccaacaatgcattctcagactcctttgtggattcttgccctgaaggtgaaggccagagggaggtggctgactttgctgtccagccagctgtaaagccttgggctcccttgcaggattcagaagtgtatttagcatctctagagaagaagctaagaagaatcaaaggtttaaatcaggaagtgacttccaaggacatgcttcgaactctggcccaagccaagaaggaatgctgggatcggttcctccaggagaagttagcttcagagttctttgtggatggacttgattctgatgagaggccctgtaactccagaacccctggcagcagcagcttttctgaggatggagcgtgggacagccaccagtgtgctgagcagaggtggcgaaggacatttccagcccagcagtcgtcatggtaa

SEQ ID NO: 118396 - DNA, 1342 bp, Homo sapiens
  Payload ID: 3166
  Gene Symbol: C15orf59
  Gene Name: chromosome 15 open reading frame 59
  Uniprot ID: Q2T9L4
  ENST ID: ENST00000379822
  CDS Start-End: 346-1227
ctgtgttcaagctcaggcagagatcagctctgcacacccacaggcacttcaagacctggaggccactcctgggacccaaggtccctccccctcctctcctgtgtcctcaccttgaccccctctgctagactctgtctccctctgggtgtcccactctccacccagaggcagaggaggctgggtggcagggggcaggggctggttgagggccgcccagggccagggtgggctggggggccgttaaaatgtggagctctgcccagccgaggggggctccgtggaggcagacgcagtgtgtgcccagctggggggagtatgggcaggcctgcggccacgtggtaaacgatgaacattcggggcgccccggacctcgggcagcccagtgacgaccccagcagtggtggtgagcgggagcggattcgacagcgcatgaagatggtcatcgggcagcttgagggcatccttcgcgagctcaaggaggtggccaaggagctgagggaggtggtgagccagatcgataagctaacctcggacttcgactttgaactggagccggacgactggaccacggccactgtgagcagcacctctagcagtgacaaggcgggcatgggtggcccctttgacctgggccacctggacttcatgacagccgatatcctctcagacagctgggagttctgctccttcctggacgtctctaccccctcggactccgtggatggtcccgagtcgactcggccaggggctggccctgactaccgcctcatgaatggtggcacgcccatccccaatgggccacgagtggagaccccagactcctccagtgaggaggcctttggtgctggccccacggtgaagagccagctgccccagcggaccccagggacacgggagagggtgcggttcagtgacaaagtgctctaccatgctctgtgctgtgacgatgaggagggggacggtgagcaggaggtggaggaggaagaagtgggcttgccccctgagcctgcccatacagaggcccatgcaggcccccacaagccctccccagccccctacaagtcacggcgctctccactgaccagccgccactcaggctctaccttggcccctgaacagactcgaagggtcacgaggaacagcagcacccagacagtgtcagacaagagcacgcagacggttctgccctacacagccactagacagaaagccagggggaaaaactaggggccggggagggggccgggggcggtgggcacatagagctataaataaatatatatatatatatatatatatatatatttaaacaaatgaagtcataataaaatttaaaaatgct

SEQ ID NO: 118397 - DNA, 779 bp, Homo sapiens
  Payload ID: 3166
  Gene Symbol: C15orf59
  Gene Name: chromosome 15 open reading frame 59
  ENST ID: ENST00000559817
  CDS Start-End: 321-779
aaatctgccggaccctcgctcattcccgaccccgagcctggagaggcttgagaaagatttttcctgcccccttccctggagcgcggaggccccgccccctcccaccgcccagatgtctccggtcacggctcggaggacctccctgaggcccggggccgaagggtccagagagagaagcccgccctagggagccttgggggccccccaactccgtcttggggcttggcccccgacgctgcttggagggaaggccggtgcccccaccctcgcccagtgacgaccccagcagtggtggtgagcgggagcggattcgacagcgcatgaagatggtcatcgggcagcttgagggcatccttcgcgagctcaaggaggtggccaaggagctgagggaggtggtgagccagatcgataagctaacctcggacttcgactttgaactggagccggacgactggaccacggccactgtgagcagcacctctagcagtgacaaggcgggcatgggtggcccctttgacctgggccacctggacttcatgacagccgatatcctctcagacagctgggagttctgctccttcctggacgtctctaccccctcggactccgtggatggtcccgagtcgactcggccaggggctggccctgactaccgcctcatgaatggtggcacgcccatccccaatgggccacgagtggagaccccagactcctccagtgaggaggcctttggtgctggccccacggtgaagagccagctgccccagcggaccccaggg

SEQ ID NO: 118398 - DNA, 6573 bp, Homo sapiens
  Payload ID: 3166
  Gene Symbol: C15orf59
  Gene Name: chromosome 15 open reading frame 59
  Uniprot ID: Q2T9L4
  ENST ID: ENST00000569673
  CDS Start-End: 1206-2087
gagccgtgggagcggtctcgcccagggccgaccgcggggctgggctgagcagaccctcgcggccgctccggacgccgcgggtgccggggcacggacgttctgggtccgggctgagcgcgtcccgggcgcccggcggtgccagctcactccgggcggggtagggcagggcagaccccagcggaacacggacccggccgatctggactggacagagcgaatcccggacggtgcagagcccggggaatgccgggcgtgggctgaggggatcccggcgccctcccagccctccgactttggctcacgcgctgggacctgcccggcgtctcctcggcctccccgcgccccggtcacctgtggcctcggagccccaaatctgccggaccctcgctcattcccgaccccgagcctggagaggcttgagaaagatttttcctgcccccttccctggagcgcggaggccccgccccctcccaccgcccagatgtctccggtcacggctcggaggacctccctgaggcccggggccgaagggtccagagagagaagcccgccctagggagccttgggggccccccaactccgtcttggggcttggcccccgacgctgcttggagggaaggccggtgcccccaccctcgggggctgccctcttccaatccagctccctccccagagctgcccatatccggagccccttccacatctggaagaccctggccaccatccctctgcaggtgtcagttgcatccagagacctctgcctttgcaactgcctaggagttgtgaggggatccctgctgccttcccccatcccaagggcatctcttacccttagtccctgcagagtcatccccctgcctctgtgttcaagctcaggcagagatcagctctgcacacccacaggcacttcaagacctggaggccactcctgggacccaaggtccctccccctcctctcctgtgtcctcaccttgaccccctctgctagactctgtctccctctgggtgtcccactctccacccagaggcagaggaggctgggtggcagggggcaggggctggttgagggccgcccagggccagggtgggctggggggccgttaaaatgtggagctctgcccagccgaggggggctccgtggaggcagacgcagtgtgtgcccagctggggggagtatgggcaggcctgcggccacgtggtaaacgatgaacattcggggcgccccggacctcgggcagcccagtgacgaccccagcagtggtggtgagcgggagcggattcgacagcgcatgaagatggtcatcgggcagcttgagggcatccttcgcgagctcaaggaggtggccaaggagctgagggaggtggtgagccagatcgataagctaacctcggacttcgactttgaactggagccggacgactggaccacggccactgtgagcagcacctctagcagtgacaaggcgggcatgggtggcccctttgacctgggccacctggacttcatgacagccgatatcctctcagacagctgggagttctgctccttcctggacgtctctaccccctcggactccgtggatggtcccgagtcgactcggccaggggctggccctgactaccgcctcatgaatggtggcacgcccatccccaatgggccacgagtggagaccccagactcctccagtgaggaggcctttggtgctggccccacggtgaagagccagctgccccagcggaccccagggacacgggagagggtgcggttcagtgacaaagtgctctaccatgctctgtgctgtgacgatgaggagggggacggtgagcaggaggtggaggaggaagaagtgggcttgccccctgagcctgcccatacagaggcccatgcaggcccccacaagccctccccagccccctacaagtcacggcgctctccactgaccagccgccactcaggctctaccttggcccctgaacagactcgaagggtcacgaggaacagcagcacccagacagtgtcagacaagagcacgcagacggttctgccctacacagccactagacagaaagccagggggaaaaactaggggccggggagggggccgggggcggtgggcacatagagctataaataaatatatatatatatatatatatatatatatttaaacaaatgaagtcataataaaatttaaaaatgctaaggatctggccccacaggccccaaagctttcacagagctcctcttagacatgaagatgcccattggcctcctaggtcccaggaggtgtgggcaggactgcccttcctccgttctcattgcggggctcctgaagggggtatctgaaagtatgtaaaactgatgggaggtctgatcctccttttgctagcccctgaactctgtggtggagtctggctgatggccagggccatgtcctagaggggactcccctgcaggaggcgggctctaaagggagtggtgtccctttaggccagggttcacagtcggggtggtctggagactgcaggactcagggcctgggggtggcatcagtctggccaggccctgcgtcacttgcacccaccatccttctactccaaggcagacttactcggctatacacagtcctgcctcacccccttccatcttagggttgcctgggacataggggaatggcaagctgctcccatggcgcaggcctccgtgctgggatgctgggcatccacagagcctgaaggatcgcctgggctgggcaggggtttgattggagggtctggaccacccccaatcctttcagctcccattctcagcctgattctgagaccaagaccaaaacctcagggcaaagcctcagccagtcctggcgtggccctaagcagacctgagatctgtgcgaggaagtaggcagccacttccatggggctaaaaattagggccgtagacaggctcctggccaccttcaccaggtgggcagccttggaaaggagcccagtggtccccactccgtcccgatgtctccacacccagcccctgagcccatctcagcaggtcctgaacaaagatgaggttacagcctagaggtaccagggcttcatctggggcatggccagcacagggacagcagctgaatatccttgggataataatgacaattatattgctcacatttattgagcaggtctctatgctacttctatgccgaatactttttatagcagcatctcatttaatcaccacaataacctgatgagacaggaagtattattaccccatttttctttttctttctttctttttttatttttattttttttatttttgagatggagtctcgctctgtcacccaggctggagtgcagtggggcgatcttggctcactgcaacctccacctgccaggttcaagcaattctcccacttcagcctccagagcaactgggactacaggcatgcgtcaccacgcctagctaatttttgtatttttagtagagacggggtttcaccatgttgggcaggctggtctgaactcctgacctcaagtgattcgtcagcctcagcctcccaaagtcccgggattacaggcgtgagccactgtgcccccacctatccccatttttcaaatgagatgactgaggttcaaagtagttcagtacctgccccaaagccacaaagcctgtgctactctgcccccaagaattagtgatttccaggctgtgcctggctctgctagctagcagctgtgtgaccttggcaagtccgtttgcctctctgagcctatctacctcctctgtataatgggtctggtagtcttcacctacctcaccagctgctgtggagctccgacgagatggtgactgtgaaagcacttgacaaactgaaggcactggacatgccttgtggtcagtgtggcctcaacccagatgtccagtgatttccagggcacaggggctttgagtgggatggccaaagaagacacctccatccaactgggagccacccctgggtcacaaacactccattgcttggtccctcgcagtagctcgaggtcagaagttgactgcagcttgattcacagcccctcgctcagagcagggaggtgggactggcagcacagcaaagacatcgctccttgggggcctccctgttgcatatttcaattaaggcaggtttacagccccccagcgtctgtccggagggggcctgagcagcaggcctggcagcacccactgctcctgcctgaagaggtgctatccagccccggctgtggacatacagtgagattgtacaggccggtctggagcagctgcaggggatatgatctggataagactgagcagacctaggaggctctgcaatgtagagcttattcctcaagctcatggtgagattggagccctaaagagttagccagggtgcagccaccagtgtggaaatccagggatggcgcaggccatggccagctcttcccagctcacgtctgagaaccaagggtctgagcccctctatcagccccaggaaatcctcagccatttggtgctgatcagcgatagggctctggttcacaggatgagtgccaggggctcctctggggagaggggccagctgcattccgccccaccctgagagtgagaagggggcagtccccgaccaggaatgggcctacctggtgctaagaatggacataacagttctccctctgaggcttgcatttcatctgtcatggcaagagcactttcaggctcacagtttctcatcttttcaacagtcagggaaaagaaacctatggaatagttcgcatttcacagaggaagaaactgagggccagagctaggggtctctgacacagccatgggatcctgcaccccacactggctctatgtgactctgtagtagtggctaatgtccatcagtcgccccctgctcccctgcctggccatttgcccccaaatagggcagtggtgggagtatatcctggaggagggggaagtgggatataggtagtacttggctgacttcacaattttgctacacccagtctggacctcctgacagtggagtgggatccctgtggcttcctttttcttgtttttgttttgttttgtttttttttagatggagtctccctctatcatccaggctggagtgcaatggtgcgatttcagctcactgcaacttccacctcccaggttcaaacaattctcctgtctcagccacctgagtagcttggactacaggcacccgccaccaccccagctactaagttttgtatttttagtagagatggggtttcaccacatggccaggatggtcttgatctcttgactttgtgatctgcccaccttggcctcgcaaagcactgggattacaggcgtgggccactacgcctggccaatttttttttgttttgtttttttgagatggagtcttgctccatctcccaggctggagagcaatggcgtgatctcagctcactgcaacctctgcctcctgggttcaagcgattctcctgcctcagcctcccaagtagctgggattacaggcacccaccatcatgcccgggttaatttttgtattttcttagagatggagtttcactatgttggccagcctcatctttgaactcctgacctccgatgatccacctgccttggcctcccaaagtgatgggattacaggcgtgagccaccgcacctggccccagtggcttcttcagacttgaaacacaaaatgtggccagctagggatagagagaattctgactttcaacactgctgagtcatggcatgggctgcttctgggtagtgagctccctgtccttggggtagacacagccatcccttgggtccttcctccagaccttccaggtacagccctttgctgctcttccctgcctccaaacctttgccagtttttgagtttctttacccaggatgttccatcagatctctctgcttccgggaagtcctattccactgaccacctactgtgtgcacaggcttgtgctgagtggtgctgtggaggggcagaagggagctggaacctggtgatggagagaagtcatagcatgatgaataactcatgtccactgggcacgtgctaggcactgggcattgttctaagtgtatgtcttatctcatttactcctcacagcacgtatgagataagcaatcttacttatgtctaagtagcttccagatgaggaaactgaggctctgggaagtgaagtaacttgcctaaggaaacacaggatgggctatggaaccaggattcaaccacaaacacagtgacttagcatcatctactgcaaacatccactgcagttaaaatgcctggagtgggtggcctggtcactggaggtgagggtcggggctgggtcgtctgagagccaggcgggtcttcggggtgaggggagtgttggggtgaggaaacatgtgaacatgcctcagtctttggagaacttagttactgttaacctgaatgtcaccacccctgactcggagactggcaccaaatggattatgggttcaataaatgtttgttgaatgaataaacgagccccatttgcagaagggta

SEQ ID NO: 118399 - DNA, 4253 bp, Homo sapiens
  Payload ID: 3167
  Gene Symbol: C15orf61
  Gene Name: chromosome 15 open reading frame 61
  Uniprot ID: A6NNL5
  ENST ID: ENST00000342683
  CDS Start-End: 182-655
cccatcccccggactccacccccagcgggaggccacggggccgctgtgcgcacgcgccgccgcacaccgggggctctcgggcacccgcgcggcgccggttggccttcccggcgctcgcccgggggcgcgcttgcgcgccagcggctgcggacaccagcctgcgtccccggcgcggcgggccatggaggccctgaggagggcccacgaggtcgcgctccgcctgctgctgtgtaggccgtgggcctcgcgcgccgccgcccgccccaagcccagcgcctcggaggtgctgacgcggcatctgctgcagcggcgcctgccgcactggacctccttctgcgtgccctacagcgccgtccgcaacgaccagttcggcctctcgcacttcaactggccggtgcagggcgccaactaccacgtcctgcgcaccggctgcttccccttcatcaagtaccactgctccaaggctccctggcaggacctggcccggcagaaccgcttcttcacggcgctcaaggtcgtcaacctcggtattccaactttattatatggacttggctcctggttatttgccagagtcacagagactgtgcataccagttatggacccataacagtttattttctcaataaagaagatgaaggtgccatgtattgaaagtgtgcgtcaaagaacataaatatcagtggattttctctgtgtatatgtgcagtatttatttttgatcctttaaaataaaacttttgcaaatacttttttctttctacagtatctgcttctttaagatgaatcattgccctcaagaggtgaagctttttatacatcgttatatattacatactctgtttagctgatgtgaactacaaacacatgaagcttcacaccattttttccctagaactaggttaacctacagataaaaaatgattacaatgtaatagattctatagttaattaacaatttaaatcaactctgaagagaaaatatagatgcccacacaaaagagaaggggggaaaatcttttatgtaacaatggaaaaagaagtagaagacattaggatgtatgatggaaatattacatcattggcaaatccaaaattgatgagaatctaattgtaatctcaagtctaaaccattcagctgccaggattgtaaatagaaacgttttaaaggccttgtgccatttacctggaggaggggttggagtgtaatgttgaaacttcttgttgcttaaagagtccaaaaccatatcgtttgtaaaatgtaataataactggttaatataagtgtagcaaggtgaatgaaactcagacttattaaaagttaaaacagctttcctataaagctgtaagaacaattaagatcttctagaaagatgcagaaaaataaatttggtaactgtttataaaagcaattaactgaaatggtacatatccatagacttattggcaataaggagtgggctgaaattttaaagacctaatggcacttttgcatttgaattttattaacttaattgcatttttgaaagccaagtcatttaaaaaaatgtatccttggggtagtcacaaaatacccagatgaatggtaaatttcagacatttggagtaatttagggagaactaagtagaactatttaatttctaaaccaatgggtgtttaagatttatgatctctcccataattacaaacatacattatatatcattttatgttaatgtgttgctgatactctgcaacacttacacatttttgtagcaaaacattttataaaattcaacatttggatgcttatgtcaagtcagtagagaaagtgagtggaagtgactgaggtgaaggcaccagaataatgaagtaatacaaactagcttcgttaaaggtagtcattttaaatgatctacagagtgaactgttcttcaaatatatgtggtgttcacttgtctaaaagcaattctaagtaacactttaatcaaagaagtacttatgccaatatatttagtccagaagaatatacttgacactagttaaatgaatggcttacacaaaggagatagtgttacattaagcttcattaataataaaacaactggctattagcattttgcagggaaggctagaactgatttcctctgtaatgggcaaagttaaataactatagctcataagttttaagtcaaatactgctcattcattgctgctggtcttgtcaatagtggctgtaaaggtttggtcccaacacaaggctgataaaatggtctttaattaccagactataaatacagcttttcagtagagttgcacctcttttcacactggcctgtttgatttctgataatttgtactgctgactctgcttacctgtttttcaatagctatagtcagtgtgacttcttgcccatatgtgataggtaagtgtccttggagaacatctttgacaaactaccctattgatctctgtaattctctgctgcttgcagcattaaacagggccttgatttcttgtctgatgtgctcactgtataacaagtaaatgtaatattttcttgtattacatgaaaatcaatagacctcttgctcttacggagttgatcatggtgaaggatgaactaactcaacaatgggtaaaggcgtggtttaaaaatttaaatatcattcattggatttattaagtcttgtaaacttgtagtctgaaaacaatacttcccattgaacagcaatggtttaagttttttctttaaagctgcatattacaccaaagtattatggcctgaaagggagaaagtataaatgtgtaagtcaggagactgagtctatttttagtattggtgctgtcttactttttgacctcaggctaataactctcctcctttgtgtcttggtttttccacctgtaatctgagaagaacgaaacaagagacatttctacccgaaaatgtacatcaattttacttttgtctctgcaaaagctctgtttttataatccacattcttctgctccattatacttaaaggacttcattaattaaaaaatttcaaaaataaggtgatggagaaagaaggagagatgcattgatagcacatgcccactaaccctgaagtggcatgtggggagctgaagaggcccttctcttctgcatatcagtagttttcttaattggtgaaaccactgattagcttttctgtcatatttctttgacaggatttttatctttaatccaaccaaaactgttttaataaaggtgtacttttagtacaaaaccttgcatctcttctattgttatttctatacaaatgaattatcacgtattggaataaatttctaggcaaattcctaggcaaaattcttagttcctgtgtaagttgtgagccactataaagatgcagtaacctatttgggagcgtgagagaggctgctaatacaaaaatctctattttcttagtgttgatgtcctaaaatgccaaattgtagaaacagttatagtttaccacacattttggggcattaatatttttctaacgttgacttccgtaaaaattcaaacttttctttttgagaaggagtttcagtcttgttgtctaggctggagtgcaatggtgcgaccttggctcactgcaacctccacctcccaggtccaagcgattctcctgtctcagcctcctgagtagctgggattacaggtatgcaccaccacgccggctaattttgtattttctgtacagacggtttcaccatgttggtcaggctggtcttgaactcctgatctcaggtgatctgccggcctcggcctcccaaagtgctgggattacaggcatgagccaccaggcctagctgaaacatttgtaattattaaaaccgtgtatcttttaaagtacattttacttcatgtcatttatattcacccaaaactgtaagcatagaacatctatagttcttcatgaaatatcttttaactctgttaaagaatgatgtttgaataagtgggatgacataaaaggcaaagatcttggtttcactgcactgaaaagctaatgcagataacagaaaccttatcctaaagctagtggattaagtatctactgttactcaaacaataatgacatttgggggcatcttaacctaaacaagtacttagcattacatctcacctgggtcaacagtctagagtatcagagttaaactctgttactgtaaattaatggaaaatgtaactgcactttgctgaaagatcaatgtccaataaaggctgcacgatc

SEQ ID NO: 118400 - DNA, 769 bp, Homo sapiens
  Payload ID: 3167
  Gene Symbol: C15orf61
  Gene Name: chromosome 15 open reading frame 61
  ENST ID: ENST00000557807
  CDS Start-End: 494-676
cgcgggagtcagctctgcctcccggcgccggcttcgcctggggtcctttgtactcctcgcccagggggtccccagcttgctgagctcctggcacccgaagccgttcgcctgctgcgggcgcgtcctcgggcctagggaggggcgggtcgccctcctgtcctgcccatgttaaccagagtagacccctggcctgggcagtaagccagggggcgtcaggaaacgccccctagaaagtggctctgaagttgacatccgtcctactgcatggcaggactcattcccgtgaacatcactttgcagctgcgtttatgttgcaataactggaactactcttttaagtttcttttgttttctttgtatgaattcccggcaagttcgttttactaaaagcaccaaaggttttcaccagacataacagcttcctgaggtgctaggcctaaaagatttttaaagatctttaatatttgtatattttcatggagacgccctgaggatgtttactgtcactaggtgtttattttcttttggtttaatgacagaagagggaggtattccaactttattatatggacttggctcctggttatttgccagagtcacagagactgtgcataccagttatggacccataacagtttattttctcaataaagaagatgaaggtgccatgtattgaaagtgtgcgtcaaagaacataaatatcagtggattttctctgtgtatatgtgcagtatttatttttgatcctttaaaataaaacttttgcaaa

SEQ ID NO: 118401 - DNA, 2370 bp, Homo sapiens
  Payload ID: 3168
  Gene Symbol: C15orf62
  Gene Name: chromosome 15 open reading frame 62
  Uniprot ID: A8K5M9
  ENST ID: ENST00000344320
  CDS Start-End: 417-944
gagctcgggccatctgctgcctgcctgtggaaggagcgctcgccagcctcacccagcccgagaaggtccacctctgcctccgccggagctgccctcattctggctccagtaagtgctgcttcttcctcctgggtttttttccactaccctattcagtaaccaggccactcctgtccctgtgggaaactcttgctgccaggaactcccagctgtctgctctcctgggcaaaaaagttccttcttcctgagccctcctctcaccatccaagatgtggtcaaaggtctgtgctgagtggaaaccctgaggcctctgctcctaggggagcctccccagctgctggcactcactgccccagcagggaccacatgcaccctggctgctcctgaacacctgtctgctggctcccctgggccccatggagacctggcggaaaggctccttccgcaacgcctccttcttcaagcagctgagcctggggcggccacggcggctccggcgacagagtagtgtgcttagccaggccagcacagcaggtggggaccacgaggagtacagcaaccgagaagtcatccgggagctacaagggaggccagatggccggcgcctgccactgtggggggacgagcagccccgggccaccctgctggccccacccaagcccccacgcctctaccgagagagctcaagctgccccaacatcctggagcccccacctgcctacacagcagcctactctgccaccctgccatcggcgctctctctgtcgagtgccctccaccagcactcagagaagggccttgtggacactccctgcttccagaggacacctaccccagacctcagtgatcccttcctctccttcaaagtggacctggggatttcacttcttgaggaagttctgcagatgctaagggagcagtttcctagcgagcccagcttctaaatggggtgagggtgggcaaagccggggtgactggaagatccagaggctggggattaaggaaaggacagggacaggactccaggcccatcgctggagggttcaggcaggcagagcttcttcatcctgggggaggattccaggataggaatccagggctctgcctgctctctgggtcctggacagtccttccaggcaccccagagtggagggacagaggcaatctggaaatgttgggggggcggcccttcctggcaggaccctgaagaaagctggctatgccgggaaagggaggctgtgccgggaaagggaggctctgtgcggcactacaggaaccaggtagaggctggcagagccagaaggtggcacggggtcagatcagggagtgggaggacacagactgagcagaagagatgagtgccccatgccagcctctttggaagccactgtcaacagagagaggtcacaggacaagcttgggtaaaggcagtccaacccaggcagaagaggaaagtgggaaggcccaggaagaaaggggagaaggcctgaccctgtctaatctggtggccactcactgcatgacactgaattgaaataaataaaattaacagttcagttcctcagctgcaccgttattccagattccacattccaaatgcccggtggccacacatgattaatggctaccacactggtcagtgcagaatggacgtaaacatcgctgcacaaagttctaatggacagcgctgtctagaccatggcctggagccaccagcaaaggggaggcgcatacaggggctggccacataggaagagataggtagagatagagtataactcaggaaaaagaccaggcaaatccttagcagaaatgaggacgtggctcagtctgccaacacagctacccggagcaatccctggtgaaggaaggcagctctagagaatgccagccacaggcacgcgcacggcttgcaaaggggtactttggggaattcccagaattactagtgatgggagccctggcaggtttccttcctcgaagagaggagaactggatccagggatgggcattcaacagcgaagcggcacagctggtttccagaaccgtctcccgggattagacagttctgccgcctgaaccctccgacgatgggcctgccaaccaggccaagcccactgggtcaaagccacaggctgtgctacggccccaccccatggcctcaccagaacacagaaaccagagcccagcagcactggctgggccatgtgttggtggccccccgggactcgctaagagtagcaaaggggagagggaagctctgacacacaccatttctacgacctaaatcagtggcctccctctttcctcctcttgtgtataggtaccgagctgtggatacaggagagaatgaataaaattctaacacaa

SEQ ID NO: 118402 - DNA, 729 bp, Homo sapiens
  Payload ID: 3169
  Gene Symbol: C15orf65
  Gene Name: chromosome 15 open reading frame 65
  Uniprot ID: H3BRN8
  ENST ID: ENST00000569691
  CDS Start-End: 222-587
gttgcaacctccagaaagaattcgtggtttcacccgggaaaacagctccccggattaaacggataggtttacacatactgatccacccagctattcatcttctgtttgctgctttaattgggtgcggttaaaaggccacgtccctaggcgttcaccggctttcttgccatctgctgcatgaaaactgactttgccgaaaaaattaacaaagaagagcgaaaatgacagaccgcaaccgggataagaaaagtacttcaccttcaaattcagacacagaaatgaaatctgaacaactgcctccttgtgtgaaccctggcaatcctgtgttttcatgtatgttggatccaaagacactccagacagccacctcactatcaaaacctcaaatgattatgtataaaaccaattcaagtcattatggtgaatttctacctattccacagtttttcccctgcaattatactccaaaggagcaagtattttcaagccatatcagagcaactggattttatcaaaataacactctaaatactgcacctgacagaaccagaactcttgattttcctaatattcaacacactctatgaaaatatattcctttgtatattgaagagaaaatatactcgggaaaaatgagtgttaaatctaagggtagaatacctaataaagaagataaaaagttttgaatcaatttttaaaataagttaaataaagtatttcaactgataa

SEQ ID NO: 118403 - DNA, 604 bp, Homo sapiens
  Payload ID: 3170
  Gene Symbol: C16orf13
  Gene Name: chromosome 16 open reading frame 13
  Uniprot ID: Q96S19
  ENST ID: ENST00000397664
  CDS Start-End: 62-445
ccggccaccgcccccgacgcgacccgcgccgcgtccgcggcggggagttgttgctgccgcgatgctggtggcggcggccgcggagcggaacaaggatcccatcttgcacgtgctgcggcagtacctggatccggcccagcgtggcgtccgcgtcctcgaggtggcctcgggctccggccagcacgcagcgcacttcgcgcgggccttccccctggccgagtggcagccgtcggacgtggaccagcgctgcctggacaggggctcttcagagcagcaggacacctgctcaaacccagggccctgctcatcacctacggggaacccagaatgggggcttcgggacacagccctcctggaggacctgggaaaggccagtggcctgctcctggagaggatggtggacatgccagccaacaacaaatgcctgatcttccggaaaaactaagcccctccttcacccccgcacacctgcatccctgccggaggctctgtgaggcacgaaccctgcctccctaggccggaccttgtggacgacagccccacccagtctgtgctctcagccgctggccgaagggcccagcctgctcagaataaagcatgtcct

SEQ ID NO: 118404 - DNA, 726 bp, Homo sapiens
  Payload ID: 3170
  Gene Symbol: C16orf13
  Gene Name: chromosome 16 open reading frame 13
  Uniprot ID: Q96S19
  ENST ID: ENST00000397666
  CDS Start-End: 13-630
gttgctgccgcgatgctggtggcggcggccgcggagcggaacaaggatcccatcttgcacgtgctgcggcagtacctggatccggcccagcgtggcgtccgcgtcctcgaggtggcctcgggctccggccagcacgcagcgcacttcgcgcgggccttccccctggccgagtggcagccgtcggacgtggaccagcgctgcctggacagcatcgcggccaccacgcaagcccagggcctgaccaacgtgaaggccccgctacacctggacgtgacgtggggctgggagcactggggcgggatcctgccacagtcgctggacctgttgctctgcatcaacatggcccatgtcagccccctgcgctgcacggaggggctcttcagagcagcaggacacctgctcaaacccagggccctgctcatcacctacggggaacccagaatgggggcttcgggacacagccctcctggaggacctgggaaaggccagtggcctgctcctggagaggatggtggacatgccagccaacaacaaatgcctgatcttccggaaaaactaagcccctccttcacccccgcacacctgcatccctgccggaggctctgtgaggcacgaaccctgcctccctaggccggaccttgtggacgacagccccacccagtctgtgctctcagccgctggccgaagggcccagcctgctcagaataaagcatgtcctgctgccgg

SEQ ID NO: 118405 - DNA, 544 bp, Homo sapiens
  Payload ID: 3170
  Gene Symbol: C16orf13
  Gene Name: chromosome 16 open reading frame 13
  Uniprot ID: Q96S19
  ENST ID: ENST00000338401
  CDS Start-End: 53-376
gcccccgacgcgacccgcgccgcgtccgcggcggggagttgttgctgccgcgatgctggtggcggcggccgcggagcggaacaaggatcccatcttgcacgtgctgcggcagtacctggatccggcccagcgtggcgtccgcgtcctcgaggtggcctcgggctccggccagcacgcagcgcacttcgcgcgggccttccccctggccgagtggcagccgtcggacgtggaccagcgctgcctggacaggaacccagaatgggggcttcgggacacagccctcctggaggacctgggaaaggccagtggcctgctcctggagaggatggtggacatgccagccaacaacaaatgcctgatcttccggaaaaactaagcccctccttcacccccgcacacctgcatccctgccggaggctctgtgaggcacgaaccctgcctccctaggccggaccttgtggacgacagccccacccagtctgtgctctcagccgctggccgaagggcccagcctgctcagaataaagcatgtcctgctgccggc

SEQ ID NO: 118406 - DNA, 558 bp, Homo sapiens
  Payload ID: 3170
  Gene Symbol: C16orf13
  Gene Name: chromosome 16 open reading frame 13
  Uniprot ID: Q96S19
  ENST ID: ENST00000397665
  CDS Start-End: 1-558
atgctggtggcggcggccgcggagcggaacaaggatcccatcttgcacgtgctgcggcagtacctggatccggcccagcgtggcgtccgcgtcctcgaggtggcctcgggctccggccagcacgcagcgcacttcgcgcgggccttccccctggccgagtggcagccgtcggacgtggaccagcgctgcctggacagcatcgcggccaccacgcaagcccagggcctgaccaacgtgaaggccccgctacacctggacgtgacgtggggctgggagcactggggcgggatcctgccacagtcgctggacctgttgctctgcatcaacatggcccatgtcagccccctgcgctgcacggaggaacccagaatgggggcttcgggacacagccctcctggaggacctgggaaaggccagtggcctgctcctggagaggatggtggacatgccagccaacaacaaatgcctgatcttccggaaaaactaagcccctccttcacccccgcacacctgcatccctgccggaggctctgtgaggcacgaaccctgcctccctag

SEQ ID NO: 118407 - DNA, 794 bp, Homo sapiens
  Payload ID: 3170
  Gene Symbol: C16orf13
  Gene Name: chromosome 16 open reading frame 13
  Uniprot ID: Q96S19
  ENST ID: ENST00000301686
  CDS Start-End: 13-627
gttgctgccgcgatgctggtggcggcggccgcggagcggaacaaggatcccatcttgcacgtgctgcggcagtacctggatccggcccagcgtggcgtccgcgtcctcgaggtggcctcgggctccggccagcacgcagcgcacttcgcgcgggccttccccctggccgagtggcagccgtcggacgtggaccagcgctgcctggacagcatcgcggccaccacgcaagcccagggcctgaccaacgtgaaggccccgctacacctggacgtgacgtggggctgggagcactggggcgggatcctgccacagtcgctggacctgttgctctgcatcaacatggcccatgtcagccccctgcgctgcacggaggggctcttcagagcagcaggacacctgctcaaacccagggccctgctcatcacctacgggccctatgccatcaatgggaagatctccccccagagcaacgtggactttgacctgatgctcagatgcaggaacccagaatgggggcttcgggacacagccctcctggaggacctgggaaaggccagtggcctgctcctggagaggatggtggacatgccagccaacaacaaatgcctgatcttccggaaaaactaagcccctccttcacccccgcacacctgcatccctgccggaggctctgtgaggcacgaaccctgcctccctaggccggaccttgtggacgacagccccacccagtctgtgctctcagccgctggccgaagggcccagcctgctcagaataaagcatgtcctgctgccgg

SEQ ID NO: 118408 - DNA, 755 bp, Homo sapiens
  Payload ID: 3170
  Gene Symbol: C16orf13
  Gene Name: chromosome 16 open reading frame 13
  ENST ID: ENST00000456420
  CDS Start-End: 1-531
ctgcggcagtacctggatccggcccagcgtggcgtccgcgtcctcgaggtggcctcgggctccggccagcacgcagcgcacttcgcgcgggccttccccctggccgagtggcagccgtcggacgtggaccagcgctgcctggacagcatcgcggccaccacgcaagcccagggcctgaccaacgtgaaggccccgctacacctggacgtgacgtggggctgggagcactggggcgggatcctgccacagtcgctggacctgttgctctgcatcaacatggcccatgtcagccccctgcgctgcacggaggggctcttcagagcagcaggacacctgctcaaacccagggccctgctcatcacctacgggggagggggtgccctttcattctccaaaccccagcctgcaagtctgtcccaggctctctgggaaataccccgaccttggtccagtgggctgtgtccccatgcccacagccctatgccatcaatgggaagatctccccccagagcaacgtggactttgacctgatgctcagatgcaggaacccagaatgggggcttcgggacacagccctcctggaggacctgggaaaggccagtggcctgctcctggagaggatggtggacatgccagccaacaacaaatgcctgatcttccggaaaaactaagcccctccttcacccccgcacacctgcatccctgccggaggctctgtgaggcacgaaccctgcctccctaggccggaccttgtg

SEQ ID NO: 118409 - DNA, 590 bp, Homo sapiens
  Payload ID: 3170
  Gene Symbol: C16orf13
  Gene Name: chromosome 16 open reading frame 13
  ENST ID: ENST00000568830
  CDS Start-End: 69-590
cggaagcccggccaccgcccccgacgcgacccgcgccgcgtccgcggcggggagttgttgctgccgcgatgctggtggcggcggccgcggagcggaacaaggatcccatcttgcacgtgctgcggcagtacctggatccggcccagcgtggcgtccgcgtcctcgaggtggcctcgggctccggccagcacgcagcgcacttcgcgcgggccttccccctggccgagtggcagccgtcggacgtggaccagcgctgcctggacagcatcgcggccaccacgcaagcccagggcctgaccaacgtgaaggccccgctacacctggacgtgacgtggggctgggagcactggggcgggatcctgccacagtcgctggacctgttgctctgcatcaacatggcccatgtcagccccctgcgctgcacggaggtctgtggggagcccagcatgggtgtctgccgtggcaccactcaccctgcatgggggcagctgggatgccagatttgcccccatcacagtcggggggctcttcagagcagcaggacacctgctcaaacccagggccctgctcatcacctacgggccctatgc

SEQ ID NO: 118410 - DNA, 499 bp, Homo sapiens
  Payload ID: 3170
  Gene Symbol: C16orf13
  Gene Name: chromosome 16 open reading frame 13
  ENST ID: ENST00000568773
  CDS Start-End: 1-488
ggcagtacctggatccggcccagcgtggcgtccgcgtcctcgaggtggcctcgggctccggccagcacgcagcgcacttcgcgcgggccttccccctggccgagtggcagccgtcggacgtggaccagcgctgcctggacagcatcgcggccaccacgcaagcccagggcctgaccaacgtgaaggccccgctacacctggacgtgacgtggggctgggagcactggggcgggatcctgccacagtcgctggacctgttgctctgcatcaacatggcccatgtcagccccctgcgctgcacggaggggctcttcagagcagcaggacacctgctcaaacccagggccctgctcatcacctacggggaacccagaatgggggcttcgggacacagccctcctggaggacctgggaaaggccagtggcctgctcctggagaggatggtaggtgggggagcgggggcccaggcaacctctctaggggttgagggccgtcctc

SEQ ID NO: 118411 - DNA, 485 bp, Homo sapiens
  Payload ID: 3170
  Gene Symbol: C16orf13
  Gene Name: chromosome 16 open reading frame 13
  ENST ID: ENST00000565163
  CDS Start-End: 1-485
aaggatcccatcttgcacgtgctgcggcagtacctggatccggcccagcgtggcgtccgcgtcctcgaggtggcctcgggctccggccagcacgcagcgcacttcgcgcgggccttccccctggccgagtggcagccgtcggacgtggaccagcgctgcctggacagcatcgcggccaccacgcaagcccagggcctgaccaacgtgaaggccccgctacacctggacgtgacgtggggctgggagcactggggcgggatcctgccacagtcgctggacctgttgctctgcatcaacatggcccatgtcagccccctgcgctgcacggaggtctgtggggagcccagcatgggtgtctgccgtggcaccactcaccctgcatgggggcagctgggatgccagatttgcccccatcacagtcggggaacccagaatgggggcttcgggacacagccctcctggaggacctgggaaaggccagtggc

SEQ ID NO: 118412 - DNA, 518 bp, Homo sapiens
  Payload ID: 3170
  Gene Symbol: C16orf13
  Gene Name: chromosome 16 open reading frame 13
  ENST ID: ENST00000564039
  CDS Start-End: 1-402
gcggccgcggagcggaacaaggatcccatcttgcacgtgctgcggcagtacctggatccggcccagcgtggcgtccgcgtcctcgaggtggcctcgggctccggccagcacgcagcgcacttcgcgcgggccttccccctggccgagtggcagccgtcggacgtggaccagcgctgcctggacaggggctcttcagagcagcaggacacctgctcaaacccagggccctgctcatcacctacgggggagggggtgccctttcattctccaaaccccagcctgcaagtctgtcccaggctctctgggaaataccccgaccttggtccagtgggctgtgtccccatgcccacagccctatgccatcaatgggaagatctccccccagagcaacgtggactttgacctgatgctcagatgcaggaacccagaatgggggcttcgggacacagccctcctggaggacctgggaaaggccagtggcctgctcctggagaggatggtggacatgccagccaaca

SEQ ID NO: 118413 - DNA, 588 bp, Homo sapiens
  Payload ID: 3170
  Gene Symbol: C16orf13
  Gene Name: chromosome 16 open reading frame 13
  ENST ID: ENST00000568077
  CDS Start-End: 42-353
gacccgcgccgcgtccgcggcggggagttgttgctgccgcgatgctggtggcggcggccgcggagcggaacaaggatcccatcttgcacgtgctgcggcagtacctggatccggcccagcgtggcgtccgcgtcctcgaggtggcctcgggctccggccagcacgcagcgcacttcgcgcgggccttccccctggccgagtggcagccgtcggacgtggaccagcgctgcctggacaggggctcttcagagcagcaggacacctgctcaaacccagggccctgctcatcacctacgggccctatgccatcaatgggaagatctccccccagagcaacgtggactttgacctgatgctcagatgcaggaacccagaatgggggcttcgggacacagccctcctggaggacctgggaaaggccagtggcctgctcctggagaggatggtggacatgccagccaacaacaaatgcctgatcttccggaaaaactaagcccctccttcacccccgcacacctgcatccctgccggaggctctgtgaggcacgaaccctgcctccctaggccggaccttgtggacgacagccc

SEQ ID NO: 118414 - DNA, 801 bp, Homo sapiens
  Payload ID: 3170
  Gene Symbol: C16orf13
  Gene Name: chromosome 16 open reading frame 13
  ENST ID: ENST00000614890
  CDS Start-End: 77-631
gtgccccgcggaagcccggccaccgcccccgacgcgacccgcgccgcgtccgcggcggggagttgttgctgccgcgatgctggtggcggcggccgcggagcggaacaaggatcccatcttgcacgtgctgcggcagtacctggatccggcccagcgtggcgtccgcgtcctcgaggtggcctcgggctccggccagcacgcagcgcacttcgcgcgggccttccccctggccgagtggcagccgtcggacgtggaccagcgctgcctggacagcatcgcggccaccacgcaagcccagggcctgaccaacgtgaaggccccgctacacctggacgtgacgtggggctgggagcactggggcgggatcctgccacagtcgctggacctgttgctctgcatcaacatggcccatgtcagccccctgcgctgcacggagccctatgccatcaatgggaagatctccccccagagcaacgtggactttgacctgatgctcagatgcaggaacccagaatgggggcttcgggacacagccctcctggaggacctgggaaaggccagtggcctgctcctggagaggatggtggacatgccagccaacaacaaatgcctgatcttccggaaaaactaagcccctccttcacccccgcacacctgcatccctgccggaggctctgtgaggcacgaaccctgcctccctaggccggaccttgtggacgacagccccacccagtctgtgctctcagccgctggccgaagggcccagcctgctcagaataaagcatgtcctgctgccggctt

SEQ ID NO: 118415 - DNA, 2404 bp, Homo sapiens
  Payload ID: 3171
  Gene Symbol: C16orf45
  Gene Name: chromosome 16 open reading frame 45
  Uniprot ID: Q96MC5
  ENST ID: ENST00000300006
  CDS Start-End: 360-974
atgccaagcatcactaggggctctagaataggcaggggccttgttctcacttcctttgtgttgcttttattttagttgttttgtttgttgtttttcttagagttatcacctgcccctctgtctccctacccagcccccaagcctcccctccaagcctccactgcgcatgtgccgtgcatccctgccccttctgggtacccgtaggcgctcccgggcgctggcggcggcggaggagagggagcagcgtcacgggcgcccggcccgttaaaacgctgctggctggagccacctccctccctgcagcccgcaacgggaatggagtaaagggagacccgtcgacctggccacggggatcagcgatggaattaaagcaatctttgtccacccatctggaagccgagaagcctctgaggcgctatggggcggtggaggagacggcttggaaaacggagagactggggagaaatcagctggacatcatctccatggcggagacaaccatgatgccagaggagattgagctggagatggcaaaaattcagcgtctccgggaagtcttggtccgccgggagtctgagctcaggttcatgatggatgacatccagctctgcaaggacatcatggacttgaagcaggagctgcagaacttggtcgccatcccagaaaaagaaaaaaccaaactgcagaagcagagagaggatgagctaatccagaagatccacaaactggtgcagaagagagacttcctggtggacgatgcggaggtcgagcggttaagggagcaagaagaagacaaggaaatggctgatttcctgagaatcaagttaaaacctctagacaaagtaaccaaatctccagccagctcccgggcagagaagaaagcagagcccccacctagcaagcccacggtggccaagacggggctggcactgatcaaggattgttgcggggccacccagtgcaacatcatgtagcccccacgtggggtgccctgggccatggggacccccccccaccctcttgtctttatagcccccatttcaccggggcccaagagctctccaaggcagaaggggttgaaggcaagcccgtgactgtcaccagaggccatgggcacggcaggcgggcctggccaccctgtacagagtgtagcagtagggagtctctcaccgtcgcatggtcctccccagagcatgccgaacccaggagtctgtctcactgtttatccaaacaccaggaaaggtcctccctcaaaaaagcatatctccacttctctctagctgtatctaacccaccgtgtgaatgaactgggagaggggcatgctccccagctgtgtgtagtcgtgacttctcaacaatctagcaccatgtcggacacgttccccatccaccctcctagctctgctctcagagctaggcacatgggcacaggtcccctcccgtctgtcctctcccagcaactgtgccctggagggctccacatggcccccgtgtctctcgggcaccacccatatagcagtcccagagggcccatctgtaaagatcgagcttgtgtgtggtgtcgtggtcacatctcccgcttccccccatcctgtgtctgggcacagttcacatcaggacagcgtccattgtgctctcagtctgcctcaggtgtgtgcctggagggggcctggactggcatggatccagtgtgcagaagagccagcagggaaccggaagctctgatgtcaaggccagagcagttgagaatgggacccagagtagatgctgacctgggcactccaccattccggggccaccacagagatgccagcaggatgccactttgccagcccgacacacggacctttgtaaagaacagcaacaggcaggagaggcagcgtgtgaccagattgtgtcccgtcattgggtggcatatgttaactagctgccaaacaacttcaacccgtgtaattcatgtacatttgcaacagccagcccggtacagcctgtgtgacttctctgtatgtgtgtgtgtgtcgtgaccagcctaagtagttagcataactcaagatgctgatgtgcagtcacccatcagagaaaataaaaatggaaaccacgttcacagcattttaaaagtttttactttttttcttgattatggaagtaatccatgtacatagtaaatcattttaaaagtacaaaaagtatgaagaagtttgtcttaaaaaaaaaaaaaattattcctccaactagagaccactctgatgtttcgacgttttaaaaaagtctttttttgtgcattttttcatcgttgacatcatattgtggtatcatttataaccagttttttcctacttattataccaccatcttccacatcattaaaagctctttgtaaacattaaacactcttcataaatca

SEQ ID NO: 118416 - DNA, 1865 bp, Homo sapiens
  Payload ID: 3171
  Gene Symbol: C16orf45
  Gene Name: chromosome 16 open reading frame 45
  Uniprot ID: Q96MC5
  ENST ID: ENST00000452191
  CDS Start-End: 57-620
taacaatcatagccaggatgtgaagcctgtcagtttcctcagccgcaaattcttccatgtggggcgacctcacagagacgggatgtatgggacggcggagtgcaaagaaagatcagctggacatcatctccatggcggagacaaccatgatgccagaggagattgagctggagatggcaaaaattcagcgtctccgggaagtcttggtccgccgggagtctgagctcaggttcatgatggatgacatccagctctgcaaggacatcatggacttgaagcaggagctgcagaacttggtcgccatcccagaaaaagaaaaaaccaaactgcagaagcagagagaggatgagctaatccagaagatccacaaactggtgcagaagagagacttcctggtggacgatgcggaggtcgagcggttaagggagcaagaagaagacaaggaaatggctgatttcctgagaatcaagttaaaacctctagacaaagtaaccaaatctccagccagctcccgggcagagaagaaagcagagcccccacctagcaagcccacggtggccaagacggggctggcactgatcaaggattgttgcggggccacccagtgcaacatcatgtagcccccacgtggggtgccctgggccatggggacccccccccaccctcttgtctttatagcccccatttcaccggggcccaagagctctccaaggcagaaggggttgaaggcaagcccgtgactgtcaccagaggccatgggcacggcaggcgggcctggccaccctgtacagagtgtagcagtagggagtctctcaccgtcgcatggtcctccccagagcatgccgaacccaggagtctgtctcactgtttatccaaacaccaggaaaggtcctccctcaaaaaagcatatctccacttctctctagctgtatctaacccaccgtgtgaatgaactgggagaggggcatgctccccagctgtgtgtagtcgtgacttctcaacaatctagcaccatgtcggacacgttccccatccaccctcctagctctgctctcagagctaggcacatgggcacaggtcccctcccgtctgtcctctcccagcaactgtgccctggagggctccacatggcccccgtgtctctcgggcaccacccatatagcagtcccagagggcccatctgtaaagatcgagcttgtgtgtggtgtcgtggtcacatctcccgcttccccccatcctgtgtctgggcacagttcacatcaggacagcgtccattgtgctctcagtctgcctcaggtgtgtgcctggagggggcctggactggcatggatccagtgtgcagaagagccagcagggaaccggaagctctgatgtcaaggccagagcagttgagaatgggacccagagtagatgctgacctgggcactccaccattccggggccaccacagagatgccagcaggatgccactttgccagcccgacacacggacctttgtaaagaacagcaacaggcaggagaggcagcgtgtgaccagattgtgtcccgtcattgggtggcatatgttaactagctgccaaacaacttcaacccgtgtaattcatgtacatttgcaacagccagcccggtacagcctgtgtgacttctctgtatgtgtgtgtgtgtcgtgaccagcctaagtagttagcataactcaagatgctgatgtgcagtcacccatcagagaaaataaaaatggaaaccacgttcacagcattttaaaagtttttactttttttcttgattatggaagtaatccatgtacatagtaaatcattttaaaagtacaaaaagtatgaagaagtttgtcttaaaaaaaaaaaaaa

SEQ ID NO: 118417 - DNA, 737 bp, Homo sapiens
  Payload ID: 3171
  Gene Symbol: C16orf45
  Gene Name: chromosome 16 open reading frame 45
  ENST ID: ENST00000561813
  CDS Start-End: 87-353
tgctggctggagccacctccctccctgcagcccgcaacgggaatggagtaaagggagacccgtcgacctggccacggggatcagcgatggaattaaagcaatctttgtccacccatctggaagccgagaagcctctgaggcgctatggggcggtggaggagacggcttggaaaacggagagactggggagaaatcagctggacatcatctccatggcggagacaaccatgatgccagaggagattgagctggagatggcaaaaattcagcgtctccgggaagtcttggtccgccgggagtctgagctcaggttcatgctgtgcaatcttgcacaaatatcttaccttctctgagcctcggtggcctcatctgttaaatagccatgcatccagtatctcgcagggtggtcatgaggagtaaaagagatcaagcatattaagtgctcagtccagtgcctgctaccacgatggatgacatccagctctgcaaggacatcatggacttgaagcaggagctgcagaacttggtcgccatcccagaaaaagaaaaaaccaaactgcagaagcagagagaggatgagctaatccagaagatccacaaactggtgcagaagagagacttcctggtggacgatgcggaggtcgagcggttaagggagcaagaagaagacaaggaaatggctgatttcctgagaatcaagttaaaacctctagacaaagtaaccaaatctccagcca

SEQ ID NO: 118418 - DNA, 497 bp, Homo sapiens
  Payload ID: 3171
  Gene Symbol: C16orf45
  Gene Name: chromosome 16 open reading frame 45
  ENST ID: ENST00000565857
  CDS Start-End: 1-346
gatggatgacatccagctctgcaaggacatcatggacttgaagcaggagctgcagaacttggtcgccatcccagaaaaagaaaaaaccaaactgcagaagcagagagaggatgagctaatccagaagatccacaaactggtgcagaagagagacttcctggtggacgatgcggaggtcgagcggttaagggagcaagaagaagacaaggaaatggctgatttcctgagaatcaagttaaaacctctagacaaagtaaccaaatctccagccaatgaggaagtagcagtaaatccattacccttttcaagcggaggttgcaagaggttgcaagcggaggcagaataaacacttgaaacagagaactggtaacacttcgggcactgaggttctcctttctaacagaaggggaaaattgaaggcaaaaggtcatatgtcttccttcacattcaagaagcagctatgagaaagagtagtttcacatacttctgactggttt

SEQ ID NO: 118419 - DNA, 865 bp, Homo sapiens
  Payload ID: 3171
  Gene Symbol: C16orf45
  Gene Name: chromosome 16 open reading frame 45
  ENST ID: ENST00000564389
  CDS Start-End: 1-527
atcagctggacatcatctccatggcggagacaaccatgatgccagaggagattgagctggagatggcaaaaattcagcgtctccgggaagtcttggtccgccgggagtctgagctcaggttcatgatggatgacatccagctctgcaaggacatcatggacttgaagcaggagctgcagaacttggtcgccatcccagaaaaagaaaaaaccaaactgcagaagcagagagaggatgagctaatccagaagatccacaaactggtgcagaagagagacttcctggtggacgatgcggaggtcgagcggttaagggagcaagaagaagacaaggaaatggctgatttcctgagaatcaagttaaaacctctagacaaagtaaccaaatctccagccatctgcctcaggtgtgtgcctggagggggcctggactggcatggatccagtgtgcagaagagccagcagggaaccggaagctctgatgtcaaggccagagcagttgagaatgggacccagagtagatgctgacctgggcactccaccattccggggccaccacagagatgccagcaggatgccactttgccagcccgacacacggacctttgtaaagaacagcaacaggcaggagaggcagcgtgtgaccagattgtgtcccgtcattgggtggcatatgttaactagctgccaaacaacttcaacccgtgtaattcatgtacatttgcaacagccagcccggtacagcctgtgtgacttctctgtatgtgtgtgtgtgtcgtgaccagcctaagtagttagcataactcaagatgctgatgtgcagtcacccatcagagaaaataaaaatggaaaccacgttcacagca

SEQ ID NO: 118420 - DNA, 622 bp, Homo sapiens
  Payload ID: 3171
  Gene Symbol: C16orf45
  Gene Name: chromosome 16 open reading frame 45
  ENST ID: ENST00000570249
  CDS Start-End: 119-229
cagcgtcacgggcgcccggcccgttaaaacgctgctggctggagccacctccctccctgcagcccgcaacgggaatggagtaaagggagacccgtcgacctggccacggggatcagcgatggaattaaagcaatctttgtccacccatctggaagccgagaagcctctgaggcgctatggggcggtggaggagacggcttggaaaacggagagactggggagaagctagagtgcagtggcgtgatcacggctcacttcaacctccacctcctgggttcaagcgattgtcctgcctcagcctcctgagtagccggaattacagatcagctggacatcatctccatggcggagacaaccatgatgccagaggagattgagctggagatggcaaaaattcagcgtctccgggaagtcttggtccgccgggagtctgagctcaggttcatgatggatgacatccagctctgcaaggacatcatggacttgaagcaggagctgcagaacttggtcgccatcccagaaaaagaaaaaaccaaactgcagaagcagagagaggatgagctaatccagaagatccacaaactggtgcagaagagagacttcctggtggacgatgcggagg

SEQ ID NO: 118421 - DNA, 534 bp, Homo sapiens
  Payload ID: 3171
  Gene Symbol: C16orf45
  Gene Name: chromosome 16 open reading frame 45
  ENST ID: ENST00000561692
  CDS Start-End: 1-405
atgccagaggagattgagctggagatggcaaaaattcagcgtctccgggaagtcttggtccgccgggagtctgagctcaggttcatgatggatgacatccagctctgcaaggacatcatggacttgaagcaggagctgcagaacttggtcgccatcccagaaaaagaaaaaaccaaactgcagaagcagagagaggatgagctaatccagaagatccacaaactggtgcagaagagagacttcctggtggacgatgcggaggtcgagcggttaagggagcaagaagaagacaaggaaatggctgatttcctgagaatcaagttaaaacctctagacaaagtaaccaaatctccagccagtctggaatctctggagaagccagaagcatatgtctcagaatattaacctcatcagatcctcagagcaaagagggttttatatgaaataagtttgagaaatgctgtttacttgaccctgtatttggagagtcccagtgtccattaggatattaaagtgatgatggatcctgctgtc

SEQ ID NO: 118422 - DNA, 1854 bp, Homo sapiens
  Payload ID: 3171
  Gene Symbol: C16orf45
  Gene Name: chromosome 16 open reading frame 45
  ENST ID: ENST00000566490
  CDS Start-End: 180-635
cctgccccttctgggtacccgtaggcgctcccgggcgctggcggcggcggaggagagggagcagcgtcacgggcgcccggcccgttaaaacgctgctggctggagccacctccctccctgcagcccgcaacgggaatggagtaaagggagacccgtcgacctggccacggggatcagcgatggaattaaagcaatctttgtccacccatctggaagccgagaagcctctgaggcgctatggggcggtggaggagacggcttggaaaacggagagactggggagaaatcagctggacatcatctccatggcggagacaaccatgatgccagaggagattgagctggagatggcaaaaattcagcgtctccgggaagtcttggtccgccgggagtctgagctcaggttcatgatggatgacatccagctctgcaaggacatcatggacttgaagcaggagctgcagaacttggtcgccatcccagaaaaagaaaaaaccaaactgcagaagcagagagaggatgagctaatccagaagatccacaaactggtgcagaagagagacttcctggtggacgatgcggaggtcgagcggttaaggctcccgggcagagaagaaagcagagcccccacctagcaagcccacggtggccaagacggggctggcactgatcaaggattgttgcggggccacccagtgcaacatcatgtagcccccacgtggggtgccctgggccatggggacccccccccaccctcttgtctttatagcccccatttcaccggggcccaagagctctccaaggcagaaggggttgaaggcaagcccgtgactgtcaccagaggccatgggcacggcaggcgggcctggccaccctgtacagagtgtagcagtagggagtctctcaccgtcgcatggtcctccccagagcatgccgaacccaggagtctgtctcactgtttatccaaacaccaggaaaggtcctccctcaaaaaagcatatctccacttctctctagctgtatctaacccaccgtgtgaatgaactgggagaggggcatgctccccagctgtgtgtagtcgtgacttctcaacaatctagcaccatgtcggacacgttccccatccaccctcctagctctgctctcagagctaggcacatgggcacaggtcccctcccgtctgtcctctcccagcaactgtgccctggagggctccacatggcccccgtgtctctcgggcaccacccatatagcagtcccagagggcccatctgtaaagatcgagcttgtgtgtggtgtcgtggtcacatctcccgcttccccccatcctgtgtctgggcacagttcacatcaggacagcgtccattgtgctctcagtctgcctcaggtgtgtgcctggagggggcctggactggcatggatccagtgtgcagaagagccagcagggaaccggaagctctgatgtcaaggccagagcagttgagaatgggacccagagtagatgctgacctgggcactccaccattccggggccaccacagagatgccagcaggatgccactttgccagcccgacacacggacctttgtaaagaacagcaacaggcaggagaggcagcgtgtgaccagattgtgtcccgtcattgggtggcatatgttaactagctgccaaacaacttcaacccgtgtaattcatgtacatttgcaacagccagcccggtacagcctgtgtgacttctctgtatgtgtgtgtgtgtcgtgaccagcctaagtagttagcataactcaagatgctgatgtgcagtcacccatcagagaaaataaaaatggaaaccacgttcacagcattttaaaa

SEQ ID NO: 118423 - DNA, 1866 bp, Homo sapiens
  Payload ID: 3171
  Gene Symbol: C16orf45
  Gene Name: chromosome 16 open reading frame 45
  Uniprot ID: Q96MC5
  ENST ID: ENST00000610499
  CDS Start-End: 57-620
taacaatcatagccaggatctgaagcctgtcagtttcctcagccgcaaattcttccatgtggggcgacctcacagagacgggatgtatgggacggcggagtgcaaagaaagatcagctggacatcatctccatggcggagacaaccatgatgccagaggagattgagctggagatggcaaaaattcagcgtctccgggaagtcttggtccgccgggagtctgagctcaggttcatgatggatgacatccagctctgcaaggacatcatggacttgaagcaggagctgcagaacttggtcgccatcccagaaaaagaaaaaaccaaactgcagaagcagagagaggatgagctaatccagaagatccacaaactggtgcagaagagagacttcctggtggacgatgcggaggtcgagcggttaagggagcaagaagaagacaaggaaatggctgatttcctgagaatcaagttaaaacctctagacaaagtaaccaaatctccagccagctcccgggcagagaagaaagcagagcccccacctagcaagcccacggtggccaagacggggctggcactgatcaaggattgttgcggggccacccagtgcaacatcatgtagcccccacgtggggtgccctgggccatggggaccccccccccaccctcttgtctttatagcccccatttcaccggggcccaagagctctccaaggcagaaggggttgaaggcaagcccgtgactgtcaccagaggccatgggcacggcaggcgggcctggccaccctgtacagagtgtagcagtagggagtctctcaccgtcgcatggtcctccccagagcatgccgaacccaggagtctgtctcactgtttatccaaacaccaggaaaggtcctccctcaaaaaagcatatctccacttctctctagctgtatctaacccaccgtgtgaatgaactgggagaggggcatgctccccagctgtgtgtagtcgtgacttctcaacaatctagcaccatgtcggacacgttccccatccaccctcctagctctgctctcagagctaggcacatgggcacaggtcccctcccgtctgtcctctcccagcaactgtgccctggagggctccacatggcccccgtgtctctcgggcaccacccatatagcagtcccagagggcccatctgtaaagatcgagcttgtgtgtggtgtcgtggtcacatctcccgcttccccccatcctgtgtctgggcacagttcacatcaggacagcgtccattgtgctctcagtctgcctcaggtgtgtgcctggagggggcctggactggcatggatccagtgtgcagaagagccagcagggaaccggaagctctgatgtcaaggccagagcagttgagaatgggacccagagtagatgctgacctgggcactccaccattccggggccaccacagagatgccagcaggatgccactttgccagcccgacacacggacctttgtaaagaacagcaacaggcaggagaggcagcgtgtgaccagattgtgtcccgtcattgggtggcatatgttaactagctgccaaacaacttcaacccgtgtaattcatgtacatttgcaacagccagcccggtacagcctgtgtgacttctctgtatgtgtgtgtgtgtcgtgaccagcctaagtagttagcataactcaagatgctgatgtgcagtcacccatcagagaaaataaaaatggaaaccacgttcacagcattttaaaagtttttactttttttcttgattatggaagtaatccatgtacatagtaaatcattttaaaagtacaaaaagtatgaagaagtttgtcttaaaaaaaaaaaaaa

SEQ ID NO: 118424 - DNA, 2405 bp, Homo sapiens
  Payload ID: 3171
  Gene Symbol: C16orf45
  Gene Name: chromosome 16 open reading frame 45
  Uniprot ID: Q96MC5
  ENST ID: ENST00000615273
  CDS Start-End: 360-974
atgccaagcatcactaggggctctagaataggcaggggccttgttctcacttcctttgtgttgcttttattttagttgttttgtttgttgtttttcttagagttatcacctgcccctctgtctccctacccagcccccaagcctcccctccaagcctccactgcgcatgtgccgtgcatccctgccccttctgggtacccgtaggcgctcccgggcgctggcggcggcggaggagagggagcagcgtcacgggcgcccggcccgttaaaacgctgctggctggagccacctccctccctgcagcccgcaacgggaatggagtaaagggagacccgtcgacctggccacggggatcagcgatggaattaaagcaatctttgtccacccatctggaagccgagaagcctctgaggcgctatggggcggtggaggagacggcttggaaaacggagagactggggagaaatcagctggacatcatctccatggcggagacaaccatgatgccagaggagattgagctggagatggcaaaaattcagcgtctccgggaagtcttggtccgccgggagtctgagctcaggttcatgatggatgacatccagctctgcaaggacatcatggacttgaagcaggagctgcagaacttggtcgccatcccagaaaaagaaaaaaccaaactgcagaagcagagagaggatgagctaatccagaagatccacaaactggtgcagaagagagacttcctggtggacgatgcggaggtcgagcggttaagggagcaagaagaagacaaggaaatggctgatttcctgagaatcaagttaaaacctctagacaaagtaaccaaatctccagccagctcccgggcagagaagaaagcagagcccccacctagcaagcccacggtggccaagacggggctggcactgatcaaggattgttgcggggccacccagtgcaacatcatgtagcccccacgtggggtgccctgggccatggggaccccccccccaccctcttgtctttatagcccccatttcaccggggcccaagagctctccaaggcagaaggggttgaaggcaagcccgtgactgtcaccagaggccatgggcacggcaggcgggcctggccaccctgtacagagtgtagcagtagggagtctctcaccgtcgcatggtcctccccagagcatgccgaacccaggagtctgtctcactgtttatccaaacaccaggaaaggtcctccctcaaaaaagcatatctccacttctctctagctgtatctaacccaccgtgtgaatgaactgggagaggggcatgctccccagctgtgtgtagtcgtgacttctcaacaatctagcaccatgtcggacacgttccccatccaccctcctagctctgctctcagagctaggcacatgggcacaggtcccctcccgtctgtcctctcccagcaactgtgccctggagggctccacatggcccccgtgtctctcgggcaccacccatatagcagtcccagagggcccatctgtaaagatcgagcttgtgtgtggtgtcgtggtcacatctcccgcttccccccatcctgtgtctgggcacagttcacatcaggacagcgtccattgtgctctcagtctgcctcaggtgtgtgcctggagggggcctggactggcatggatccagtgtgcagaagagccagcagggaaccggaagctctgatgtcaaggccagagcagttgagaatgggacccagagtagatgctgacctgggcactccaccattccggggccaccacagagatgccagcaggatgccactttgccagcccgacacacggacctttgtaaagaacagcaacaggcaggagaggcagcgtgtgaccagattgtgtcccgtcattgggtggcatatgttaactagctgccaaacaacttcaacccgtgtaattcatgtacatttgcaacagccagcccggtacagcctgtgtgacttctctgtatgtgtgtgtgtgtcgtgaccagcctaagtagttagcataactcaagatgctgatgtgcagtcacccatcagagaaaataaaaatggaaaccacgttcacagcattttaaaagtttttactttttttcttgattatggaagtaatccatgtacatagtaaatcattttaaaagtacaaaaagtatgaagaagtttgtcttaaaaaaaaaaaaaattattcctccaactagagaccactctgatgtttcgacgttttaaaaaagtctttttttgtgcattttttcatcgttgacatcatattgtggtatcatttataaccagttttttcctacttattataccaccatcttccacatcattaaaagctctttgtaaacattaaacactcttcataaatca

SEQ ID NO: 118425 - DNA, 865 bp, Homo sapiens; identical to SEQ ID NO: 118419
  Payload ID: 3171
  Gene Symbol: C16orf45
  Gene Name: chromosome 16 open reading frame 45
  ENST ID: ENST00000631695
  CDS Start-End: 1-527

SEQ ID NO: 118426 - DNA, 737 bp, Homo sapiens; identical to SEQ ID NO: 118417
  Payload ID: 3171
  Gene Symbol: C16orf45
  Gene Name: chromosome 16 open reading frame 45
  ENST ID: ENST00000633657
  CDS Start-End: 87-353

SEQ ID NO: 118427 - DNA, 497 bp, Homo sapiens; identical to SEQ ID NO: 118418
  Payload ID: 3171
  Gene Symbol: C16orf45
  Gene Name: chromosome 16 open reading frame 45
  ENST ID: ENST00000633982
  CDS Start-End: 1-346

SEQ ID NO: 118428 - DNA, 534 bp, Homo sapiens; identical to SEQ ID NO: 118421
  Payload ID: 3171
  Gene Symbol: C16orf45
  Gene Name: chromosome 16 open reading frame 45
  ENST ID: ENST00000632906
  CDS Start-End: 1-405

SEQ ID NO: 118429 - DNA, 1855 bp, Homo sapiens
  Payload ID: 3171
  Gene Symbol: C16orf45
  Gene Name: chromosome 16 open reading frame 45
  ENST ID: ENST00000631883
  CDS Start-End: 180-635
cctgccccttctgggtacccgtaggcgctcccgggcgctggcggcggcggaggagagggagcagcgtcacgggcgcccggcccgttaaaacgctgctggctggagccacctccctccctgcagcccgcaacgggaatggagtaaagggagacccgtcgacctggccacggggatcagcgatggaattaaagcaatctttgtccacccatctggaagccgagaagcctctgaggcgctatggggcggtggaggagacggcttggaaaacggagagactggggagaaatcagctggacatcatctccatggcggagacaaccatgatgccagaggagattgagctggagatggcaaaaattcagcgtctccgggaagtcttggtccgccgggagtctgagctcaggttcatgatggatgacatccagctctgcaaggacatcatggacttgaagcaggagctgcagaacttggtcgccatcccagaaaaagaaaaaaccaaactgcagaagcagagagaggatgagctaatccagaagatccacaaactggtgcagaagagagacttcctggtggacgatgcggaggtcgagcggttaaggctcccgggcagagaagaaagcagagcccccacctagcaagcccacggtggccaagacggggctggcactgatcaaggattgttgcggggccacccagtgcaacatcatgtagcccccacgtggggtgccctgggccatggggaccccccccccaccctcttgtctttatagcccccatttcaccggggcccaagagctctccaaggcagaaggggttgaaggcaagcccgtgactgtcaccagaggccatgggcacggcaggcgggcctggccaccctgtacagagtgtagcagtagggagtctctcaccgtcgcatggtcctccccagagcatgccgaacccaggagtctgtctcactgtttatccaaacaccaggaaaggtcctccctcaaaaaagcatatctccacttctctctagctgtatctaacccaccgtgtgaatgaactgggagaggggcatgctccccagctgtgtgtagtcgtgacttctcaacaatctagcaccatgtcggacacgttccccatccaccctcctagctctgctctcagagctaggcacatgggcacaggtcccctcccgtctgtcctctcccagcaactgtgccctggagggctccacatggcccccgtgtctctcgggcaccacccatatagcagtcccagagggcccatctgtaaagatcgagcttgtgtgtggtgtcgtggtcacatctcccgcttccccccatcctgtgtctgggcacagttcacatcaggacagcgtccattgtgctctcagtctgcctcaggtgtgtgcctggagggggcctggactggcatggatccagtgtgcagaagagccagcagggaaccggaagctctgatgtcaaggccagagcagttgagaatgggacccagagtagatgctgacctgggcactccaccattccggggccaccacagagatgccagcaggatgccactttgccagcccgacacacggacctttgtaaagaacagcaacaggcaggagaggcagcgtgtgaccagattgtgtcccgtcattgggtggcatatgttaactagctgccaaacaacttcaacccgtgtaattcatgtacatttgcaacagccagcccggtacagcctgtgtgacttctctgtatgtgtgtgtgtgtcgtgaccagcctaagtagttagcataactcaagatgctgatgtgcagtcacccatcagagaaaataaaaatggaaaccacgttcacagcattttaaaa

SEQ ID NO: 118430 - DNA, 1605 bp, Homo sapiens
  Payload ID: 3172
  Gene Symbol: C16orf46
  Gene Name: chromosome 16 open reading frame 46
  Uniprot ID: Q6P387
  ENST ID: ENST00000299578
  CDS Start-End: 237-1424
agcgtggtcgtaacccaaggcaacggcccatccggcagcgacctgagtagctcttgccagtaggccgggactagctgtctcggggccttccatccgcttggccccacaggaaaagaccccaatattctcttttagtagcggagcgtgttgatcctgcctgaagtacaccagtgttccgaaggtgcatctggtgatctgcaagaagatgttaaaaactttaagcaagcatcacagtaatggatctctgtcagaaaaatgagactgacttagaaaatgctgaaaataatgaaattcagttcacagaagaaacagaaccaacctatacttgtccagatggaaaaagtgaaaaaaatcatgtttattgtcttctcgatgtcagtgacattacgcttgaacaagatgaaaaagccaaagagtttattattggaactggatgggaagaggcagtccaagggtggggaaggacttctccagctgcctgcatctggccgaggaagataccaaaaaaggcgagggtaggggaaggtgcctgcagcgactgcttggtgtgtgttaacctctcccactggagcctccagaccaagcctcctactgaggggggcccagagaaggatcagagcagcccctcccagactcaggcagccccccagggccccagcactgcttccagggcaattagcgacatctgctttcccacctactttcgagcagagaaaaaaagtctgcaaatcaaggagtttatttggtgcaacaaagactgggccatccccggcactaataggggcaaggcctctgggaatcccagtggaggggcccacagagggctgtccatcccaggccccctgacttccagggccctcctagttctgcctcccctgaaggcttcactttcaaatgctttggatgttctgggtaagaagagtaagaactctttcttgcagtcagaagagaaggtgctggatgtggaaaaggatgggtgtgtggcttatgcatatggcttgaaaacagcagatgggaaaggtgaaaaaagagccagtgagctggccaaacaccctatggtcaacgacacgccatcctccccttccccagcggcccagatatccctgctgaccgatccggagcagcgctgcctgcattggtccctcctgtctgagaaaaacctggcgtgccctccagaccccagcaacgttcgctaccttgctgccttgcagcttctgcagaaacggggagtgcaaagctacaaatccaaattcaaagccaaggagccaagatctcctgtgatcacccgaaagcatgttctcccaaaggccaagcaggaaaacaggccccaaatgctggagaccaaagttttcccaagacctgtcttgccgtctctcacagtgagcagagttatcattcctgtctctacccacaggatcctctgagcggttgcggtagaacccctgggaataagcaccgtttgagatgcagccatcctttctctttcttctctctcatttcccacccaccccccactctctctttctctcctccccgtcagtctgtctttactcttcttttcctccattttttttttgtagtacaactgaagaaaactgaacctca

SEQ ID NO: 118431 - DNA, 1857 bp, Homo sapiens
  Payload ID: 3172
  Gene Symbol: C16orf46
  Gene Name: chromosome 16 open reading frame 46
  Uniprot ID: Q6P387
  ENST ID: ENST00000378611
  CDS Start-End: 117-1283
ccggcagcgacctgagtagctcttgccagtaggccgggactagctgtctcggggccttccatccgcttggccccacagcaagaagatgttaaaaactttaagcaagcatcacagtaatggatctctgtcagaaaaatgagactgacttagaaaatgctgaaaataatgaaattcagttcacagaagaaacagaaccaacctatacttgtccagatggaaaaagtgaaaaaaatcatgtttattgtcttctcgatgtcagtgacattacgcttgaacaagatgaaaaagccaaagagtttattattggaactggatgggaagaggcagtccaagggtggggaaggacttctccagctgcctgcatctggccgaggaagataccaaaaaaggcgagggtaggggaaggtgcctgcagcgactgcttggtgtgtgttaacctctcccactggagcctccagaccaagcctcctactgaggggggcccagagaaggatcagagcagcccctcccagactcaggcagccccccagggccccagcactgcttccagggcaattagcgacatctgctttcccacctactttcgagcagagaaaaaaagtctgcaaatcaaggagtttatttggtgcaacaaagactgggccatccccggcactaataggggcaaggcctctgggaatcccagtggaggggcccacagagggctgtccatcccaggccccctgacttccagggccctcctagttctgcctcccctgaaggcttcactttcaaatgctttggatgttctgggtaagaagagtaagaactctttcttgcagtcagaagagaaggtgctggatgtggaaaaggatgggtgtgtggcttatgcatatggcttgaaaacagcagatgggaaaggtgaaaaaagagccagtgagctggccaaacaccctatggtcaacgacacgccatcctccccttccccagcggcccagatatccctgctgaccgatccggagcagcgctgcctgcattggtccctcctgtctgagaaaaacctggcgtgccctccagaccccagcaacgttcgctaccttgctgccttgcagcttctgcagaaacggggagtgcaaagctacaaatccaaattcaaagccaaggagccaagatctcctgtgatcacccgaaagcatgttctcccaaaggccaagcaggaaaacaggccccaaatgctggagaccaaagttttcccaagacctgtcttgccgtctctcacacacaggaaaaagaagataaagtaggagagggatcagtttcacattcagtcctaagcagcaacacggttgagatgtaatcataaaagcaaatatttcacccaggacatggaaaagcggcggatcaccagaaagcagagagtcaaacgctgcaagcagaagcagtaagaagacgccacgtttggagcaaggtcttatttacacctgccatggtcatcggctcgctcttttaggtctccccaacccggcccccaaaaagaggttatatgcagaggtaatataatatatgtacttttgaaaataacaaagtcaccgtggagataatttcaaaacaatttattttcattttcagatacattggactatttcactgatgttaaaaagagtatgacttgtttaaattttttgttgtttcttttttgcagcctaatgttctgtaatagtaacttgcttccaagtaaagtatgaaaagttagtggaggggccatggctgtggtctctgataggtcaaactatactattttggaatgcgtggagttagaacaaagtttttattttgttattaattagtaaagcaataaataaaattgtcttactaata

SEQ ID NO: 118432 - DNA, 479 bp, Homo sapiens
  Payload ID: 3172
  Gene Symbol: C16orf46
  Gene Name: chromosome 16 open reading frame 46
  ENST ID: ENST00000565253
  CDS Start-End: 278-479
gcgacagagcgagagtccctgcctcgttcgaaaggaagcgagagggagcgaaaggcagaggcactatgtgccggggcttccccagagcgggcggggtctggggaggggcggggcctgaggaggatccgttgggagcggaaccctttaagggaaaagaccccaatattctcttttagtagcggagcgtgttgatcctgcctgaagtacaccagtgttccgaaggtgcatctggtgatctgcaagaagatgttaaaaactttaagcaagcatcacagtaatggatctctgtcagaaaaatgagactgacttagaaaatgctgaaaataatgaaattcagttcacagaagaaacagaaccaacctatacttgtccagatggaaaaagtgaaaaaaatcatgtttattgtcttctcgatgtcagtgacattacgcttgaacaagatgaaaaagccaaagagtttattattggaactggatggg

SEQ ID NO: 118433 - DNA, 1359 bp, Homo sapiens
  Payload ID: 3173
  Gene Symbol: C16orf52
  Gene Name: chromosome 16 open reading frame 52
  Uniprot ID: Q8NHV5
  ENST ID: ENST00000331057
  CDS Start-End: 94-210
gggactccgggccccggcggcggcccatggggcgggaggcgtgaggccgctgcctgtccggggctcggggggtggggggagcggggcggggagatggataaactgaccatcatctcaggatgtctctttctggccgccgatatcttcgccatcgccagcatcgccaacccggactggatcaacaccggggagtctgcggtctcaccttaatccagctcagttctgtgtacaaaccatggaggttattcattcaggtgaaataaatgggttacttctgccagattaatctgggaagaaacagagcactcactgtgggcctcgtgcgacagtgtcaaacaatccatggacgagaccggacgtgcatccctccccggcttcccccggagtgggtcaccacactgttttttatcatcatgggaatcatttcattgactgtcacatgtggtttgctggtggcttcccactggcgaagagaagctacaaaatatgctcgatggatagcattcactggaaagtgtgtgcattcttctcatacctaagaatatcactgtaaaatctgctgaaaactatttttaggttttatttgcacaagactgaattagtttgacatttttggaagctcctattgaacatacccaaacatctgtaaacatgaaaaatcttcaatttattaaaagcaaacatttcagtatgattctttccaaagtttgctgctgattcttccttgtgtggccttttgaggagcctcctggggaattggaggattaagacatgccactatgagaagattataggaaaaacaccaagactagaggactctgggttccttttatgcaaagtcaactcttctgggtcacagttacccagcaacaaaaataaagaatttccccatggactccagatcctttactactgaactcacagggctgtaacactgttactgtacagagaggaccaggacgatgccagcaccccgtttatcctgagtgaactctccggaggcctcttcaagcttgtgggttctctgctgtcttgaagccatccatccatttgataggttttgcaaagacttggtcctgccaagatggttttaatcatttctgctaaaaggaatggactcgaggatttgatctcattttagatgcagttgtcctcacttggccattttacagcactttagtaaatatggccagtgtatttggtcactattaaatcaatccccattcattatctgtcagggcaactcagtgaactaaatactatgttctgacctctggcactctttctcatgttgtttaaatatttaatattgtctaaggcaattcaagtattttcttaaataaaaaatatgaaaactca

SEQ ID NO: 118434 - DNA, 4360 bp, Homo sapiens
  Payload ID: 3173
  Gene Symbol: C16orf52
  Gene Name: chromosome 16 open reading frame 52
  Uniprot ID: Q8NHV5
  ENST ID: ENST00000542527
  CDS Start-End: 94-597
gggactccgggccccggcggcggcccatggggcgggaggcgtgaggccgctgcctgtccggggctcggggggtggggggagcggggcggggagatggataaactgaccatcatctcaggatgtctctttctggccgccgatatcttcgccatcgccagcatcgccaacccggactggatcaacaccggggagtctgcgggagcactcactgtgggcctcgtgcgacagtgtcaaacaatccatggacgagaccggacgtgcatccctccccggcttcccccggagtgggtcaccacactgttttttatcatcatgggaatcatttcattgactgtcacatgtggtttgctggtggcttcccactggcgaagagaagctacaaaatatgctcgatggatagcattcactggaatgatccttttctgtatggctgccctaatatttccaataggattttacatcaatgaagtcggaggtcaaccttataaattacccaacaacacagtagttgggtcatcatatgtactttttgtcttatcaattttctttacaatagtaggacttctatttgctggcaaagtttgtttaccaggctgatgaatgtctaaattgcttgactcttattattttttattttattttatttttttatttttggagggtggagaggacaaaggcgaggcatctgagcaggcctctcatgggaagatgctcagatgaaactgatgctgagaaggaaaaaaaaatgctttggtttgttctcactatgcactttggatttaaaaaaaaaaaaaaaaaggagagccttttccataaccaaatacagacaatattgactaaatctcctgagcatattcaggcagtcaggtctgcactgtgatagcaacctagagaaggagaatgctttataccgaaaagcatgtggccctttgtgactctgttattccgtttttaatgtctaatgattcattagaggaaaaaaaaaagtctaagtatttatgtgtcatggtggaccagagggatgcaagagaagttcatgtggggctggcctcacctcctaagaaattagtgttcacaacttccttgtaatagtatgagcctttggcaccagaatggattgccgttgcattactgcaccaagaagccaatagatcaaaacttgtttgctaaaatgtatgtaaaaattctgaaattccctctctctgtgtacaaaaaaaaaaaaaaatcaaacactaagacacatgttttgggtgggtgggtgggggaaatcttccttatatttatataaatatatataatatatatattttgctgatgcagtatacagtgtgtatatatgtgtgtgtgtgtgtgtgtgtatgtgtgtgtaaatttatatacacacacatgcaaacagttcctggaagagaattctgaatgctttgctagcaaaacactgtggtgtgcaaacctagaacccaatagaaaaaaaagccatttatctgaaggctgcatagtggagagagtcttcagtttacctcattctttgtagcagcccttgattttaacaggtttttgtaataggtacagataatcccatacctttctaggtgcgattttaagttaagctaaaaattatttgtagggttaatttatttgtatatgatagtagaaggtaagatcatgtcaaaccttataatttggggaatctgacactatttaaattattggcaactgttgtctgttgtacagagattctttttctactggctcagtctgttacattaataatgcattttatatgttcaggcacactttacataaatacaaagttcgctagtaaatatctggctattttggctatttacaacactaatttcattatttttatctgtaagcattattaatacatctttaccaaaacctgagcaatacaatattttctttatatgttatatgcctttgtttgctaaaagctaatatttttgcatttactttaaagggctgtactaaacccacagctttaagttcttccctaaaagaagcattgcagctaacccttgaactcacagttttaaaatacagtatttctcttctccacatctccatgccttcgcatcaatgcttgtttttcctggtgaacactatagataatctcctgtttgaaatgtgggacagggtgtttcatggcagtggagctaagtttctcctctttatagtgaactggtgacccaaatgtccctgtcatttatagtgaactgatgacccaaatgactccctgtcagtagagtcccatgtggcccatgcttcacacaagcagaaatgaacgcactgtttttaaggctagattatcagttctagaatgattacttcaaagatgggagctacctcctcagatattcacactatgaaatggaggtgcttgatgtgtttcacactggcttgtttgacagtcttctatcttactgttaattcagcagtattttattgtgaaagaaaaccccagtgtttgagctcactcaggaattggggagagagatggaccaccactgtggtgcatttcttaagtgttctgggagaatgtcatacttttccttcccagagtaaaagaaacctttgggagatcctgagggagactgtttctccccaagtatgatgatgtctagtcaagtctaagaataccactggacatgttctatggacatttgggattgcagttgctattctgatttgattggtcctcagtcaaatggatcactttgaaggaaagctttggttgtcaccgttatataccactgagataaagtgttagcaaagtatggttcaaattaacttatgacatgaccaagagcttttctcttccaaaagatgaattgtattgtaaatagtttctcaaaatatttttaactggatcatgagcatggggagagaaagtttctcagctgctaagaatttccccactgtttacttctttcacttatggtggtattgcatttaagattacaaaatttaaggttttatttgtatctattacccaaaccattaaattgtctttaatttcattgttgtcttggaggtccagtgcatacagggctgatgggggaaaactccctctagccagtcagcactctaacccaggattaaaccatcccatcaagtagtatgtgaagtcaagtcttcgtactcttgcagaccagacattgaaatggattcattcatatagatttctataaatcctataagtgaaaagatagacaactgtccgcagttgcttttaaaaaaggtcactataataagtactatatagtacagtattaatttatagcaggaaatcgtatcttgtaaactgtatataaaacactgttttatggtgcaatcatttgtcaaacttttgtctgtttcattgtttttagagtgtgtgcattcttctcatacctaagaatatcactgtaaaatctgctgaaaactatttttaggttttatttgcacaagactgaattagtttgacatttttggaagctcctattgaacatacccaaacatctgtaaacatgaaaaatcttcaatttattaaaagcaaacatttcagtatgattctttccaaaggtaatccatgttctatgttgttaatgtgtgtatgtaatttttctgactcttccacctcttataaacctattttctgtttcatttgttttgtttttgaaggatggctcttttttctttttaatgttctagatgaccaaaacactattggtttttacccttttgcctaaagctttgatatccccacttgatgttctgtgaattcactgtttaatctattaagtgaaataataaatagtcctggtgacaaacaatctgttgatttagaggaaaggccctgaaaaatacagtattggaaactaactttgcatatgctgttagctattattttgcatcatgggcttcatgggaagaacatgttgcatttattttgtctttattaaaagactactagccacaagttactctgattatagtaactgttttatcaacccacttcatctttaaaaaattaaatttacattcacaattcaaaacagtaagctgtctttcagaaaatttttgaaggataaaaacatgaaggaaaaaagtggcccgtgtaggtaggattccctacacaggacttttagttgtatcacctcaagagattttgaagtttgtgatcaaggtctgtatattatcccaaactttattaagaattgttttctaattggttataacatttttcaattaatagtttcaaaacaaattgttaatacaactgtataaaatgaacataattttcctcacttgtatttttgttattgagcaagtttatcaaaataaattgtctactaaa

SEQ ID NO: 118435 - DNA, 605 bp, Homo sapiens
  Payload ID: 3173
  Gene Symbol: C16orf52
  Gene Name: chromosome 16 open reading frame 52
  ENST ID: ENST00000562186
  CDS Start-End: 1-120
ctgaccatcatctcaggatgtctctttctggccgccgatatcttcgccatcgccagcatcgccaacccggactggatcaacaccggggagtctgcgggttcactttgtatgttaaactaagtattactacgttatgaactacagcagatgctgaagagtaggacttaggatgtgcttgaatgacccacgaagagataaatgagatttaagaactaaaggggtggtggtgaggaatattccctggacaggccaaacccactaaagtattcccaccatttgcatctccccaggagcactcactgtgggcctcgtgcgacagtgtcaaacaatccatggacgagaccggacgtgcatccctccccggcttcccccggagtgggtcaccacactgttttttatcatcatgggaatcatttcattgactgtcacatgtggtttgctggtggcttcccactggcgaagagaagctacaaaatatgctcgatggatagcattcactggaatgatccttttctgtatggctgccctaatatttccaataggattttacatcaatgaagtcggaggtcaaccttataaattacccaacaacacagtagttgggt

SEQ ID NO: 118436 - DNA, 695 bp, Homo sapiens
  Payload ID: 3173
  Gene Symbol: C16orf52
  Gene Name: chromosome 16 open reading frame 52
  ENST ID: ENST00000562695
  CDS Start-End: 20-346
gggggagcggggcggggagatggataaactgaccatcatctcaggatgtctctttctggccgccgatatcttcgccatcgccagcatcgccaacccggactggatcaacaccggggagtctgcgggagcactcactgtgggcctcgtgcgacagtgtcaaacaatccatggacgagaccggacgtgcatccctccccggcttcccccggagtgggtcaccacactgttttttatcatcatgggaatcatttcattgactgtcacatgtggtttgctggtggcttcccactggcgaagagaagctacaaaatatgctcgatggatagcattcactggaagtaagtaacctgtgcttactaaatttgtctagaaggcacccacccacactggtatttttatgaagataatcaagaatcagtaataaggacttcataatcatcaaagagcaccacttgtgtatggccgtgagatagactctacacagtcccatcatttcttcaaaactctttctgcaagaccaggacatccacaactttaatcactttgtatgaaatgctattttaatgaattttatttttgctcagattgtgacataagtgttccaggtttgtgactcagagttaccagtagcctgagtcttttcctcttcttgaagctattggtatcatctatcaaaataaagataagtatagaac

SEQ ID NO: 118437 - DNA, 1257 bp, Homo sapiens
  Payload ID: 3173
  Gene Symbol: C16orf52
  Gene Name: chromosome 16 open reading frame 52
  ENST ID: ENST00000569656
  CDS Start-End: 94-438
gggactccgggccccggcggcggcccatggggcgggaggcgtgaggccgctgcctgtccggggctcggggggtggggggagcggggcggggagatggataaactgaccatcatctcaggatgtctctttctggccgccgatatcttcgccatcgccagcatcgccaacccggactggatcaacaccggggagtctgcgggagcactcactgtgggcctcgtgcgacagtgtcaaacaatccatggacgagaccggacgtgcatccctccccggcttcccccggagtgggtcaccacactgttttttatcatcatgggaatcatttcattgactgtcacatgtggtttgctggtggcttcccactggcgaagagaagctacaaaatatgctcgatggatagcattcactggaaagtgtgtgcattcttctcatacctaagaatatcactgtaaaatctgctgaaaactatttttaggttttatttgcacaagactgaattagtttgacatttttggaagctcctattgaacatacccaaacatctgtaaacatgaaaaatcttcaatttattaaaagcaaacatttcagtatgattctttccaaagtttgctgctgattcttccttgtgtggccttttgaggagcctcctggggaattggaggattaagacatgccactatgagaagattataggaaaaacaccaagactagaggactctgggttccttttatgcaaagtcaactcttctgggtcacagttacccagcaacaaaaataaagaatttccccatggactccagatcctttactactgaactcacagggctgtaacactgttactgtacagagaggaccaggacgatgccagcaccccgtttatcctgagtgaactctccggaggcctcttcaagcttgtgggttctctgctgtcttgaagccatccatccatttgataggttttgcaaagacttggtcctgccaagatggttttaatcatttctgctaaaaggaatggactcgaggatttgatctcattttagatgcagttgtcctcacttggccattttacagcactttagtaaatatggccagtgtatttggtcactattaaatcaatccccattcattatctgtcagggcaactcagtgaactaaatactatgttctgacctctggcactctttctcatgttgtttaaatatttaatattgtctaaggcaattcaagtattttcttaaataaaaaatatgaaaactc

SEQ ID NO: 118438 - DNA, 951 bp, Homo sapiens
  Payload ID: 3173
  Gene Symbol: C16orf52
  Gene Name: chromosome 16 open reading frame 52
  ENST ID: ENST00000567004
  CDS Start-End: 8-280
ttgctaaatggggcaatcctgggagctgacggccgcggaacgggcaatgagaatacaaggagcactcactgtgggcctcgtgcgacagtgtcaaacaatccatggacgagaccggacgtgcatccctccccggcttcccccggagtgggtcaccacactgttttttatcatcatgggaatcatttcattgactgtcacatgtggtttgctggtggcttcccactggcgaagagaagctacaaaatatgctcgatggatagcattcactggaagtaagtaacctgtgcttactaaatttgtctagaaggcacccacccacactggtatttttatgaagataatcaagaatcagtaataaggacttcataatcatcaaagagcaccacttgtgtatggccgtgagatagactctacacagtcccatcatttcttcaaaactctttctgcaagaccaggacatccacaactttaatcactttgtatgaaatgctattttaatgaattttatttttgctcagattgtgacataagtgttccaggtttgtgactcagagttaccagtagcctgagtcttttcctcttcttgaagctattggtatcatctatcaaaataaagataagtatagaacaaatacataaaaatataaattagatgaaggtggaaatattttttaatattgattttgagtttctgctgtatgttgtaaccattgaaaaatcaacacattttgttatttaataattgtttatcaatatttcttactccattaagctctgcccaagggtataagcttatatattacacattctcttgtactttgcaaaattggtttaatttcacaacacatcagagatttatctcaagttaaacagaagaaacaaaaatgcacaaagaaaagacatttctgcaattctgctttcgtgcttctttttctccaaagcaattttgca

SEQ ID NO: 118439 - DNA, 2585 bp, Homo sapiens
  Payload ID: 3174
  Gene Symbol: C16orf54
  Gene Name: chromosome 16 open reading frame 54
  Uniprot ID: Q6UWD8
  ENST ID: ENST00000329410
  CDS Start-End: 97-771
aggcggaccgccctgcaccctccaagcctgcacctcttagtccagcaccaggaagagtggctctaggagggagaggagcccagggactgacccaagatgccgttgactccagagccgccctctgggcgcgtggaggggccccccgcatgggaagcagccccatggccctcactgccctgtgggccctgcatccccatcatgctggtcctggccaccctggctgcgctcttcatcctcaccaccgctgtgttggctgaacgcctgttccgccgtgctctccgcccagaccccagccaccgtgcacccaccctggtgtggcgcccaggaggagagctgtggattgagcccatgggcaccgcccgagagcgctctgaggactggtatggctctgcggtccccctgctgacagatcgggcccctgagcctcccacccaggtgggcactttggaggcccgagcaacagccccacctgccccctcagccccaaattctgctcccagcaacttgggcccccagaccgtactggaggtcccagcccggagcaccttctgggggccccagccctgggaggggaggccccccgccacaggcctggtgagctgggctgaacccgagcagaggccagaggccagcgtccagtttgggagcccccaggccaggaggcagcggccagggagcccggatcctgagtggggcctccagccacgggtcaccttggagcagatctcagctttctggaagcgtgaaggccggaccagtgtggggttctgaatccccagggttccccagagatccccgaggcaggccttgcctcagtgggaccggggaccccaggatccagcattaggattgagactgccccagcgaagatgcccttcccaggctccttccacctggagtccccctccccgggtctgggtggtggccaggctatgtggactaggggaagcccagcagtgcctctgctcagctacctgggctgtggctcagagacctgggggtggagccaatgccaggccagaagccttcaagatcgcatccagatgaagaacccaaggtactagatagtcaggaaatggcatcgaccagccacctccaccttctttcagtgtttaccgaagccaccaataccaaagagaacgggtcctgcggtgctgaacagcctcggtgtggcgatgacagctggcaggagatgacaggaatccagtttcccagagccacaaatcctgttctccttggccactcacccactgtgaggtcctctaggaaaatacacaaagagaggaccagaccaggcagaggaacattttgtttcatatgaactgtggctttgacccccaaactgcaaggaggaacttgctgggccaagctgcagcggcgctgtcttgctggagtggggacctagagtcagagaaaacccacaggctcctctgcccattctcctccatctgcacacgtctcagcctcggaccctcaccactccatggtgaggaaggccatggccaggggaaactgagtttcatccaatgtggagaggagcgttgtcctagagcagggcaactcccaaactgtgacctctgatcatcgtcccttccagcttgctggagtgtccagagagacagatttgccacaagctaggcttacttataatgctccaccctacagaaatgggaccccaagtacccaatcttccctttaggagaggcaggcaggtgggtgagcagcagatgtagtttccatttccctgggggtttaattttccaaactttgtcttttttttttttttttttttttttttgagacagaatctcaactctgtcacccagactggagtgcagtggcacaatctcaactcactacagcctcgaactcctaggctcaagcgatcctcccacctcaacctctagaatagctgggactgcaggtgcataccaccacgcccagctaatttttgtattttttttgtagagacacggtctcaccatactgcctgggcaggtttccaactcctgggctcaagtgatccagcagccttagcctcccaaaatgctgggattacaggtatgagcactgcacccggccacttttttttgtttttgaaacagggtctcactctgttgcccaggctggactacagtggcacaatctcagctcactgcggccttgaactcctgggcttaagtgatcctcccacctcagtctccctagtaggtggaactacaggcatgtaccaccacacctggctattttttttttttagagacagggtcttgctatgttgcccaggctggtctttaattcctgggctcgagagagccactcatccccatctctcagagtgttgggattacagccatgagccaccatgcccggccaaacttcagccttgaatattagtgattttgccatattagtttaccatctgtacaattatttgctttatatttttctttaaattggctcattattcacttaatgaaattattgcaacaggaatcttttgtatcacttctgtaaatggaaaaccagtctcatttgccatcaatagaaggtaaaacatgaaaataaatacaatgtaaacaaaa

SEQ ID NO: 118440 - DNA, 2793 bp, Homo sapiens
  Payload ID: 3175
  Gene Symbol: C16orf58
  Gene Name: chromosome 16 open reading frame 58
  Uniprot ID: Q96GQ5
  ENST ID: ENST00000327237
  CDS Start-End: 41-1447
accgtgcggcaggggcggggctgggatccaaaagctcggcatggctgacgacgcgggtttggagaccccgctgtgttccgagcagttcggctccggggaggcacggggctgccgcgccgccgcggacgggagcctgcagtgggaggtcgggggctggcgctggtgggggctctccagggccttcacggtcaaacctgaaggacgagatgcgggcgaagtgggggcttccggggccccctcaccgcccctctccgggctccaggccgtgttcctgcctcagggcttccctgatagcgtcagcccggactacttgccctaccagctgtgggattccgtgcaggcgtttgcttccagcctctccggctccctagccacccaggcagtcttgctgggcataggggtggggaacgcaaaagccactgtttcagctgccacggccacctggctcgtgaaagattcaactggcatgctgggccgcatcgtctttgcctggtggaaagggagcaaactggactgcaatgccaagcagtggaggctttttgcggacatcctcaatgacgtagccatgttccttgagattatggctcctgtatacccaatctgtttcaccatgaccgtctccaccagcaacctagccaagtgcatcgtgagtgttgctggtggggccactcgggctgccctgaccgtgcaccaggctcggaggaacaacatggctgacgtgtcagccaaggacagcagccaggagacgctggtgaacctggcggggctcttggtcagcctcctgatgctccctctggtgtcaggttgccctggcttcagccttggatgtttcttcttcctcactgccctccacatctacgccaactaccgcgcggtccgagccctggtcatggagaccttgaacgaaggccggctccggctggtcctgaagcactaccttcagaggggagaggtactcgacccaactgcagccaatcgcatggagccgctgtggacaggtttctggccagctccgtctctatccctgggggtccccttacaccgcttggtctccagtgtctttgagctgcagcagctggttgaggggcaccaagaatcctacctcctctgctgggaccagtcacaaaaccaggtacaggtagttctgaaccagaaggcaggccccaagaccatcctaagggccgccacacatgggctgatgcttggggccctgcagggagatggaccccttccagcagagctggaggagctgaggaaccgggtgcgggcaggtcctaagaaagagagctgggtcgtcgtcaaggagacacacgaagtgttggacatgctgttcccaaagttcttgaaaggactgcaggatgccggctggaagaccgagaagcaccagctagaggtggatgagtggagggccacatggcttctgtctcccgaaaagaaggtcttgtgagcagcccagacggaggcccaagcccagggcaggaacctggagcaaggacactttggccacagcaggacaggggaaaggcagctttatttttccttagggcaactgcagcgggtgggccaggccctcatgggaagtgactgccaatcagatgcagtgggccccaggcagaggaaggccgggagaaggggagccaggaccttctcaccccactgccccttccccttttctggggagcaccgcaggctcctcacccccacttcctgtgaggctgtggcttatggtgtccaacgcagttggtcttaggcatagaagccccagaggaacacggccactgccatcatgagcagggcattgaggttgaccacacgggcccagctcgggtcctcgctgatgtcctccagccgcctggctgctgccgctgcctcctcctgggtaaggggcggaggactgcccaccccacctctgctcattccacaaaaccagagcaggcactggcggaagaggcttggtgccggggcctggggctctgagggaaattgaggccctgcagttagtttgcgggaactcagctcctccagccccacctcccagcatggtgccctaccattcatctccatggcactctctgggcacccattctgtacagggagtgaggagccttgctgctcatcagcatccaggtcctcccgttcctccttgctatgccggagactgaagaccaggcggtggagctggggagggtgggagcacgaacgaggtgggagttctgtccccccatgcctggccctaaagtctcttgcacaccagctcgtcactgcctgccctacccacctctgtccagtctacacacccagcccaggcttaactcatgccaactccaccctacatggctgccctgtgccctcgggataaaccccaagcccctgagcttgtgtttaaagccgttggccttgctcccccagctttgtcagctcaggtctgtctacacccagatggtagcgcttgtgacactggcctggcagtcctgctcacagtgttctgtgcctgtgtgctcccaccctttcctcctgctgctgcagaaacccggccatccttccacacccagatctcttgtcctgtcctcaccccaccctgccaccatcagccctgcctggagccacctgccctttggcaacaaaaccaaacctttttgtgggcgttcaagatggtattgtgcccaccagtcagatcctgtgttttgagtcccaaaggccatgccaaggattggctttgggaggctttaatcaccaacccatcaacatcaagcctcccccaggccggttcaaataaatgtatttaaataaaaa

SEQ ID NO: 118441 - DNA, 2471 bp, Homo sapiens
  Payload ID: 3175
  Gene Symbol: C16orf58
  Gene Name: chromosome 16 open reading frame 58
  Uniprot ID: Q96GQ5
  ENST ID: ENST00000430477
  CDS Start-End: 7-1413
ctcggcatggctgacgacgcgggtttggagaccccgctgtgttccgagcagttcggctccggggaggcacggggctgccgcgccgccgcggacgggagcctgcagtgggaggtcgggggctggcgctggtgggggctctccagggccttcacggtcaaacctgaaggacgagatgcgggcgaagtgggggcttccggggccccctcaccgcccctctccgggctccaggccgtgttcctgcctcagggcttccctgatagcgtcagcccggactacttgccctaccagctgtgggattccgtgcaggcgtttgcttccagcctctccggctccctagccacccaggcagtcttgctgggcataggggtggggaacgcaaaagccactgtttcagctgccacggccacctggctcgtgaaagattcaactggcatgctgggccgcatcgtctttgcctggtggaaagggagcaaactggactgcaatgccaagcagtggaggctttttgcggacatcctcaatgacgtagccatgttccttgagattatggctcctgtatacccaatctgtttcaccatgaccgtctccaccagcaacctagccaagtgcatcgtgagtgttgctggtggggccactcgggctgccctgaccgtgcaccaggctcggaggaacaacatggctgacgtgtcagccaaggacagcagccaggagacgctggtgaacctggcggggctcttggtcagcctcctgatgctccctctggtgtcaggttgccctggcttcagccttggatgtttcttcttcctcactgccctccacatctacgccaactaccgcgcggtccgagccctggtcatggagaccttgaacgaaggccggctccggctggtcctgaagcactaccttcagaggggagaggtactcgacccaactgcagccaatcgcatggagccgctgtggacaggtttctggccagctccgtctctatccctgggggtccccttacaccgcttggtctccagtgtctttgagctgcagcagctggttgaggggcaccaagaatcctacctcctctgctgggaccagtcacaaaaccaggtacaggtagttctgaaccagaaggcaggccccaagaccatcctaagggccgccacacatgggctgatgcttggggccctgcagggagatggaccccttccagcagagctggaggagctgaggaaccgggtgcgggcaggtcctaagaaagagagctgggtcgtcgtcaaggagacacacgaagtgttggacatgctgttcccaaagttcttgaaaggactgcaggatgccggctggaagaccgagaagcaccagctagaggtggatgagtggagggccacatggcttctgtctcccgaaaagaaggtcttgtgagcagcccagacggaggcccaagcccagggcaggaacctggagcaaggacactttggccacagcaggacaggggaaaggcagctttatttttccttagggcaactgcagcgggtgggccaggccctcatgggaagtgactgccaatcagatgcagtgggccccaggcagaggaaggccgggagaaggggagccaggaccttctcaccccactgccccttccccttttctggggagcaccgcaggctcctcacccccacttcctgtgaggctgtggcttatggtgtccaacgcagttggtcttaggcatagaagccccagaggaacacggccactgccatcatgagcagggcattgaggttgaccacacgggcccagctcgggtcctcgctgatgtcctccaggtcctcccgttcctccttgctatgccggagactgaagaccaggcggtggagctggggagggtgggagcacgaacgaggtgggagttctgtccccccatgcctggccctaaagtctcttgcacaccagctcgtcactgcctgccctacccacctctgtccagtctacacacccagcccaggcttaactcatgccaactccaccctacatggctgccctgtgccctcgggataaaccccaagcccctgagcttgtgtttaaagccgttggccttgctcccccagctttgtcagctcaggtctgtctacacccagatggtagcgcttgtgacactggcctggcagtcctgctcacagtgttctgtgcctgtgtgctcccaccctttcctcctgctgctgcagaaacccggccatccttccacacccagatctcttgtcctgtcctcaccccaccctgccaccatcagccctgcctggagccacctgccctttggcaacaaaaccaaacctttttgtgggcgttcaagatggtattgtgcccaccagtcagatcctgtgttttgagtcccaaaggccatgccaaggattggctttgggaggctttaatcaccaacccatcaacatcaagcctcccccaggccggttcaaataaatgtattt

SEQ ID NO: 118442 - DNA, 1845 bp, Homo sapiens
  Payload ID: 3175
  Gene Symbol: C16orf58
  Gene Name: chromosome 16 open reading frame 58
  ENST ID: ENST00000567994
  CDS Start-End: 12-1283
aaaagctcggcatggctgacgacgcgggtttggagaccccgctgtgttccgagcagttcggctccggggaggcacggggctgccgcgccgccgcggacgggagcctgcagtgggagggcttccctgatagcgtcagcccggactacttgccctaccagctgtgggattccgtgcaggcgtttgcttccagcctctccggctccctagccacccaggcagtcttgctgggcataggggtggggaacgcaaaagccactgtttcagctgccacggccacctggctcgtgaaagattcaactggcatgctgggccgcatcgtctttgcctggtggaaagggagcaaactggactgcaatgccaagcagtggaggctttttgcggacatcctcaatgacgtagccatgttccttgagattatggctcctgtatacccaatctgtttcaccatgaccgtctccaccagcaacctagccaagtgcatcgtgagtgttgctggtggggccactcgggctgccctgaccgtgcaccaggctcggaggaacaacatggctgacgtgtcagccaaggacagcagccaggagacgctggtgaacctggcggggctcttggtcagcctcctgatgctccctctggtgtcaggttgccctggcttcagccttggatgtttcttcttcctcactgccctccacatctacgccaactaccgcgcggtccgagccctggtcatggagaccttgaacgaaggccggctccggctggtcctgaagcactaccttcagaggggagaggtactcgacccaactgcagccaatcgcatggagccgctgtggacaggtttctggccagctccgtctctatccctgggggtccccttacaccgcttggtctccagtgtctttgagctgcagcagctggttgaggggcaccaagaatcctacctcctctgctgggaccagtcacaaaaccaggtacaggtagttctgaaccagaaggcaggccccaagaccatcctaagggccgccacacatgggctgatgcttggggccctgcagggagatggaccccttccagcagagctggaggagctgaggaaccgggtgcgggcaggtcctaagaaagagagctgggtcgtcgtcaaggagacacacgaagtgttggacatgctgttcccaaagttcttgaaaggactgcaggatgccggctggaagaccgagaagcaccagctagaggtggatgagtggagggccacatggcttctgtctcccgaaaagaaggtcttgtgagcagcccagacggaggcccaagcccagggcaggaacctggagcaaggacactttggccacagcaggacaggggaaaggcagctttatttttccttagggcaactgcagcgggtgggccaggccctcatgggaagtgactgccaatcagatgcagtgggccccaggcagaggaaggccgggagaaggggagccaggaccttctcaccccactgccccttccccttttctggggagcaccgcaggctcctcacccccacttcctgtgaggctgtggcttatggtgtccaacgcagttggtcttaggcatagaagccccagaggaacacggccactgccatcatgagcagggcattgaggttgaccacacgggcccagctcgggtcctcgctgatgtcctccagccgcctggctgctgccgctgcctcctcctgggtaaggggcggaggactgcccaccccacctctgctcattccacaaaaccagagcaggcactggcggaagaggcttggtgccggggcctggggctctgagggaaattgaggccctgcagttagtttgcggg

SEQ ID NO: 118443 - DNA, 584 bp, Homo sapiens
  Payload ID: 3175
  Gene Symbol: C16orf58
  Gene Name: chromosome 16 open reading frame 58
  ENST ID: ENST00000565128
  CDS Start-End: 14-436
ccaaaagctcggcatggctgacgacgcgggtttggagaccccgctgtgttccgagcagttcggctccggggaggcacggggctgccgcgccgccgcggacgggagcctgcagtgggaggtcgggggctggcgctggtgggggctctccagggccttcacggtcaaacctgaaggacgagatgcgggcgaagtgggggcttccggggccccctcaccgcccctctccgggctccaggccgtgttcctgcctcagggcttccctgatagcgtcagcccggactacttgccctaccagctgtgggattccgtgcagattcaactggcatgctgggccgcatcgtctttgcctggtggaaaggtgcatcgtgagtgttgctggtggggccactcgggctgccctgaccgtgcaccaggctcggaggaacaacatggctgacgtgtcagccaaggacagcagccaggagacgctggtgaacctggcggggctcttggtcagcctcctgatgctccctctggtgtcaggttgccctggcttcagccttggatgtttcttcttcctcactgccctccacatctacgccaac

SEQ ID NO: 118444 - DNA, 2783 bp, Homo sapiens
  Payload ID: 3175
  Gene Symbol: C16orf58
  Gene Name: chromosome 16 open reading frame 58
  ENST ID: ENST00000570164
  CDS Start-End: 19-1419
gggatccaaaagctcggcatggctgacgacgcgggtttggagaccccgctgtgttccgagcagttcggctccggggaggcacggggctgccgcgccgccgcggacgggagcctgcagtgggaggtcgggggctggcgctggtgggggctctccagggccttcacggtcaaacctgaaggacgagatgcgggcgaagtgggggcttccggggccccctcaccgcccctctccgggctccaggccgtgttcctgcctcagggcttccctgatagcgtcagcccggactacttgccctaccagctgtgggattccgtgcaggcgtttgcttccagcctctccggctccctagccacccaggcagtcttgctgggcataggggtggggaacgcaaaagccactgtttcagctgccacggccacctggctcgtgaaagattcaactggcatgctgggccgcatcgtctttgcctggtggaaagggagcaaactggactgcaatgccaagcagtggaggctttttgcggacatcctcaatgacgtagccatgttccttgagattatggctcctgtatacccaatctgtttcaccatgaccgtctccaccagcaacctagccaagtgcatcgtgagtgttgctggtggggccactcgggctgccctgaccgtgcaccaggctcggaggaacaacatggctgacgtgtcagccaaggacagcagccaggagacgctggtgaacctggcggggctcttggtcagcctcctgatgctccctctggtgtcaggttgccctggccttggatgtttcttcttcctcactgccctccacatctacgccaactaccgcgcggtccgagccctggtcatggagaccttgaacgaaggccggctccggctggtcctgaagcactaccttcagaggggagaggtactcgacccaactgcagccaatcgcatggagccgctgtggacaggtttctggccagctccgtctctatccctgggggtccccttacaccgcttggtctccagtgtctttgagctgcagcagctggttgaggggcaccaagaatcctacctcctctgctgggaccagtcacaaaaccaggtacaggtagttctgaaccagaaggcaggccccaagaccatcctaagggccgccacacatgggctgatgcttggggccctgcagggagatggaccccttccagcagagctggaggagctgaggaaccgggtgcgggcaggtcctaagaaagagagctgggtcgtcgtcaaggagacacacgaagtgttggacatgctgttcccaaagttcttgaaaggactgcaggatgccggctggaagaccgagaagcaccagctagaggtggatgagtggagggccacatggcttctgtctcccgaaaagaaggtcttgtgagcagcccagacggaggcccaagcccagggcaggaacctggagcaaggacactttggccacagcaggacaggggaaaggcagctttatttttccttagggcaactgcagcgggtgggccaggccctcatgggaagtgactgccaatcagatgcagtgggccccaggcagaggaaggccgggagaaggggagccaggaccttctcaccccactgccccttccccttttctggggagcaccgcaggctcctcacccccacttcctgtgaggctgtggcttatggtgtccaacgcagttggtcttaggcatagaagccccagaggaacacggccactgccatcatgagcagggcattgaggttgaccacacgggcccagctcgggtcctcgctgatgtcctccagccgcctggctgctgccgctgcctcctcctgggtaaggggcggaggactgcccaccccacctctgctcattccacaaaaccagagcaggcactggcggaagaggcttggtgccggggcctggggctctgagggaaattgaggccctgcagttagtttgcgggaactcagctcctccagccccacctcccagcatggtgccctaccattcatctccatggcactctctgggcacccattctgtacagggagtgaggagccttgctgctcatcagcatccaggtcctcccgttcctccttgctatgccggagactgaagaccaggcggtggagctggggagggtgggagcacgaacgaggtgggagttctgtccccccatgcctggccctaaagtctcttgcacaccagctcgtcactgcctgccctacccacctctgtccagtctacacacccagcccaggcttaactcatgccaactccaccctacatggctgccctgtgccctcgggataaaccccaagcccctgagcttgtgtttaaagccgttggccttgctcccccagctttgtcagctcaggtctgtctacacccagatggtagcgcttgtgacactggcctggcagtcctgctcacagtgttctgtgcctgtgtgctcccaccctttcctcctgctgctgcagaaacccggccatccttccacacccagatctcttgtcctgtcctcaccccaccctgccaccatcagccctgcctggagccacctgccctttggcaacaaaaccaaacctttttgtgggcgttcaagatggtattgtgcccaccagtcagatcctgtgttttgagtcccaaaggccatgccaaggattggctttgggaggctttaatcaccaacccatcaacatcaagcctcccccaggccggttcaaataaatgtatttaaataaaaattcttgctcggcaattgc

SEQ ID NO: 118445 - DNA, 636 bp, Homo sapiens
  Payload ID: 3175
  Gene Symbol: C16orf58
  Gene Name: chromosome 16 open reading frame 58
  ENST ID: ENST00000567578
  CDS Start-End: 12-419
aaaagctcggcatggctgacgacgcgggtttggagaccccgctgtgttccgagcagttcggctccggggaggcacggggctgccgcgccgccgcggacgggagcctgcagtgggaggtcgggggctggcgctggtgggggctctccagggccttcacggtcaaacctgaaggacgagatgcgggcgaagtgggggcttccggggccccctcaccgcccctctccgggctccaggccgtgttcctgcctcagggcttccctgatagcgtcagcccggactacttgccctaccagctgtgggattccgtgcagattcaactggcatgctgggccgcatcgtctttgcctggtggaaagggagcaaactggactgcaatgccaagcagtggaggctttttgcggacatcctcaatgacgtagccatgttccttgagattatggctcctgtatacccaatctgtttcaccatgaccgtctccaccagcaacctagccaagtgcatcgtgagtgttgctggtggggccactcgggctgccctgaccgtgcaccaggctcggaggaacaacatggctgacgtgtcagccaaggacagcagccaggagacgctggtgaacctggcggggctcttggtcagcct

SEQ ID NO: 118446 - DNA, 555 bp, Homo sapiens
  Payload ID: 3175
  Gene Symbol: C16orf58
  Gene Name: chromosome 16 open reading frame 58
  ENST ID: ENST00000564807
  CDS Start-End: 310-555
gaagtttcaaataaggagttgtcggttgggatcaaactgtggggatccaagaatgccaggctaagaaaccaggatattttattttctgataaaaagaggatgcttttttggcaaatttctgcttcggagtgaagatgctgcactagatgggaaggagaagaggagaaatggaaagaagaaaaggcgtttgcttccagcctctccggctccctagccacccaggcagtcttgctgggcataggggtggggaacgcaaaagccactgtttcagctgccacggccacctggctcgtgaaagattcaactggcatgctgggccgcatcgtctttgcctggtggaaagggagcaaactggactgcaatgccaagcagtggaggctttttgcggacatcctcaatgacgtagccatgttccttgagattatggctcctgtatacccaatctgtttcaccatgaccgtctccaccagcaacctagccaagtgcatcgtgagtgttgctggtggggccactcgggctgccctgaccgtgcaccaggctcggaggaacaacatg

SEQ ID NO: 118447 - DNA, 1662 bp, Homo sapiens
  Payload ID: 3176
  Gene Symbol: C16orf59
  Gene Name: chromosome 16 open reading frame 59
  Uniprot ID: Q7L2K0
  ENST ID: ENST00000361837
  CDS Start-End: 66-1367
cttccctcccggaaggggcgtggctcttcagaggcggcaaattgcaaggagacgccgccgccttcatgctgccggcgggctgctcgcgccggctggtggccgagctgcagggcgccctggacgcctgcgcacagcgacaattgcaattggagcagagcctgcgcgtttgccgtcggctgctgcatgcctgggaaccaactgggacccgggctttgaagccacctccagggccagaaactaatggagaggacccccttccagcatgcacacccagtccacaagacctcaaagagttggagtttctgacccaggcactggagaaggctgtacgagttcgaagaggcatcactaaggccggagagagagacaaggcccccagcctgaaatctaggtccattgtcacctcttctggcacgacagcctccgccccaccgcattccccaggccaagctggtggccatgcttcagacacgagacccaccaagggcctccgccagaccacggtgcctgccaagggccaccctgagcgccggctgctgtcagtgggggatgggacccgtgttgggatgggagcccgaacccccaggcctggggcgggcctcagggaccagcaaatggccccatccgctgctcctcaggccccagaagccttcacactcaaggagaaggggcacctgctgcggctgcctgcggcattcaggaaagcagcttcccagaactcgagcctgtgggcccagctcagttccacacagaccagtgattccacggatgccgccgctgccaaaacccagttcctccagaacatgcagacagcttcaggcgggccccagcccaggctcagtgctgtggaggtggaggcggaggcggggcgcctgcggaaggcctgctcgctgctgagactgcgcatgagggaggagctctcggcagcccccatggactggatgcaggagtaccgctgcctgctcacgctggaggggctgcaggccatggtgggccagtgtctgcacaggctgcaggagctgcgtgcagcggtggcggaacagccaccaagaccatgtcctgtggggaggccccccggagcctcgccgtcctgtgggggtagagcggagcctgcatggagcccccagctgcttgtctactccagcacccaggagctgcagaccctggcggccctcaagctgcgagtggctgtgctggaccagcagatccacttggaaaaggtcctgatggctgaactcctccccctggtaagcgctgcacagccgcaggggccgccctggctggccctgtgccgggctgtgcacagcctgctctgcgagggaggagcacgtgtccttaccatcctgcgggatgaacctgcagtctgagcctttcccatgctgccctcggcctgttcagatggggattgggggtgtcttccctggcactgtgctcggggacccagagatgcctgtgcttccctgggaaacctggtgaactggaccaggtggcctcactggctcttctcaggacaactaagcctgctggtcagggctggctttcagccttcctaaggctcctggactccagaggccagcggggagcctttcctggctccctctgttttctctcactgtagaccaaagagccgcttgtgtgatattaaagccactttagaaagca

SEQ ID NO: 118448 - DNA, 1911 bp, Homo sapiens
  Payload ID: 3176
  Gene Symbol: C16orf59
  Gene Name: chromosome 16 open reading frame 59
  ENST ID: ENST00000569496
  CDS Start-End: 60-1277
tcccggaaggggcgtggctcttcagaggcggcaaattgcaaggagacgccgccgccttcatgctgccggcgggctgctcgcgccggctggtggccgagctgcagggcgccctggacgcctgcgcacagcgacaattgcaattggagcagagcctgcgcgtttgccgtcggctgctgcatgcctgggaaccaactgggacccgggctttgaagccacctccagggccagaaactaatggagaggacccccttccagcatgcacacccagtccacaagacctcaaagagttggagtttctgacccaggcactggagaaggctgtacgagttcgaagaggcatcactaaggccggagagagagacaaggcccccagcctgaaatctaggtccattgtcacctcttctggcacgacagcctccgccccaccgcattccccaggccaagctggtggccatgcttcagacacgagacccaccaagggcctccgccagaccacggtgcctgccaagggccaccctgagcgccggctgctgtcagtgggggatgggacccgtgttgggatgggagcccgaacccccaggcctggggcgggcctcagggaccagcaaatggccccatccgctgctcctcaggccccagaagccttcacactcaaggagaaggggcacctgctgcggctgcctgcggcattcaggaaagcagcttcccagaactcgagcctgtgggcccagctcagttccacacagaccagtgattccacggatgccgccgctgccaaaacccagttcctccagaacatgcagacagcttcaggcgggccccagcccaggctcagtgctgtggaggtggaggcggaggcggggcgcctgcggaaggcctgctcgctgctgagactgcgcatgagggaggagctctcggcagcccccatggactggatgcaggagtaccgctgcctgctcacgctggaggggctgcaggccatggtgggccagtgtctgcacaggctgcaggagctgcgtgcagcggtggcggaacagccaccaagaccatgtcctgtggggaggccccccggagcctcgccgtcctgtgggggtagagcggagcctgcatggagcccccagctgcttgtctactccagcacccaggagctgcagaccctggcggccctcaagctgcgagtggctgtgctggaccagcagatccacttggaaaaggtgcttctggaagaggaggtgggggtgcaacagaggtccgcagccttgaggacccgagggtaggggcttgactgctccaccccccaggacccaggaggatgggggcaagcctggggtctgtgtgtgtgggttgggaagtgcatgggtcagacggggctgggacggcaggagggagcctggagcctcagaaggagggaggagggctgaagcatgggggcctcgaagcctgtcccaggattgccccccgcctaggtgcccctgagaccttggccctgccctgccctgcccccaggtcctgatggctgaactcctccccctggtaagcgctgcacagccgcaggggccgccctggctggccctgtgccgggctgtgcacagcctgctctgcgagggaggagcacgtgtccttaccatcctgcgggatgaacctgcagtctgagcctttcccatgctgccctcggcctgttcagatggggattgggggtgtcttccctggcactgtgctcggggacccagagatgcctgtgcttccctgggaaacctggtgaactggaccaggtggcctcactggctcttctcaggacaactaagcctgctggtcagggctggctttcagccttcctaaggctcctggactccagaggccagcggggagcctttcctggctccctctgttttctctcactgtagaccaaag

SEQ ID NO: 118449 - DNA, 650 bp, Homo sapiens
  Payload ID: 3176
  Gene Symbol: C16orf59
  Gene Name: chromosome 16 open reading frame 59
  ENST ID: ENST00000568753
  CDS Start-End: 352-650
acttcggagctgtgggttgtcagtgccaccctccttaccctgcaggctctgagctgggggcctgccgcggggcccggcggccccctcgggtctgtttgggctgggccctgcctcctggccgtgcgacggctgcccgtgtctttgcagggaaccaactgggacccgggctttgaagccacctccagggccagaaactaatggagaggacccccttccaggcacctgctgcggctgcctgcggcattcaggaaagcagcttcccagaactcgagcctgtgggcccagctcagttccacacagaccagtgattccacggatgccgccgctgccaaaacccagttcctccagaacatgcagacagcttcaggcgggccccagcccaggctcagtgctgtggaggtggaggcggaggcggggcgcctgcggaaggcctgctcgctgctgagactgcgcatgagggaggagctctcggcagcccccatggactggatgcaggagtaccgctgcctgctcacgctggaggggctgcaggccatggtgggccagtgtctgcacaggctgcaggagctgcgtgcagcggtggcggaacagccaccaagaccatgtcctgtggggaggccccccggagcctcgccgtcctgtgggggtag

SEQ ID NO: 118450 - DNA, 1709 bp, Homo sapiens
  Payload ID: 3176
  Gene Symbol: C16orf59
  Gene Name: chromosome 16 open reading frame 59
  Uniprot ID: Q7L2K0
  ENST ID: ENST00000483320
  CDS Start-End: 614-1414
atgctgccggcgggctgctcgcgccggtgaggcctgcgcggcaggagggggtgggaggatgcgggcgggccggtagccaggcgcggggcccgaggcccgacgctggccgaggtgctgagccgccggtgcgtcccccaggctggtggccgagctgcagggcgccctggacgcctgcgcacagcgacaattgcaattggagcagagcctgcgcgtttgccgtcggctgctgcatgcctgggaaccaactgggacccgggctttgaagccacctccagggccagaaactaatggagaggacccccttccagcatgcacacccagtccacaagacctcaaagagttggagtttctgacccaggcactggagaaggctgtacgagttcgaagaggcatcactaaggccggagagagagacaaggcccccagcctgaaatctaggtccattgtcacctcttctggcacgacagcctccgccccaccgcattccccaggccaagctggtggccatgcttcagacacgagacccaccaagggcctccgccagaccacggtgcctgccaagggccaccctgagcgccggctgctgtcagtgggggatgggacccgtgttgggatgggagcccgaacccccaggcctggggcgggcctcagggaccagcaaatggccccatccgctgctcctcaggccccagaagccttcacactcaaggagaaggggcacctgctgcggctgcctgcggcattcaggaaagcagcttcccagaactcgagcctgtgggcccagctcagttccacacagaccagtgattccacggatgccgccgctgccaaaacccagttcctccagaacatgcagacagcttcaggcgggccccagcccaggctcagtgctgtggaggtggaggcggaggcggggcgcctgcggaaggcctgctcgctgctgagactgcgcatgagggaggagctctcggcagcccccatggactggatgcaggagtaccgctgcctgctcacgctggaggggctgcaggccatggtgggccagtgtctgcacaggctgcaggagctgcgtgcagcggtggcggaacagccaccaagaccatgtcctgtggggaggccccccggagcctcgccgtcctgtgggggtagagcggagcctgcatggagcccccagctgcttgtctactccagcacccaggagctgcagaccctggcggccctcaagctgcgagtggctgtgctggaccagcagatccacttggaaaaggtcctgatggctgaactcctccccctggtaagcgctgcacagccgcaggggccgccctggctggccctgtgccgggctgtgcacagcctgctctgcgagggaggagcacgtgtccttaccatcctgcgggatgaacctgcagtctgagcctttcccatgctgccctcggcctgttcagatggggattgggggtgtcttccctggcactgtgctcggggacccagagatgcctgtgcttccctgggaaacctggtgaactggaccaggtggcctcactggctcttctcaggacaactaagcctgctggtcagggctggctttcagccttcctaaggctcctggactccagaggccagcggggagcctttcctggctccctctgttttctctcactgtagaccaaagagccgcttgtgtgatattaaagccactttagaaagca

SEQ ID NO: 118451 - DNA, 907 bp, Homo sapiens
  Payload ID: 3176
  Gene Symbol: C16orf59
  Gene Name: chromosome 16 open reading frame 59
  ENST ID: ENST00000567489
  CDS Start-End: 52-907
ggggcgtggctcttcagaggcggcaaattgcaaggagacgccgccgccttcatgctgccggcgggctgctcgcgccgggaaccaactgggacccgggctttgaagccacctccagggccagaaactaatggagaggacccccttccagcatgcacacccagtccacaagacctcaaagagttggagtttctgacccaggcactggagaaggctgtacgagttcgaagaggcatcactaaggccggagagagagacaaggcccccagcctgaaatctaggtccattgtcacctcttctggcacgacagcctccgccccaccgcattccccaggccaagctggtggccatgcttcagacacgagacccaccaagggcctccgccagaccacggtgcctgccaagggccaccctgagcgccggctgctgtcagtgggggatgggacccgtgttgggatgggagcccgaacccccaggcctggggcgggcctcagggaccagcaaatggccccatccgctgctcctcaggccccagaagccttcacactcaaggagaaggggcacctgctgcggctgcctgcggcattcaggaaagcagcttcccagaactcgagcctgtgggcccagctcagttccacacagaccagtgattccacggatgccgccgctgccaaaacccagttcctccagaacatgcagacagcttcaggcgggccccagcccaggctcagtgctgtggaggtggaggcggaggcggggcgcctgcggaaggcctgctcgctgctgagactgcgcatgagggaggagctctcggcagcccccatggactggatgcaggagtaccgctgcctgctcacgctggaggggctgcaggccatggtgggccagtgtctgcacaggctgcaggagc

SEQ ID NO: 118452 - DNA, 1457 bp, Homo sapiens
  Payload ID: 3176
  Gene Symbol: C16orf59
  Gene Name: chromosome 16 open reading frame 59
  ENST ID: ENST00000565716
  CDS Start-End: 1-515
gaaatctaggtccattgtcacctcttctggcacgacagcctccgccccaccgcattccccaggccaagctggtggccatgcttcagacacgagacccaccaagggcctccgccagaccacggtgcctgccaagggccaccctgagcgccggctgctgtcagtgggggatgggacccgtgttgggatgggagcccgaacccccaggcctggggcgggcctcagggaccagcaaatggccccatccgctgctcctcaggccccagaagccttcacactcaaggagaaggggcacctgctgcggctgcctgcggcattcaggaaagcagcttcccagaactcgagcctgtgggcccagctcagttccacacagaccagtgattccacggatgccgccgctgccaaaacccagttcctccagaacatgcagacagcttcaggcgggccccagcccaggctcagtgctgtggaggtggaggcggaggcggggcgcctgcggaaggcctgctcgctgctgagactgcgcatgagggaggagctctcggcagcccccatggactggatgcaggagtaccgctgcctgctcacgctggaggggctgcaggccatggtgggccagtgtctgcacaggctgcaggagctgcgtgcagcacccaggagctgcagaccctggcggccctcaagctgcgagtggctgtgctggaccagcagatccacttggaaaaggtgcttctggaagaggaggtgggggtgcaacagaggtccgcagccttgaggacccgagggtaggggcttgactgctccaccccccaggacccaggaggatgggggcaagcctggggtctgtgtgtgtgggttgggaagtgcatgggtcagacggggctgggacggcaggagggagcctggagcctcagaaggagggaggagggctgaagcatgggggcctcgaagcctgtcccaggattgccccccgcctaggtgcccctgagaccttggccctgccctgccctgcccccaggtcctgatggctgaactcctccccctggtaagcgctgcacagccgcaggggccgccctggctggccctgtgccgggctgtgcacagcctgctctgcgagggaggagcacgtgtccttaccatcctgcgggatgaacctgcagtctgagcctttcccatgctgccctcggcctgttcagatggggattgggggtgtcttccctggcactgtgctcggggacccagagatgcctgtgcttccctgggaaacctggtgaactggaccaggtggcctcactggctcttctcaggacaactaagcctgctggtcagggctggctttcagccttcctaaggctcctggactccagaggccagcggggagcctttcctggctccctctgttttctctcactgtagaccaaagagccgcttgtgtgatattaaagccactttagaaagca

SEQ ID NO: 118453 - DNA, 1864 bp, Homo sapiens
  Payload ID: 3176
  Gene Symbol: C16orf59
  Gene Name: chromosome 16 open reading frame 59
  ENST ID: ENST00000563531
  CDS Start-End: 12-1229
ccgccgccttcatgctgccggcgggctgctcgcgccggctggtggccgagctgcagggcgccctggacgcctgcgcacagcgacaattgcaattggagcagagcctgcgcgtttgccgtcggctgctgcatgcctgggaaccaactgggacccgggctttgaagccacctccagggccagaaactaatggagaggacccccttccagcatgcacacccagtccacaagacctcaaagagttggagtttctgacccaggcactggagaaggctgtacgagttcgaagaggcatcactaaggccggagagagagacaaggcccccagcctgaaatctaggtccattgtcacctcttctggcacgacagcctccgccccaccgcattccccaggccaagctggtggccatgcttcagacacgagacccaccaagggcctccgccagaccacggtgcctgccaagggccaccctgagcgccggctgctgtcagtgggggatgggacccgtgttgggatgggagcccgaacccccaggcctggggcgggcctcagggaccagcaaatggccccatccgctgctcctcaggccccagaagccttcacactcaaggagaaggggcacctgctgcggctgcctgcggcattcaggaaagcagcttcccagaactcgagcctgtgggcccagctcagttccacacagaccagtgattccacggatgccgccgctgccaaaacccagttcctccagaacatgcagacagcttcaggcgggccccagcccaggctcagtgctgtggaggtggaggcggaggcggggcgcctgcggaaggcctgctcgctgctgagactgcgcatgagggaggagctctcggcagcccccatggactggatgcaggagtaccgctgcctgctcacgctggaggggctgcaggccatggtgggccagtgtctgcacaggctgcaggagctgcgtgcagcggtggcggaacagccaccaagaccatgtcctgtggggaggccccccggagcctcgccgtcctgtgggggtagagcggagcctgcatggagcccccagctgcttgtctactccagcacccaggagctgcagaccctggcggccctcaagctgcgagtggctgtgctggaccagcagatccacttggaaaaggtgcttctggaagaggaggtgggggtgcaacagaggtccgcagccttgaggacccgagggtaggggcttgactgctccaccccccaggacccaggaggatgggggcaagcctggggtctgtgtgtgtgggttgggaagtgcatgggtcagacggggctgggacggcaggagggagcctggagcctcagaaggagggaggagggctgaagcatgggggcctcgaagcctgtcccaggattgccccccgcctaggtgcccctgagaccttggccctgccctgccctgcccccaggtcctgatggctgaactcctccccctggtaagcgctgcacagccgcaggggccgccctggctggccctgtgccgggctgtgcacagcctgctctgcgagggaggagcacgtgtccttaccatcctgcgggatgaacctgcagtctgagcctttcccatgctgccctcggcctgttcagatggggattgggggtgtcttccctggcactgtgctcggggacccagagatgcctgtgcttccctgggaaacctggtgaactggaccaggtggcctcactggctcttctcaggacaactaagcctgctggtcagggctggctttcagccttcctaaggctcctggactccagaggccagcggggagcctttcctggctccctctgttttctctcactgtagaccaaaga

SEQ ID NO: 118454 - DNA, 3894 bp, Homo sapiens
  Payload ID: 3177
  Gene Symbol: C16orf62
  Gene Name: chromosome 16 open reading frame 62
  ENST ID: ENST00000251143
  CDS Start-End: 49-3207
atagaaactacggcactctggccgtggccgacgttgctcctccgaagcatggcgccggcgggagttgtaacccgggctgtccggagcggggagctgcccctcacaagcatggcgtcagctgaaaatgaagcctgtgctgtgcggagcgtcgcctgcccctcacaagcatggcgtctgcagaaggtgctgtgcggccgctgcggggcggccagctgcccttcacaaacatggcggccgaggggtgcggggagtggcggggtaaggatgggaagccgagcagacggccccagaacaagcggtcatgtgactgggaagatggccgtctttccttggcactccaggaataggaactacaaagctgaatttgcatcatgccgactggaggctgtaccattggagtttggggactatcaccctctgaaacccataactgtcacagagtcaaagacaaagaaagtgaaccggaaaggaagcacttcttccacgtcctcctcctcctccagctccgtggtggacccgctgagcagcgtcctcgatgggactgaccccctctccatgtttgcagccactgctgaccccgcagccttggcagctgccatggacagctccagaaggaaacgtgatagagatgataactccgttgtaggatcggattttgagccttggaccaacaaacggggagaaatccttgcccggtacaccactaccgaaaagctgtctattaatctgtttatgggatctgaaaaaggcaaagctgggactgccacattggcaatgtcagagaaggtgcggacccggctggaggagctggatgactttgaggagggttcccaaaaggagctgttgaacttgactcagcaggattacgtgaaccgcatagaggagctcaaccaatcgctgaaggatgcctgggcctcagaccagaaagtgaaggctctaaaaatagtcatccagtgttcaaagcttctttcagacaccagtgttattcagttctacccaagcaaatttgtccttatcaccgacatacttgatacatttggaaagctcgtgtacgagcgcatcttttccatgtgtgtggatagccgcagcgtcttaccagatcacttttctccagagaatgcaaatgacacggccaaggaaacatgcctaaattggtttttcaagattgcctccatcagggaactcattccaagattttacgtggaggcatccatcctgaaatgtaacaaattcctctccaaaacgggaatttcagagtgcctgccccggttgacatgcatgatcagagggatcggagacccactagtgtcggtgtatgcccgtgcctacctgtgccgggtgggaatggaagtggccccacatctcaaagaaaccctaaataagaacttttttgacttcctccttacgttcaaacagattcatggggatacggtccagaaccagctggtggtccaaggagtggagctcccatcttacctccccttgtacccgcctgccatggactggatcttccagtgcatctcctaccatgcccccgaggctctgctgaccgagatgatggaaaggtgtaagaaactaggaaacaatgccttgctgttgaattctgtgatgtctgccttccgggctgagttcatcgccacaaggtctatggatttcattggcatgattaaagagtgtgatgaatctggtttccccaagcatcttctttttcgatcactgggattaaacttggccttggctgatcctcctgagagtgaccgacttcagattctcaacgaagcttggaaagtcatcactaagctgaagaacccacaggactacattaattgtgccgaagtgtgggtggaatacacctgcaagcatttcacgaaacgagaggtgaataccgttttggcagatgtcatcaagcacatgactccagatcgtgcatttgaagattcctacccccagcttcagttaataattaagaaagttattgcccacttccatgacttctcagttcttttctcagtggaaaaatttctgccgtttctggacatgttccaaaaagagagtgtgcgggtggaggtttgcaaatgcatcatggacgcctttatcaagcatcaacaagagcccaccaaggacccggtcatcttgaatgcccttttgcatgtttgcaagaccatgcatgactctgtgaatgcactcactcttgaggatgagaaaagaatgctgtcatatttgattaatggatttataaaaatggtttcctttggccgtgattttgaacaacagctgagtttttatgttgagtccaggtcgatgttttgcaatctggagcctgttcttgtgcagttgattcatagtgtgaaccggttggcaatggagacaagaaaagtaatgaaaggaaatcattccagaaagacagctgcatttgtccgggcctgtgttgcctactgcttcatcaccatcccctccctggcgggcatcttcacacgtctcaatctctacctgcattctggtcaggtggccttggccaaccagtgcctctcccaagctgatgcttttttcaaagccgctataagccttgttccggaagttccaaagatgattaatattgatgggaagatgcggccatcggaatcgttccttctggaattcctctgcaatttcttttctactttattaatagttccggatcatcctgaacatggggtcctgtttcttgttcgagagcttctcaacgtgatccaggactacacctgggaggacaacagcgatgagaaaatccgcatctacacctgcgtcctgcatctcctctccgccatgagccaggagacgtacctttaccacatagacaaagtggactccaacgacagcctctacgggggagactccaagttcctggcagaaaacaacaagctgtgtgagacggtgatggctcagatcctagagcatctgaaaaccctggccaaggacgaggccctgaagcgccagagctcgttgggcctttccttctttaacagcatcttggcccatggggacctacgcaacaacaagctcaaccagctctccgtcaacctgtggcacctggcacagaggcacggctgtgcagacaccaggaccatggtgaaaacgctagaatacatcaagaagcaaagcaaacaaccagacatgactcatctgacggagctggccctcagactccctctgcaaacaaggacctgacccccgggcccatccccaggctcagggactctggtgccaaatccagaaagatctgctctgctgccctgaactcttacggcaatttaggtttctcatttttcttttctttttacatatgtacaaattgttttaagctttggcctctatccaggttattctgacaatgaagaaatgggagttgtcagagcattaaaatgcaatcttcactaagaagcagtctctgtgttgtctttgcacaagtggccttcggtctactcagcccgatctgatgggcctttttagcaagagagaaacaagaatgcaagtaacatctttcttctctggaaggtgtttgttttttcatagtttagaaataaggactttaaaagtggactgcttttcaaagtgccactgttccagacccattccattccagactttgtaccttaaagttagagcacacccaaagtctggaactgtgttacctgaacccctatggaggatttataaaaggcagaaatagcactccattaactctttttcctatcaaaagcagctcttgattggacttagaatctgtgttggtggatcaaaggagaaagcgaggtcaaatttgagattctctgtggcttcagtatacagtaactgaataaatgtcctgaaggagcatttatgttcatgactgttcatttaattacttctgactgt

SEQ ID NO: 118455 - DNA, 3115 bp, Homo sapiens
  Payload ID: 3177
  Gene Symbol: C16orf62
  Gene Name: chromosome 16 open reading frame 62
  Uniprot ID: Q7Z3J2
  ENST ID: ENST00000417362
  CDS Start-End: 11-2902
gactgggaagatggccgtctttccttggcactccaggaataggaactacaaagctgaatttgcatcatgccgactggaggctgtaccattggagtttggggactatcaccctctgaaacccataactgtcacagagtcaaagacaaagaaagtgaaccggaaaggaagcacttcttccacgtcctcctcctcctccagctccgtggtggacccgctgagcagcgtcctcgatgggactgaccccctctccatgtttgcagccactgctgaccccgcagccttggcagctgccatggacagctccagaaggaaacgtgatagagatgataactccgttgtaggatcggattttgagccttggaccaacaaacggggagaaatccttgcccggtacaccactaccgaaaagctgtctattaatctgtttatgggatctgaaaaaggcaaagctgggactgccacattggcaatgtcagagaaggtgcggacccggctggaggagctggatgactttgaggagggttcccaaaaggagctgttgaacttgactcagcaggattacgtgaaccgcatagaggagctcaaccaatcgctgaaggatgcctgggcctcagaccagaaagtgaaggctctaaaaatagtcatccagtgttcaaagcttctttcagacaccagtgttattcagttctacccaagcaaatttgtccttatcaccgacatacttgatacatttggaaagctcgtgtacgagcgcatcttttccatgtgtgtggatagccgcagcgtcttaccagatcacttttctccagagaatgcaaatgacacggccaaggaaacatgcctaaattggtttttcaagattgcctccatcagggaactcattccaagattttacgtggaggcatccatcctgaaatgtaacaaattcctctccaaaacgggaatttcagagtgcctgccccggttgacatgcatgatcagagggatcggagacccactagtgtcggtgtatgcccgtgcctacctgtgccgggtgggaatggaagtggccccacatctcaaagaaaccctaaataagaacttttttgacttcctccttacgttcaaacagattcatggggatacggtccagaaccagctggtggtccaaggagtggagctcccatcttacctccccttgtacccgcctgccatggactggatcttccagtgcatctcctaccatgcccccgaggctctgctgaccgagatgatggaaaggtgtaagaaactaggaaacaatgccttgctgttgaattctgtgatgtctgccttccgggctgagttcatcgccacaaggtctatggatttcattggcatgattaaagagtgtgatgaatctggtttccccaagcatcttctttttcgatcactgggattaaacttggccttggctgatcctcctgagagtgaccgacttcagattctcaacgaagcttggaaagtcatcactaagctgaagaacccacaggactacattaattgtgccgaagtgtgggtggaatacacctgcaagcatttcacgaaacgagaggtgaataccgttttggcagatgtcatcaagcacatgactccagatcgtgcatttgaagattcctacccccagcttcagttaataattaagaaagttattgcccacttccatgacttctcagttcttttctcagtggaaaaatttctgccgtttctggacatgttccaaaaagagagtgtgcgggtggaggtttgcaaatgcatcatggacgcctttatcaagcatcaacaagagcccaccaaggacccggtcatcttgaatgcccttttgcatgtttgcaagaccatgcatgactctgtgaatgcactcactcttgaggatgagaaaagaatgctgtcatatttgattaatggatttataaaaatggtttcctttggccgtgattttgaacaacagctgagtttttatgttgagtccaggtcgatgttttgcaatctggagcctgttcttgtgcagttgattcatagtgtgaaccggttggcaatggagacaagaaaagtaatgaaaggaaatcattccagaaagacagctgcatttgtccgggcctgtgttgcctactgcttcatcaccatcccctccctggcgggcatcttcacacgtctcaatctctacctgcattctggtcaggtggccttggccaaccagtgcctctcccaagctgatgcttttttcaaagccgctataagccttgttccggaagttccaaagatgattaatattgatgggaagatgcggccatcggaatcgttccttctggaattcctctgcaatttcttttctactttattaatagttccggatcatcctgaacatggggtcctgtttcttgttcgagagcttctcaacgtgatccaggactacacctgggaggacaacagcgatgagaaaatccgcatctacacctgcgtcctgcatctcctctccgccatgagccaggagacgtacctttaccacatagacaaagtggactccaacgacagcctctacgggggagactccaagttcctggcagaaaacaacaagctgtgtgagacggtgatggctcagatcctagagcatctgaaaaccctggccaaggacgaggccctgaagcgccagagctcgttgggcctttccttctttaacagcatcttggcccatggggacctacgcaacaacaagctcaaccagctctccgtcaacctgtggcacctggcacagaggcacggctgtgcagacaccaggaccatggtgaaaacgctagaatacatcaagaagcaaagcaaacaaccagacatgactcatctgacggagctggccctcagactccctctgcaaacaaggacctgacccccgggcccatccccaggctcagggactctggtgccaaatccagaaagatctgctctgctgccctgaactcttacggcaatttaggtttctcatttttcttttctttttacatatgtacaaattgttttaagctttggcctctatccaggttattctgacaatgaagaaatgggagttgtcagagcattaaaatgcaatcttcactaagaa

SEQ ID NO: 118456 - DNA, 3353 bp, Homo sapiens
  Payload ID: 3177
  Gene Symbol: C16orf62
  Gene Name: chromosome 16 open reading frame 62
  ENST ID: ENST00000448695
  CDS Start-End: 262-2703
atgacggatttttggcatccttatctggactgcctttctttaggaataaacagatgatacagagcaaagtttgtaaatctcaaatgcagcggttaacctctttgaggctggcccactgggctcccaggggcagcttctaagtgggaaatgtttcgatggaattctggttacataaggaagttgctttgaaaatctgggatagttttctataatggaatcattcccttgtgtctttattcacgatgaagtgtagagtgaaagatgcctccactgggggtattggtgcacgagaaaagccacctgtgtgacgtaaattcattctgtttaggcaaagctgggactgccacattggcaatgtcagagaaggtgcggacccggctggaggagctggatgactttgaggagggttcccaaaaggagctgttgaacttgactcagcaggattacgtgaaccgcatagaggagctcaaccaatcgctgaaggatgcctgggcctcagaccagaaagtgaaggctctaaaaatagtcatccagggaaagctcgtgtacgagcgcatcttttccatgtgtgtggatagccgcagcgtcttaccagatcacttttctccagagaatgcaaatgacacggccaaggaaacatgcctaaattggtttttcaagattgcctccatcagggaactcattccaagattttacgtggaggcatccatcctgaaatgtaacaaattcctctccaaaacgggaatttcagagtgcctgccccggttgacatgcatgatcagagggatcggagacccactagtgtcggtgtatgcccgtgcctacctgtgccgggtgggaatggaagtggccccacatctcaaagaaaccctaaataagaacttttttgacttcctccttacgttcaaacagattcatggggatacggtccagaaccagctggtggtccaaggagtggagctcccatcttacctccccttgtacccgcctgccatggactggatcttccagtgcatctcctaccatgcccccgaggctctgctgaccgagatgatggaaaggtgtaagaaactaggaaacaatgccttgctgttgaattctgtgatgtctgccttccgggctgagttcatcgccacaaggtctatggatttcattggcatgattaaagagtgtgatgaatctggtttccccaagcatcttctttttcgatcactgggattaaacttggccttggctgatcctcctgagagtgaccgacttcagattctcaacgaagcttggaaagtcatcactaagctgaagaacccacaggactacattaattgtgccgaagtgtgggtggaatacacctgcaagcatttcacgaaacgagaggtgaataccgttttggcagatgtcatcaagcacatgactccagatcgtgcatttgaagattcctacccccagcttcagttaataattaagaaagttattgcccacttccatgacttctcagttcttttctcagtggaaaaatttctgccgtttctggacatgttccaaaaagagagtgtgcgggtggaggtttgcaaatgcatcatggacgcctttatcaagcatcaacaagagcccaccaaggacccggtcatcttgaatgcccttttgcatgtttgcaagaccatgcatgactctgtgaatgcactcactcttgaggatgagaaaagaatgctgtcatatttgattaatggatttataaaaatggtttcctttggccgtgattttgaacaacagctgagtttttatgttgagtccaggtcgatgttttgcaatctggagcctgttcttgtgcagttgattcatagtgtgaaccggttggcaatggagacaagaaaagtaatgaaaggaaatcattccagaaagacagctgcatttgtccgggcctgtgttgcctactgcttcatcaccatcccctccctggcgggcatcttcacacgtctcaatctctacctgcattctggtcaggtggccttggccaaccagtgcctctcccaagctgatgcttttttcaaagccgctataagccttgttccggaagttccaaagatgattaatattgatgggaagatgcggccatcggaatcgttccttctggaattcctctgcaatttcttttctactttattaatagttccggatcatcctgaacatggggtcctgtttcttgttcgagagcttctcaacgtgatccaggactacacctgggaggacaacagcgatgagaaaatccgcatctacacctgcgtcctgcatctcctctccgccatgagccaggagacgtacctttaccacatagacaaagtggactccaacgacagcctctacgggggagactccaagttcctggcagaaaacaacaagctgtgtgagacggtgatggctcagatcctagagcatctgaaaaccctggccaaggacgaggccctgaagcgccagagctcgttgggcctttccttctttaacagcatcttggcccatggggacctacgcaacaacaagctcaaccagctctccgtcaacctgtggcacctggcacagaggcacggctgtgcagacaccaggaccatggtgaaaacgctagaatacatcaagaagcaaagcaaacaaccagacatgactcatctgacggagctggccctcagactccctctgcaaacaaggacctgacccccgggcccatccccaggctcagggactctggtgccaaatccagaaagatctgctctgctgccctgaactcttacggcaatttaggtttctcatttttcttttctttttacatatgtacaaattgttttaagctttggcctctatccaggttattctgacaatgaagaaatgggagttgtcagagcattaaaatgcaatcttcactaagaagcagtctctgtgttgtctttgcacaagtggccttcggtctactcagcccgatctgatgggcctttttagcaagagagaaacaagaatgcaagtaacatctttcttctctggaaggtgtttgttttttcatagtttagaaataaggactttaaaagtggactgcttttcaaagtgccactgttccagacccattccattccagactttgtaccttaaagttagagcacacccaaagtctggaactgtgttacctgaacccctatggaggatttataaaaggcagaaatagcactccattaactctttttcctatcaaaagcagctcttgattggacttagaatctgtgttggtggatcaaaggagaaagcgaggtcaaatttgagattctctgtggcttcagtatacagtaactgaataaatgtcctgaaggagcatt

SEQ ID NO: 118457 - DNA, 3855 bp, Homo sapiens
  Payload ID: 3177
  Gene Symbol: C16orf62
  Gene Name: chromosome 16 open reading frame 62
  ENST ID: ENST00000438132
  CDS Start-End: 49-3207
atagaaactacggcactctggccgtggccgacgttgctcctccgaagcatggcgccggcgggagttgtaacccgggctgtccggagcggggagctgcccctcacaagcatggcgtcagctgaaaatgaagcctgtgctgtgcggagcgtcgcctgcccctcacaagcatggcgtctgcagaaggtgctgtgcggccgctgcggggcggccagctgcccttcacaaacatggcggccgaggggtgcggggagtggcggggtaaggatgggaagccgagcagacggccccagaacaagcggtcatgtgactgggaagatggccgtctttccttggcactccaggaataggaactacaaagctgaatttgcatcatgccgactggaggctgtaccattggagtttggggactatcaccctctgaaacccataactgtcacagagtcaaagacaaagaaagtgaaccggaaaggaagcacttcttccacgtcctcctcctcctccagctccgtggtggacccgctgagcagcgtcctcgatgggactgaccccctctccatgtttgcagccactgctgaccccgcagccttggcagctgccatggacagctccagaaggaaacgtgatagagatgataactccgttgtaggatcggattttgagccttggaccaacaaacggggagaaatccttgcccggtacaccactaccgaaaagctgtctattaatctgtttatgggatctgaaaaaggcaaagctgggactgccacattggcaatgtcagagaaggtgcggacccggctggaggagctggatgactttgaggagggttcccaaaaggagctgttgaacttgactcagcaggattacgtgaaccgcatagaggagctcaaccaatcgctgaaggatgcctgggcctcagaccagaaagtgaaggctctaaaaatagtcatccagtgttcaaagcttctttcagacaccagtgttattcagttctacccaagcaaatttgtccttatcaccgacatacttgatacatttggaaagctcgtgtacgagcgcatcttttccatgtgtgtggatagccgcagcgtcttaccagatcacttttctccagagaatgcaaatgacacggccaaggaaacatgcctaaattggtttttcaagattgcctccatcagggaactcattccaagattttacgtggaggcatccatcctgaaatgtaacaaattcctctccaaaacgggaatttcagagtgcctgccccggttgacatgcatgatcagagggatcggagacccactagtgtcggtgtatgcccgtgcctacctgtgccgggtgggaatggaagtggccccacatctcaaagaaaccctaaataagaacttttttgacttcctccttacgttcaaacagattcatggggatacggtccagaaccagctggtggtccaaggagtggagctcccatcttacctccccttgtacccgcctgccatggactggatcttccagtgcatctcctaccatgcccccgaggctctgctgaccgagatgatggaaaggtgtaagaaactaggaaacaatgccttgctgttgaattctgtgatgtctgccttccgggctgagttcatcgccacaaggtctatggatttcattggcatgattaaagagtgtgatgaatctggtttccccaagcatcttctttttcgatcactgggattaaacttggccttggctgatcctcctgagagtgaccgacttcagattctcaacgaagcttggaaagtcatcactaagctgaagaacccacaggactacattaattgtgccgaagtgtgggtggaatacacctgcaagcatttcacgaaacgagaggtgaataccgttttggcagatgtcatcaagcacatgactccagatcgtgcatttgaagattcctacccccagcttcagttaataattaagaaagttattgcccacttccatgacttctcagttcttttctcagtggaaaaatttctgccgtttctggacatgttccaaaaagagagtgtgcgggtggaggtttgcaaatgcatcatggacgcctttatcaagcatcaacaagagcccaccaaggacccggtcatcttgaatgcccttttgcatgtttgcaagaccatgcatgactctgtgaatgcactcactcttgaggatgagaaaagaatgctgtcatatttgattaatggatttataaaaatggtttcctttggccgtgattttgaacaacagctgagtttttatgttgagtccaggtcgatgttttgcaatctggagcctgttcttgtgcagttgattcatagtgtgaaccggttggcaatggagacaagaaaagtaatgaaaggaaatcattccagaaagacagctgcatttgtccgggcctgtgttgcctactgcttcatcaccatcccctccctggcgggcatcttcacacgtctcaatctctacctgcattctggtcaggtggccttggccaaccagtgcctctcccaagctgatgcttttttcaaagccgctataagccttgttccggaagttccaaagatgattaatattgatgggaagatgcggccatcggaatcgttccttctggaattcctctgcaatttcttttctactttattaatagttccggatcatcctgaacatggggtcctgtttcttgttcgagagcttctcaacgtgatccaggactacacctgggaggacaacagcgatgagaaaatccgcatctacacctgcgtcctgcatctcctctccgccatgagccaggagacgtacctttaccacatagacaaagtggactccaacgacagcctctacgggggagactccaagttcctggcagaaaacaacaagctgtgtgagacggtgatggctcagatcctagagcatctgaaaaccctggccaaggacgaggccctgaagcgccagagctcgttgggcctttccttctttaacagcatcttggcccatggggacctacgcaacaacaagctcaaccagctctccgtcaacctgtggcacctggcacagaggcacggctgtgcagacaccaggaccatggtgaaaacgctagaatacatcaagaagcaaagcaaacaaccagacatgactcatctgacggagctggccctcagactccctctgcaaacaaggacctgacccccgggcccatccccaggctcagggactctggtgccaaatccagaaagatctgctctgctgccctgaactcttacggcaatttaggtttctcatttttcttttctttttacatatgtacaaattgttttaagctttggcctctatccaggttattctgacaatgaagaaatgggagttgtcagagcattaaaatgcaatcttcactaagaagcagtctctgtgttgtctttgcacaagtggccttcggtctactcagcccgatctgatgggcctttttagcaagagagaaacaagaatgcaagtaacatctttcttctctggaaggtgtttgttttttcatagtttagaaataaggactttaaaagtggactgcttttcaaagtgccactgttccagacccattccattccagactttgtaccttaaagttagagcacacccaaagtctggaactgtgttacctgaacccctatggaggatttataaaaggcagaaatagcactccattaactctttttcctatcaaaagcagctcttgattggacttagaatctgtgttggtggatcaaaggagaaagcgaggtcaaatttgagattctctgtggcttcagtatacagtaactgaataaatgtcctgaaggagca

SEQ ID NO: 118458 - DNA, 520 bp, Homo sapiens
  Payload ID: 3177
  Gene Symbol: C16orf62
  Gene Name: chromosome 16 open reading frame 62
  ENST ID: ENST00000537186
  CDS Start-End: 11-133
gactgggaagatggccgtctttccttggcactccaggaataggaactacaaagctgaatttgcatcatgccgactggaggctgtaccattggagtttggggactatcaccctctgaaacccataactttgtgatcctgagtcatgtccatttgtcacaaaaactaagcatcccctgcagatggttaagtctctgctgcaaatgaaccatccattcaactaccagaatgggaggaaagtacccactggagtgtttcactggagagagttgtgggagttccgttttacctccagaaattttcctcacaggtcacagagtcaaagacaaagaaagtgaaccggaaaggaagcacttcttccacgtcctcctcctcctccagctccgtggtggacccgctgagcagcgtcctcgatgggactgaccccctctccatgtttgcagccactgctgaccccgcagccttggcagctgccatggacagctccagaaggaaacgtgatagagatgataactccgttgta

SEQ ID NO: 118459 - DNA, 1300 bp, Homo sapiens
  Payload ID: 3177
  Gene Symbol: C16orf62
  Gene Name: chromosome 16 open reading frame 62
  ENST ID: ENST00000539322
  CDS Start-End: 49-870
atagaaactacggcactctggccgtggccgacgttgctcctccgaagcatggcgccggcgggagttgtaacccgggctgtccggagcggggagctgcccctcacaagcatggcgtcagctgaaaatgaagcctgtgctgtgcggagcgtcgcctgcccctcacaagcatggcgtctgcagaaggtgctgtgcggccgctgcggggcggccagctgcccttcacaaacatggcggccgaggggtgcggggagtggcggggtaaggatgggaagccgagcagacggccccagaacaagcggtcatgtgactgggaagatggccgtctttccttggcactccaggaataggaactacaaagctgaatttgcatcatgccgactggaggctgtaccattggagtttggggactatcaccctctgaaacccataactgtcacagagtcaaagacaaagaaagtgaaccggaaaggaagcacttcttccacgtcctcctcctcctccagctccgtggtggacccgctgagcagcgtcctcgatgggactgaccccctctccatgtttgcagccactgctgaccccgcagccttggcagctgccatggacagctccagaaggaaacgtgatagagatgataactccgttgtaggatcggattttgagccttggaccaacaaacggggagaaatccttgcccggtacaccactaccgaaaagctgtctattaatctgtttatgggatctgaaaaagatggaggttacagtgagccgagatcgcgccaccgcactccagcgtggacgacagagcaaagctgggactgccacattggcaatgtcagagaaggtgcggacccggctggaggagctggatgactttgaggagggttcccaaaaggagctgttgaacttgactcagcaggattacgtgaaccgcatagaggagctcaaccaatcgctgaaggatgcctgggcctcagaccagaaagtgaaggctctaaaaatagtcatccagtgttcaaagcttctttcagacaccagtgttattcagttctacccaagcaaatttgtccttatcaccgacatacttgatacatttggaaagctcgtgtacgagcgcatcttttccatgtgtgtggatagccgcagcgtcttaccagatcacttttctccagagaatgcaaatgacacggccaaggaaacatgcctaaattggtttttcaagattgcctccatcagggaactcattccaagattttacgtggaggcatccatcctgaaatgtaacaaattcctctccaaaacg

SEQ ID NO: 118460 - DNA, 3138 bp, Homo sapiens
  Payload ID: 3177
  Gene Symbol: C16orf62
  Gene Name: chromosome 16 open reading frame 62
  ENST ID: ENST00000542263
  CDS Start-End: 48-2927
tagaaactacggcactctggccgtggccgacgttgctcctccgaagcatggcgccggcgggagttgtaacccgggctgtccggagcggggagctgcccctcacaagcatggcgtcagctgaaaatgaagcctgtgctgtgcggagcgtcgcctgcccctcacaagcatggcgtctgcagaaggtgctgtgcggccgctgcggggcggccagctgcccttcacaaacatggcggccgaggggtgcggggagtggcggggtaaggatgggaagccgagcagacggccccagaacaagcggtcatgtgactgggaagatggccgtctttccttggcactccaggaataggaactacaaagctgaatttgcatcatgccgactggaggctgtaccattggagtttggggactatcaccctctgaaacccataactgtcacagagtcaaagacaaagaaagtgaaccggaaaggaagcacttcttccacgtcctcctcctcctccagctccgtggtggacccgctgagcagcgtcctcgatgggactgaccccctctccatgtttgcagccactgctgaccccgcagccttggcagctgccatggacagctccagaaggaaacgtgatagagatgataactccgttgtaggatcggattttgagccttggaccaacaaacggggagaaatccttgcccggtacaccactaccgaaaagctgtctattaatctgtttatgggatctgaaaaaggcaaagctgggactgccacattggcaatgtcagagaaggtgcggacccggctggaggagctggatgactttgaggagggttcccaaaaggagctgttgaacttgactcagcaggattacgtgaaccgcatagaggagctcaaccaatcgctgaaggatgcctgggcctcagaccagaaagtgaaggctctaaaaatagtcatccagtgttcaaagcttctttcagacaccagtgttattcagttctacccaagcaaatttgtccttatcaccgacatacttgatacatttggaaagctcgtgtacgagcgcatcttttccatgtgtgtggatagccgcagcgtcttaccagatcacttttctccagagaatgcaaatgacacggccaaggaaacatgcctaaattggtttttcaagattgcctccatcagggaactcattccaagattttacgtggaggcatccatcctgaaatgtaacaaattcctctccaaaacgggaatttcagagtgcctgccccggttgacatgcatgatcagagggatcggagacccactagtgtcggtgtatgcccgtgcctacctgtgccgggctctgctgaccgagatgatggaaaggtgtaagaaactaggaaacaatgccttgctgttgaattctgtgatgtctgccttccgggctgagttcatcgccacaaggtctatggatttcattggcatgattaaagagtgtgatgaatctggtttccccaagcatcttctttttcgatcactgggattaaacttggccttggctgatcctcctgagagtgaccgacttcagattctcaacgaagcttggaaagtcatcactaagctgaagaacccacaggactacattaattgtgccgaagtgtgggtggaatacacctgcaagcatttcacgaaacgagaggtgaataccgttttggcagatgtcatcaagcacatgactccagatcgtgcatttgaagattcctacccccagcttcagttaataattaagaaagttattgcccacttccatgacttctcagttcttttctcagtggaaaaatttctgccgtttctggacatgttccaaaaagagagtgtgcgggtggaggtttgcaaatgcatcatggacgcctttatcaagcatcaacaagagcccaccaaggacccggtcatcttgaatgcccttttgcatgtttgcaagaccatgcatgactctgtgaatgcactcactcttgaggatgagaaaagaatgctgtcatatttgattaatggatttataaaaatggtttcctttggccgtgattttgaacaacagctgagtttttatgttgagtccaggtcgatgttttgcaatctggagcctgttcttgtgcagttgattcatgcctgtgttgcctactgcttcatcaccatcccctccctggcgggcatcttcacacgtctcaatctctacctgcattctggtcaggtggccttggccaaccagtgcctctcccaagctgatgcttttttcaaagccgctataagccttgttccggaagttccaaagatgattaatattgatgggaagatgcggccatcggaatcgttccttctggaattcctctgcaatttcttttctactttattaatagttccggatcatcctgaacatggggtcctgtttcttgttcgagagcttctcaacgtgatccaggactacacctgggaggacaacagcgatgagaaaatccgcatctacacctgcgtcctgcatctcctctccgccatgagccaggagacgtacctttaccacatagacaaagtggactccaacgacagcctctacgggggagactccaagttcctggcagaaaacaacaagctgtgtgagacggtgatggctcagatcctagagcatctgaaaaccctggccaaggacgaggccctgaagcgccagagctcgttgggcctttccttctttaacagcatcttggcccatggggacctacgcaacaacaagctcaaccagctctccgtcaacctgtggcacctggcacagaggcacggctgtgcagacaccaggaccatggtgaaaacgctagaatacatcaagaagcaaagcaaacaaccagacatgactcatctgacggagctggccctcagactccctctgcaaacaaggacctgacccccgggcccatccccaggctcagggactctggtgccaaatccagaaagatctgctctgctgccctgaactcttacggcaatttaggtttctcatttttcttttctttttacatatgtacaaattgttttaagctttggcctctatccaggttattctgacaatgaagaaatgggagttgtcagagcattaaaatgcaatcttcactaag

SEQ ID NO: 118461 - DNA, 573 bp, Homo sapiens
  Payload ID: 3177
  Gene Symbol: C16orf62
  Gene Name: chromosome 16 open reading frame 62
  ENST ID: ENST00000567245
  CDS Start-End: 5-511
gaagatggccgtctttccttggcactccaggaataggaactacaaagctgaatttgcatcatgccgactggaggctgtaccattggagtttggggactatcaccctctgaaacccataactgtcacagagtcaaagacaaagaaagtgaaccggaaaggaagcacttcttccacgtcctcctcctcctccagctccgtggtggacccgctgagcagcgtcctcgatgggactgaccccctctccatgtttgcagccactgctgaccccgcagccttggcagctgccatggacagctccagaaggaaacgtgatagagatgataactccgttgtaggatcggattttgagccttggaccaacaaacggggagaaatccttgcccggtacaccactaccgaaaagctgtctattgcaaagctgggactgccacattggcaatgtcagagaaggtgcggacccggctggaggagctggatgactttgaggagggttcccaaaaggagctgttgaacttgactcagcaggattacgtgaaccgcatagaggagctcaaccaatcgctgaaggatgcc

SEQ ID NO: 118462 - DNA, 570 bp, Homo sapiens
  Payload ID: 3177
  Gene Symbol: C16orf62
  Gene Name: chromosome 16 open reading frame 62
  ENST ID: ENST00000544670
  CDS Start-End: 285-570
aaaaccaggtactggctgaacctcagtttgcgtcttcgctccgccgccttctggagtcctttctgcccctagaggacgcaggcactccaggaataggaactacaaagctgaatttgcatcatgccgactggaggctgtaccattggagtttggggactatcaccctctgaaacccataactgtcacagagtcaaagacaaagaaagtgaaccggaaaggaagcacttcttccacgtcctcctcctcctccagctccgtggtggacccgctgagcagcgtcctcgatgggactgaccccctctccatgtttgcagccactgctgaccccgcagccttggcagctgccatgctccagaaggaaacgtgatagagatgataactccgttgtaggatcggattttgagccttggaccaacaaacggggagaaatccttgcccggtacaccactaccgaaaagctgtctattaatctgtttatgggatctgaaaaaggcaaagctgggactgccacattggcaatgtcagagaaggtgcggacccggctggaggagctggatgactttgaggagg

SEQ ID NO: 118463 - DNA, 586 bp, Homo sapiens
  Payload ID: 3177
  Gene Symbol: C16orf62
  Gene Name: chromosome 16 open reading frame 62
  ENST ID: ENST00000563649
  CDS Start-End: 1-220
aatctgtttatgggatctgaaaaagggttcccaaaaggagctgttgaacttgactcagcaggattacgtgaaccgcatagaggagctcaaccaatcgctgaaggatgcctgggcctcagaccagaaagtgaaggctctaaaaatagtcatccaggttagctctagtgatcccccacccccacccagaatttcctatgtaaaattccactgtgagacttagagttttcaggggcctacctgcagggtcttactcttgttttctcatccctttctttttcatatacttcctgtgaaaagccatgattatgaatctgtgtttttatgagatggctaatcccagggttaccatgtgcagctgcacaggttgtgcactgcacaactccaggaagcactcttcaccctaggttacagaactgatgataccccatgtgttgtgcagtacattaaccatggtgcaacccctgacacatttatgatttgtacacactaaagattgagcaactttctttcgggattccttgaccgcattcgcttggtgtctttgggattaatgacgtgtccctaataaatgaatatttcagacata

SEQ ID NO: 118464 - DNA, 1841 bp, Homo sapiens
  Payload ID: 3177
  Gene Symbol: C16orf62
  Gene Name: chromosome 16 open reading frame 62
  ENST ID: ENST00000542027
  CDS Start-End: 1-349
cctggccaaggacgaggccctgaagcgccagagctcgttgggcctttccttctttaacagcatcttggcccatggggacctacgcaacaacaagctcaaccagctctccgtcaacctgtggcacctggcacagaggcacggctgtgcagacaccaggaccatgggtcttgatatgctgcctggaactgttactgccatctttgtactagccttgatgaagccaacactggagatgatggagagaatgcttccttggcgagctgttgaaccaggccctaatcaggccttcctgccacgtgagactgaactttctggccatcgaggcctgcctgggctgggatgtctgtaggaggcatgttcaggccaaacgatcgtgaaaatgtcccagtcagaacctgtattttgggatgcaaaaagctaggtgagtggaaagaaggtggtcacagatggtcacatgcgacttgggccactggacctggagctctttgaggcttgctgtagagtccaggcttggaaacgctgtccccacagccgatgaggcaacttcccgtgtcatctccacacgttcatctcctcctggcattcaatatccacctacagaagtcacctgggattctcttccttgtgataaaaaagaatctcatcagacacatccctggggctgggcacagtggctcacacctgtgatcccagctcttgggggctgaggcaggagcatgagttgagtccaggagtttgggactagcctggacaatatagtgagaccccatctctacaaaaaattttaaacactagctggttgttgtggtgcacacccacagtcccagctacttgggaggctgaggtgggaggatcacttaagctggataggtagtggttgcaacaagccgtgatatgccactacactccagcctgggtgacagagtgagagcctatctcaaaacacacacacacgtccctgggatctgccattgattcatttgcgggactaaccactcttcctaaaatgccttgttcagaatccagtcaaagcacaaaaatcctacctcagcacttagggccgaagggacaccagtggaaaaggcaggactggtttagaggcacatttcccagcagcagcagctcagtcacatgtgtttggtaacaactcagacacctctctgcctacagctgctctatgacaggggaaaggaaaaggaaggaaaaggagtttgcgattctccgttcctcattcactccactttttatcagagatgcagacttgtcataaaactttttcctccatctaaagacatttcaatccccaacgaggattctggtggaaattccctaaaggggacattcagagtggcgaatagtgaacttagggcttcgggtacaaaagtacaacaccctgcacttagtggctgggtgaccccaggcaattttattactttatccctgaacctcagttgcctcatctataagatggggctaataatagcacccatttcataattatgaagattaaatacattaaggaaaacactagtatgtccctagtacctgctaaacactcaacaaaagttaactgtacatactgatgtctcaaacagggacggaatgtttaacacagaaaacaggaggttttagcactcactcgttctcctggctcccgaaatatgagctgccctgccccagttcatccaagcccatcaatatagttgtcctcgtccttaatctccacaggtgttcaatgtgagccaactgtcagatggctttcatttgcacaactgaataaaccatttatgcctagtgttccattactggaacgctaagcttatgggagttatttatatctt

SEQ ID NO: 118465 - DNA, 3352 bp, Homo sapiens
  Payload ID: 3177
  Gene Symbol: C16orf62
  Gene Name: chromosome 16 open reading frame 62
  ENST ID: ENST00000543152
  CDS Start-End: 564-2702
atgacggatttttggcatccttatctggactgcctttctttaggaataaacagatgatacagagcaaagtttgtaaatctcaaatgcagcggttaacctctttgaggctggcccactgggctcccaggggcagcttctaagtgggaaatgtttcgatggaattctggttacataaggaagttgctttgaaaatctgggatagttttctataatggaatcattcccttgtgtctttattcacgatgaagtgtagagtgaaagatgcctccactgggggtattggtgcacgagaaaagccacctgtgtgacgtaaattcattctgtttaggcaaagctgggactgccacattggcaatgtcagagaaggtgcggacccggctggaggagctggatgactttgaggagggttcccaaaaggagctgttgaacttgactcagcaggattacgtgaaccgcatagaggagctcaaccaatcgctgaaggatgcctgggcctcagaccagaaagtgaaggctctaaaaatagtcatccaggaaagctcgtgtacgagcgcatcttttccatgtgtgtggatagccgcagcgtcttaccagatcacttttctccagagaatgcaaatgacacggccaaggaaacatgcctaaattggtttttcaagattgcctccatcagggaactcattccaagattttacgtggaggcatccatcctgaaatgtaacaaattcctctccaaaacgggaatttcagagtgcctgccccggttgacatgcatgatcagagggatcggagacccactagtgtcggtgtatgcccgtgcctacctgtgccgggtgggaatggaagtggccccacatctcaaagaaaccctaaataagaacttttttgacttcctccttacgttcaaacagattcatggggatacggtccagaaccagctggtggtccaaggagtggagctcccatcttacctccccttgtacccgcctgccatggactggatcttccagtgcatctcctaccatgcccccgaggctctgctgaccgagatgatggaaaggtgtaagaaactaggaaacaatgccttgctgttgaattctgtgatgtctgccttccgggctgagttcatcgccacaaggtctatggatttcattggcatgattaaagagtgtgatgaatctggtttccccaagcatcttctttttcgatcactgggattaaacttggccttggctgatcctcctgagagtgaccgacttcagattctcaacgaagcttggaaagtcatcactaagctgaagaacccacaggactacattaattgtgccgaagtgtgggtggaatacacctgcaagcatttcacgaaacgagaggtgaataccgttttggcagatgtcatcaagcacatgactccagatcgtgcatttgaagattcctacccccagcttcagttaataattaagaaagttattgcccacttccatgacttctcagttcttttctcagtggaaaaatttctgccgtttctggacatgttccaaaaagagagtgtgcgggtggaggtttgcaaatgcatcatggacgcctttatcaagcatcaacaagagcccaccaaggacccggtcatcttgaatgcccttttgcatgtttgcaagaccatgcatgactctgtgaatgcactcactcttgaggatgagaaaagaatgctgtcatatttgattaatggatttataaaaatggtttcctttggccgtgattttgaacaacagctgagtttttatgttgagtccaggtcgatgttttgcaatctggagcctgttcttgtgcagttgattcatagtgtgaaccggttggcaatggagacaagaaaagtaatgaaaggaaatcattccagaaagacagctgcatttgtccgggcctgtgttgcctactgcttcatcaccatcccctccctggcgggcatcttcacacgtctcaatctctacctgcattctggtcaggtggccttggccaaccagtgcctctcccaagctgatgcttttttcaaagccgctataagccttgttccggaagttccaaagatgattaatattgatgggaagatgcggccatcggaatcgttccttctggaattcctctgcaatttcttttctactttattaatagttccggatcatcctgaacatggggtcctgtttcttgttcgagagcttctcaacgtgatccaggactacacctgggaggacaacagcgatgagaaaatccgcatctacacctgcgtcctgcatctcctctccgccatgagccaggagacgtacctttaccacatagacaaagtggactccaacgacagcctctacgggggagactccaagttcctggcagaaaacaacaagctgtgtgagacggtgatggctcagatcctagagcatctgaaaaccctggccaaggacgaggccctgaagcgccagagctcgttgggcctttccttctttaacagcatcttggcccatggggacctacgcaacaacaagctcaaccagctctccgtcaacctgtggcacctggcacagaggcacggctgtgcagacaccaggaccatggtgaaaacgctagaatacatcaagaagcaaagcaaacaaccagacatgactcatctgacggagctggccctcagactccctctgcaaacaaggacctgacccccgggcccatccccaggctcagggactctggtgccaaatccagaaagatctgctctgctgccctgaactcttacggcaatttaggtttctcatttttcttttctttttacatatgtacaaattgttttaagctttggcctctatccaggttattctgacaatgaagaaatgggagttgtcagagcattaaaatgcaatcttcactaagaagcagtctctgtgttgtctttgcacaagtggccttcggtctactcagcccgatctgatgggcctttttagcaagagagaaacaagaatgcaagtaacatctttcttctctggaaggtgtttgttttttcatagtttagaaataaggactttaaaagtggactgcttttcaaagtgccactgttccagacccattccattccagactttgtaccttaaagttagagcacacccaaagtctggaactgtgttacctgaacccctatggaggatttataaaaggcagaaatagcactccattaactctttttcctatcaaaagcagctcttgattggacttagaatctgtgttggtggatcaaaggagaaagcgaggtcaaatttgagattctctgtggcttcagtatacagtaactgaataaatgtcctgaaggagcatt

SEQ ID NO: 118466 - DNA, 2501 bp, Homo sapiens
  Payload ID: 3177
  Gene Symbol: C16orf62
  Gene Name: chromosome 16 open reading frame 62
  ENST ID: ENST00000513947
  CDS Start-End: 5-1360
gaagatggccgtctttccttggcactccaggaataggaactacaaagctgaatttgcatcatgccgactggaggctgtaccattggagtttggggactatcaccctctgaaacccataactgtcacagagtcaaagacaaagaaagtgaaccggaaaggaagcacttcttccacgtcctcctcctcctccagctccgtggtggacccgctgagcagcgtcctcgatgggactgaccccctctccatgtttgcagccactgctgaccccgcagccttggcagctgccatggacagctccagaaggaaacgtgatagagatgataactccgttgtaggatcggattttgagccttggaccaacaaacggggagaaatccttgcccggtacaccactaccgaaaagctgtctattaatctgtttatgggatctgaaaaaggcaaagctgggactgccacattggcaatgtcagagaaggtgcggacccggctggaggagctggatgactttgaggagggttcccaaaaggagctgttgaacttgactcagcaggattacgtgaaccgcatagaggagctcaaccaatcgctgaaggatgcctgggcctcagaccagaaagtgaaggctctaaaaatagtcatccagtgttcaaagcttctttcagacaccagtgttattcagttctacccaagcaaatttgtccttatcaccgacatacttgatacatttggaaagctcgtgtacgagcgcatcttttccatgtgtgtggatagccgcagcgtcttaccagatcacttttctccagagaatgcaaatgacacggccaaggaaacatgcctaaattggtttttcaagattgcctccatcagggaactcattccaagattttacgtggaggcatccatcctgaaatgtaacaaattcctctccaaaacgggaatttcagagtgcctgccccggttgacatgcatgatcagagggatcggagacccactagtgtcggtgtatgcccgtgcctacctgtgccgggtgggaatggaagtggccccacatctcaaagaaaccctaaataagaacttttttgacttcctccttacgttcaaacagattcatggggatacggtccagaaccagctggtggtccaaggagtggagctcccatcttacctccccttgtacccgcctgccatggactggatcttccagtgcatctcctaccatgcccccgaggtaactgccaggtggcttcagtgtgacgctcacctcctgtatggtgacagcccctgcccactgtgccctttaacgttaatgggaccctttcataacagctatagcaatgttagtgctagccagcctttatagagggcttgccatggtggctggctctgtgctgagtgcttttctgagatagtctcattttgacagctgtggaaggggaatgtggtagctccagaggccatgtacctaagtgaggccacacagctagaaagcagtttggtggctgggtgtgctcatatctgtaatcccagcactttgcaaggccaaggtgggaggatcacttgattttaggagtttgagacgagctttggcaacatagcaaaactccatctctacaaaaaaatagaaaaaattagccagacacggtgatatatgcctatagtcccagctactcaggaggctgaggtgggaggaccacttgagccccagagttcaaggctacaatgagctgtgactgtactactgcactccagcctgagtgacagagcaagacactgtctcattaaaaaagaaacaaaaaggaagatggttggtgacttgatacaaacccatagaattgggctccagggccaacaagccttattgcgtcttcacttaaccttcatgtaccccttttgtgtttataataatccaataaagtctgtagagcaggtattttatggaaggaaaacaaaactcagatgcttaatttcttttataattttatttttcttttcttttttcttttttgccagttgaagtattgtcaggaattgaagtgacatcagaatcatagcagacacatattttctttcttttccaagactgagaagcagttttagtagaacaccaattcaaactgtcatgaagactgtgataggccgggcacggtggctcatgcctgtaatcccagcactttgggaggctgacgtgggtagttcacttcaggccagcagttcaagaccagcctggctaacatggatatataggtgtatatcaccatgcctggctaattttttgtatttttttgtagagatggagtttcactatgttgcccaggcctgtcttttgtaaagaccctgtctctacaaaaaatacaaaaattaactgtgcgtggtggtttgtgcctgtagtcccagctactcaggaggctgaggcagagaatcgcttgaacctgggaggcagaggtcgcagtgagccgagattgcaccactgtactccagcctgggcaacagagccagactgt

SEQ ID NO: 118467 - DNA, 552 bp, Homo sapiens
  Payload ID: 3177
  Gene Symbol: C16orf62
  Gene Name: chromosome 16 open reading frame 62
  ENST ID: ENST00000538552
  CDS Start-End: 266-552
agaggcagtggctaagaatgtcggccgcagggccagagtgcctgggttgaattctaactcttacatttgcttgctgtgtgccttggatcacttttctccagagaatgcaaatgacacggccaaggaaacatgcctaaattggtttttcaagattgcctccatcagggaactcattccaagattttacgtggaggcatccatcctgaaatgtaacaaattcctctccaaaacgggaatttcagagtgcctgccccggttgacatgcatgatcagagggatcggagacccactagtgtcggtgtatgcccgtgcctacctgtgccgggtgggaatggaagtggccccacatctcaaagaaaccctaaataagaacttttttgacttcctccttacgttcaaacagattcatggggatacggtccagaaccagctggtggtccaaggagtggagctcccatcttacctccccttgtacccgcctgccatggactggatcttccagtgcatctcctaccatgcccccgaggctctgctgaccgagatgatggaaag

SEQ ID NO: 118468 - DNA, 2865 bp, Homo sapiens
  Payload ID: 3178
  Gene Symbol: C16orf70
  Gene Name: chromosome 16 open reading frame 70
  Uniprot ID: Q9BSU1
  ENST ID: ENST00000219139
  CDS Start-End: 189-1457
aggtgaggtgaagtgaggtgaggtgtggtgttgggccggtgctgctgccgctgccgccggggaggaggtggaaagcggggctgtggcgggccggcgggggcggcctgtcagccgctgctttgtctccttagctcgggtcccttctgcgctgccgcagggaggccgcccgggccaggcgagccgaaccaatgctggacctggaggtagtgcccgaacgctctctggggaacgagcaatgggaattcacgctgggaatgcctctggctcaggcagtagccattcttcagaagcactgtcgcatcatcaaaaacgtccaggttctctacagtgaacagtctcctctaagccatgacctcattcttaacctgactcaggacgggatcaaactaatgtttgatgctttcaatcagagacttaaggtgatcgaagtatgtgatttgactaaagtaaagttaaaatattgtggcgtgcattttaattctcaggccatagctcctaccattgaacagattgaccagtcttttggcgcaacccatcctggagtgtacaactccgctgagcagctcttccatctcaacttcagaggactgtctttctcttttcagttagactcatggactgaggctccaaagtatgagcccaattttgcccatggcctggcttctctccagataccccatggagcaactgtaaaacgaatgtacatctacagtggcaacagcctgcaggataccaaggctcccatgatgcctctgagctgtttcctgggcaatgtctatgctgagagtgtagatgttcttcgagatggaactggacctgcaggtttacgacttcgcctacttgctgcaggttgtggacctggcctattagcagatgccaagatgcgggtatttgaacgttcagtgtattttggtgattcctgccaagatgttcttagcatgcttggctctccacacaaagtcttctataaatcagaagacaagatgaaaattcattctccttcccctcataaacaagttccatcgaagtgtaatgactacttttttaactacttcactcttggagtggacatcctctttgatgcgaatacacacaaagtgaagaagtttgttctacacaccaattaccctgggcattataatttcaacatttatcatcgctgtgagttcaagatcccactagccataaagaaagaaaacgcagatggtcagacagaaacatgcacgacctacagcaagtgggacaacatccaggagctcctgggccaccctgtggagaagcctgttgtcctgcacaggtcttcctccccaaacaacaccaacccatttggttccacattctgctttggtcttcagcgaatgatctttgaggtcatgcagaacaaccacattgcctcggtgaccctgtatggcccccccaggcctggtagccacctgagaacagcggaactcccctagggacaccaccacccatgcccctctgtcccgtggaactgtgcatcacatcctgctcagtgggcctctgtaccaccctgtgggttttcttggacacctggccagtgctgaagggctgttgtgatgttctgaggttgggctcaggctgggtgctctgccatgggctgagtggcccagatattcttctgtccatctttggcctgctggtgccagcaggggacacagactgcaaagagaagcacaaagtttgagccttgattcctggacccaggagctctcaactaacaaggaggcaggagaggtcaacccttgtcccatgcacattgggaagacttggggctctttctgtgactgaggacacaggcacccaggataaggacaaggtcctgcctttggctccacattgccacatgacccttaaggcaagcaggtagcgtgtccatagtacttggttgcgacatttgcactacatccactttagttacttgatgagctggctgtggccagggtggcccacctgcccttccctgttcctttcttgcacgcgctccctgcctgggcacaccaaactggttgaaacacagctttctaccatccaggtacatgcccaggcctggttctcacccctgttggagtcagctttcaagattgcctgtgcccctgctctgccccatcctggctggcagggctgcatgtttccatcctgtttgcctcttttatttaatgccaaagttttagccaaagacatcttcctacttttgttgtgtttcagcattctgttctgcactgtgggctggctctctgccccaaccctgggcactggcccctggctgggccatttcatggctcaaagcctctgggggctcaaggaaggctgggctgctcagtcccttcatgggtcttgctaatggaaagtagcatatatgtgctttaaaaatattaatccttttgaaaagaactgagaagaaaaatgtataattttatcccatttttaatattttggtctagcaacttgtgatacatagatgacaattttgtgagtttttcaaatgtgtgtacagatttttgtaaatatgactcttttgtaattaactcatgtacagcctcatcctgtatagtttaatgatgaatgtgcaggggacctgtctcaggctcctatatggttcctgggccttatagccaggtttgtgtggcgctcccgacttttgtgactgactggtgtcttcccatttggactgtggcctggccagagccccttgcatatccccactgtcaggggcagccaggactgttcccatcctcctggaatgggggaaccttccttatcccctgcccacatcccctctccaataaagcacctgtgccctcagcaatggcctgccatgtgctgttgctgggatgtttgtattaa

SEQ ID NO: 118469 - DNA, 1353 bp, Homo sapiens
  Payload ID: 3178
  Gene Symbol: C16orf70
  Gene Name: chromosome 16 open reading frame 70
  Uniprot ID: Q9BSU1
  ENST ID: ENST00000569600
  CDS Start-End: 85-1353
ttgcccccgctgccgcggctgctgcagctcgggtcccttctgcgctgccgcagggaggccgcccgggccaggcgagccgaaccaatgctggacctggaggtagtgcccgaacgctctctggggaacgagcaatgggaattcacgctgggaatgcctctggctcaggcagtagccattcttcagaagcactgtcgcatcatcaaaaacgtccaggttctctacagtgaacagtctcctctaagccatgacctcattcttaacctgactcaggacgggatcaaactaatgtttgatgctttcaatcagagacttaaggtgatcgaagtatgtgatttgactaaagtaaagttaaaatattgtggcgtgcattttaattctcaggccatagctcctaccattgaacagattgaccagtcttttggcgcaacccatcctggagtgtacaactccgctgagcagctcttccatctcaacttcagaggactgtctttctcttttcagttagactcatggactgaggctccaaagtatgagcccaattttgcccatggcctggcttctctccagataccccatggagcaactgtaaaacgaatgtacatctacagtggcaacagcctgcaggataccaaggctcccatgatgcctctgagctgtttcctgggcaatgtctatgctgagagtgtagatgttcttcgagatggaactggacctgcaggtttacgacttcgcctacttgctgcaggttgtggacctggcctattagcagatgccaagatgcgggtatttgaacgttcagtgtattttggtgattcctgccaagatgttcttagcatgcttggctctccacacaaagtcttctataaatcagaagacaagatgaaaattcattctccttcccctcataaacaagttccatcgaagtgtaatgactacttttttaactacttcactcttggagtggacatcctctttgatgcgaatacacacaaagtgaagaagtttgttctacacaccaattaccctgggcattataatttcaacatttatcatcgctgtgagttcaagatcccactagccataaagaaagaaaacgcagatggtcagacagaaacatgcacgacctacagcaagtgggacaacatccaggagctcctgggccaccctgtggagaagcctgttgtcctgcacaggtcttcctccccaaacaacaccaacccatttggttccacattctgctttggtcttcagcgaatgatctttgaggtcatgcagaacaaccacattgcctcggtgaccctgtatggcccccccaggcctggtagccacctgagaacagcggaactcccctag

SEQ ID NO: 118470 - DNA, 525 bp, Homo sapiens
  Payload ID: 3178
  Gene Symbol: C16orf70
  Gene Name: chromosome 16 open reading frame 70
  ENST ID: ENST00000566026
  CDS Start-End: 30-525
aggccgcccgggccaggcgagccgaaccaatgctggacctggaggtagtgcccgaacgctctctggggaacgagcaatgggaattcacgctgggaatgcctctggctcaggcagtagccattcttcagaagcactgtcgcatcatcaaaaacgtccaggttctctacagtgaacaggtgatcgaagtatgtgatttgactaaagtaaagttaaaatattgtggcgtgcattttaattctcaggccatagctcctaccattgaacagattgaccagtcttttggcgcaacccatcctggagtgtacaactccgctgagcagctcttccatctcaacttcagaggactgtctttctcttttcagttagactcatggactgaggctccaaagtatgagcccaattttgcccatggcctggcttctctccagataccccatggagcaactgtaaaacgaatgtacatctacagtggcaacagcctgcaggataccaaggctcccatgatgcctctgagctgtttcctgg

SEQ ID NO: 118471 - DNA, 768 bp, Homo sapiens
  Payload ID: 3178
  Gene Symbol: C16orf70
  Gene Name: chromosome 16 open reading frame 70
  ENST ID: ENST00000569914
  CDS Start-End: 101-768
gttgcccccgctgccgcggctgctgcaggtgaggtgaagtgagctcgggtcccttctgcgctgccgcagggaggccgcccgggccaggcgagccgaaccaatgctggacctggaggtagtgcccgaacgctctctggggaacgagcaatgggaattcacgctgggaatgcctctggctcaggcagtagccattcttcagaagcactgtcgcatcatcaaaaacgtccaggttctctacagtgaacaggtgatcgaagtatgtgatttgactaaagtaaagttaaaatattgtggcgtgcattttaattctcaggccatagctcctaccattgaacagattgaccagtcttttggcgcaacccatcctggagtgtacaactccgctgagcagctcttccatctcaacttcagaggactgtctttctcttttcagttagactcatggactgaggctccaaagtatgagcccaattttgcccatggcctggcttctctccagataccccatggagcaactgtaaaacgaatgtacatctacagtggcaacagcctgcaggataccaaggctcccatgatgcctctgagctgtttcctgggcaatgtctatgctgagagtgtagatgttcttcgagatggaactggacctgcaggtttacgacttcgcctacttgctgcaggttgtggacctggcctattagcagatgccaagatgcgggtatttgaacgttcagtgtattttggtgattcctgccaagatgttcttagcat

SEQ ID NO: 118472 - DNA, 1025 bp, Homo sapiens
  Payload ID: 3178
  Gene Symbol: C16orf70
  Gene Name: chromosome 16 open reading frame 70
  ENST ID: ENST00000563853
  CDS Start-End: 64-1025
cgtcgttgcccccgctgccgcggctgctgcagggaggccgcccgggccaggcgagccgaaccaatgctggacctggaggtagtgcccgaacgctctctggggaacgagcaatgggaattcacgctgggaatgcctctggctcaggcagtagccattcttcagaagcactgtcgcatcatcaaaaacgtccaggttctctacagtgaacagtctcctctaagccatgacctcattcttaacctgactcaggacgggatcaaactaatgtttgatgctttcaatcagagacttaaggtgatcgaagtatgtgatttgactaaagtaaagttaaaatattgtggcgtgcattttaattctcaggccatagctcctaccattgaacagattgaccagtcttttggcgcaacccatcctggagtgtacaactccgctgagcagctcttccatctcaacttcagaggactgtctttctcttttcagttagactcatggactgaggctccaaagtatgagcccaattttgcccatggcctggcttctctccagataccccatggagcaactgtaaaacgaatgtacatctacagtggcaacagcctgcaggataccaaggctcccatgatgcctctgagctgtttcctgggcaatgtctatgctgagagtgtagatgttcttcgagatggaactggacctgcaggtttacgacttcgcctacttgctgcaggttgtggacctggcctattagcagatgccaagatgcgggtatttgaacgttcagtgtattttggtgattcctgccaagatgttcttagcatgcttggctctccacacaaagtcttctataaatcagaagacaagatgaaaattcattctccttcccctcataaacaagttccatcgaagtgtaatgactacttttttaactacttcactcttggagtggacatcctctttgatgcgaatacacacaaagtgaagaagtttgttctacacaccaattaccctgggcattataatttcaacat

SEQ ID NO: 118473 - DNA, 519 bp, Homo sapiens
  Payload ID: 3178
  Gene Symbol: C16orf70
  Gene Name: chromosome 16 open reading frame 70
  ENST ID: ENST00000569277
  CDS Start-End: 1-295
ctccccaaacaacaccaacccatttggttccacattctgctttggtcttcagcgaatgatctttgaggtcatgcagaacaaccacattgcctcggtgaccctgtatggcccccccagatattcttctgtccatctttggcctgctggtgccagcaggggacacagactgcaaagagaagcacaaagtttgagccttgattcctggacccaggagctctcaactaacaaggaggcaggagaggtcaacccttgtcccatgcacattgggaagacttggggctctttctgtgactgaggacacaggcacccaggataaggacaaggtcctgcctttggctccacattgccacatgacccttaaggcaagcaggtagcgtgtccatagtacttggttgcgacatttgcactacatccactttagttacttgatgagctggctgtggccagggtggcccacctgcccttccctgttcctttcttgcacgcgctccctgcctgggcacaccaaactggttgaaa

SEQ ID NO: 118474 - DNA, 2722 bp, Homo sapiens
  Payload ID: 3179
  Gene Symbol: C16orf71
  Gene Name: chromosome 16 open reading frame 71
  Uniprot ID: Q8IYS4
  ENST ID: ENST00000299320
  CDS Start-End: 479-2041
agttgcgggagggcgcggagcacgccgggaagctcgcgggtcggcaccgggacagctcccgggcgccgtggaatgcacacgtcccgcacccggaccttccggtcagcttcccggctcgctgtctgatgcccgcggtagccaatgagctagtggtgtttgtcctgctccgtccccgccctccaggggaaccaatcccattgcaggagaggcaggacgcgcaaaggcccgaaagaggagctgggcggggtggggggaaggcggaggcagtctagtaatgtaaagctccgctgagagggagagtgctgaagaaggggacagcctctgtacctgcggcgcggcccgaggggcggacgcgagcggagtgacgcgctggaggctgtttatagcgctgtcaggacagcgcggggagtggaggcagaggcctgagagctccccggattatggtgcactgagaaggcatctggaagcctgggccctcatggcatccaacgataaaggcatggcaccctcgctgggctctccctgggcctcccagatggggccctgggatgccatcctcaaggctgtcaaagaccagctcccgtctctggactcagactcccctttgtcggactatggggaagaggagctgttcatcttccagcgaaaccaaacctccctgattccagacctgtcggaggagctggctgaagatcctgccgatggcgacaagtccagggcctgggtcgctgcagctgaagagtcccttcccgagccagttctggtgcctgcagaattggccacagaacctgggtgcagacagaacacaaggacaaaggatgcatcctctcaggaaggaagagaccctggcaggccttttgaaagctctggtgaggtcagcgctcttcttgggatggccgaggagccccccaggtggctggaaggcgaccttggaagcctgtctttcaacaccaaaggatcccagggtcctccctgggacccacaggccgaagccactctctcctgccatgaaggagacccaaaggcagagcccctcagcactgcctcacaagaatctgtgaaccgccgggccctccgacaggagagaaggaagatgatagagacggacatcctccagaaagtcacccgggatgcctgcggcccgaccagcagtgacaaaggtggggtgaaggaggcgccctgccacgctgcggagtcagctcccagatccaaaatgcccctcgtggagcctccggagggaccaccagtgctctcgctccagcaacttgaagcgtgggatttggatgacatccttcagagtctggcgggacaagaagacaaccagggaaatcgtgcacctggaactgtgtggtgggcagctgaccaccgccaagttcaagaccgcatggtgccgagcgcccacaacaggctcatggaacagctggccctcctgtgcaccacgcagtccaaggcctctgcttgtgcccggaaggtgcctgccgacactccccaggacaccaaagaggcagattcaggaagcagatgtgcctcaaggaagcagggctcccaggctgggccaggcccgcagctggcccagggcatgaggcttaacgcagagtcccccaccatctttattgacctgcggcagatggagctaccagaccacctgtccccagaaagctccagccacagctcctctgacagtgaggaggaggaggaggaagagatggcagctctgggagacgcagagggggcatctccttcctccctggggctacggacctgtaccgggaaaagccagcttctccagcagctcagggcctttcagaaggggacagcccagcccgagctgcctgccagcaaggggcccgcgggtgggagggctcaggcccctgaagacacagctggatcacgaactgggaggaagcaacacatgaagctctgtgccaaggggcagagcgcccaggctcgactcccaagaggcaggcccagagccctgggggatgttcctgagccaggggcagccagggaggccctgatgcctcctctggagcaactatagctgcctcaggatgtgtcctgctgtctgccccgtgggaagagcagagaaatcatcaccaccttgggccccacggtgccacgggctcaggcagcacagtagggcgccgggcctttgggacagtgtcccagcttcccctggggttcacccctggctgccaggccactgaggatgggcaggggtctcttctcatcaagccttgtaccaggcaaaagacaggccctgcttggccgtggtcactggccgccaagatcagggctacagatgtctgctctctggaccccacgtgatctggccactggggacccccacccgaccccactcccaatgatgaggggcattttcattgcaagtcaaaggcaagacaggcttccataaagtcccaggaggtccctcctgtagggcacaaggccaggctgcctcccagcccccaggccctctcccacctacagagaccctcccctgccccctccactccggggcctgtgccgccagaaccgggctctgcccccatacgctgccctcgcagcctggcggcctccgctgtggctgcctagctgtcaagagcaaaggctttttttttcttcaaccccattttcttccatttctcccacctttttaatgccagtaacctcactgagaatgttttacagtgatggaaaataaactctgttccaagttcaa

SEQ ID NO: 118475 - DNA, 549 bp, Homo sapiens
  Payload ID: 3179
  Gene Symbol: C16orf71
  Gene Name: chromosome 16 open reading frame 71
  ENST ID: ENST00000586724
  CDS Start-End: 81-549
atgcacacgtcccgcacccggaccttccgagctccccggattatggtgcactgagaaggcatctggaagcctgggccctcatggcatccaacgataaaggcatggcaccctcgctgggctctccctgggcctcccagatggggccctgggatgccatcctcaaggctgtcaaagaccagctcccgtctctggactcagactcccctttgtcggactatggggaagaggagctgttcatcttccagcgaaaccaaacctccctgattccagacctgtcggaggagctggctgaagatcctgccgatggcgacaagtccagggcctgggtcgctgcagctgaagagtcccttcccgagccagttctggtgcctgcagaattggccacagaacctgggtgcagacagaacacaaggacaaaggatgcatcctctcaggaaggaagagaccctggcaggccttttgaaagctctggtgaggtcagcgctcttcttgggatggccgaggagccccccaggtggctggaaggcgaccttggaagcctgtctttca

SEQ ID NO: 118476 - DNA, 2564 bp, Homo sapiens
  Payload ID: 3179
  Gene Symbol: C16orf71
  Gene Name: chromosome 16 open reading frame 71
  ENST ID: ENST00000590191
  CDS Start-End: 271-1884
gcaggacgcgcaaaggcccgaaagaggagctgggcggggtggggggaaggcggaggcagtctagtaatgtaaagctccgctgagagggagagtgctgaagaaggggacagcctctgtacctgcggcgcggcccgaggggcggacgcgagcggagtgacgcgctggaggctgtttatagcgctgtcaggacagcgcggggagtggaggcagaggcctgagagctccccggattatggtgcactgagaaggcatctggaagcctgggccctcatggcatccaacgataaaggcatggcaccctcgctgggctctccctgggcctcccagatggggccctgggatgccatcctcaaggctgtcaaagaccagctcccgtctctggactcagactcccctttgtcggactatggggaagaggagctgttcatcttccagcgaaaccaaacctccctgattccagacctgtcggaggagctggctgaagatcctgccgatggcgacaagtccagggcctgggtcgctgcagctgaagagtcccttcccgaggtctgtgggacacagaagagtatacgcctgtgtgtgtgcgatccagttctggtgcctgcagaattggccacagaacctgggtgcagacagaacacaaggacaaaggatgcatcctctcaggaaggaagagaccctggcaggccttttgaaagctctggtgaggtcagcgctcttcttgggatggccgaggagccccccaggtggctggaaggcgaccttggaagcctgtctttcaacaccaaaggatcccagggtcctccctgggacccacaggccgaagccactctctcctgccatgaaggagacccaaaggcagagcccctcagcactgcctcacaagaatctgtgaaccgccgggccctccgacaggagagaaggaagatgatagagacggacatcctccagaaagtcacccgggatgcctgcggcccgaccagcagtgacaaaggtggggtgaaggaggcgccctgccacgctgcggagtcagctcccagatccaaaatgcccctcgtggagcctccggagggaccaccagtgctctcgctccagcaacttgaagcgtgggatttggatgacatccttcagagtctggcgggacaagaagacaaccagggaaatcgtgcacctggaactgtgtggtgggcagctgaccaccgccaagttcaagaccgcatggtgccgagcgcccacaacaggctcatggaacagctggccctcctgtgcaccacgcagtccaaggcctctgcttgtgcccggaaggtgcctgccgacactccccaggacaccaaagaggcagattcaggaagcagatgtgcctcaaggaagcagggctcccaggctgggccaggcccgcagctggcccagggcatgaggcttaacgcagagtcccccaccatctttattgacctgcggcagatggagctaccagaccacctgtccccagaaaggtccggaggctccagccacagctcctctgacagtgaggaggaggaggaggaagagatggcagctctgggagacgcagagggggcatctccttcctccctggggctacggacctgtaccgggaaaagccagcttctccagcagctcagggcctttcagaaggggacagcccagcccgagctgcctgccagcaaggggcccgcgggtgggagggctcaggcccctgaagacacagctggatcacgaactgggaggaagcaacacatgaagctctgtgccaaggggcagagcgcccaggctcgactcccaagaggcaggcccagagccctgggggatgttcctgagccaggggcagccagggaggccctgatgcctcctctggagcaactatagctgcctcaggatgtgtcctgctgtctgccccgtgggaagagcagagaaatcatcaccaccttgggccccacggtgccacgggctcaggcagcacagtagggcgccgggcctttgggacagtgtcccagcttcccctggggttcacccctggctgccaggccactgaggatgggcaggggtctcttctcatcaagccttgtaccaggcaaaagacaggccctgcttggccgtggtcactggccgccaagatcagggctacagatgtctgctctctggaccccacgtgatctggccactggggacccccacccgaccccactcccaatgatgaggggcattttcattgcaagtcaaaggcaagacaggcttccataaagtcccaggaggtccctcctgtagggcacaaggccaggctgcctcccagcccccaggccctctcccacctacagagaccctcccctgccccctccactccggggcctgtgccgccagaaccgggctctgcccccatacgctgccctcgcagcctggcggcctccgctgtggctgcctagctgtcaagagcaaaggctttttttttcttcaaccccattttcttccatttctcccacctttttaatgccagtaacctcactgagaatgttttacagtgatggaaaataaactctgttccaagttca

SEQ ID NO: 118477 - DNA, 953 bp, Homo sapiens
  Payload ID: 3179
  Gene Symbol: C16orf71
  Gene Name: chromosome 16 open reading frame 71
  ENST ID: ENST00000619274
  CDS Start-End: 1-411
gacatcctccagaaagtcacccgggatgcctgcggcccgaccagcagtgacaaaggtggggtgaaggaggcgccctgccacgctgcggagtcagctcccagatccaaaatgcccctcgtggagcctccggagggaccaccagtgctctcgctccagcaacttgaagcgtgggatttggatgacatccttcagagtctggcgggacaagaagacaaccagggaaatcgtgcacctggaactgtgtggtgggcagctgaccaccgccaagttcaaggtctgaccttgaacactggagcccacgtgaatccccacaagcagcaccttcctgggcccctcagacacagagggctgcaggctggtcacagacagtcctgcagcccacacaagtcttccctgctggccccgccctaaacactcatgctgccagtccccaaaagacttcattcattcaacatatatgtgaccgcctgctacgtgccaggcgtgggccaggtcctagggacaaaggagaggcctccgcaccccaccccatgacccatacctcctcttccccacctccctgggccagcctgccttccttctccctcctcctccttcctgggggaaggaagccccaccttctgtgcgcagtcagctcctaagcacgctcccgcttcccctggcctccccatttaaaaagggaggcaaaggatgtcaccactgtcactacactcatggctttgctctgggaagtcctgcaaataaaatgaaagttctccaacccctccctatccactcgggccacaaaggcgaggggaggcaggtctgaggcagaggagccagggcaggtgcggcgcttccgcctctggtcccaaagcaaagactcccctgtgactgacagcccgtgttatgttaaatacattttgttggtttgtaattcaaatcccataaagcaggaggtagagagccaacca

SEQ ID NO: 118478 - DNA, 5953 bp, Homo sapiens
  Payload ID: 3180
  Gene Symbol: C16orf72
  Gene Name: chromosome 16 open reading frame 72
  Uniprot ID: Q14CZ0
  ENST ID: ENST00000327827
  CDS Start-End: 398-1225
agtcttggggtgggctccgcggtgcaggccgagctgcgcggagggctcggcgatcagcggcggcggcggcagtggggaggccgcagcgccatgggggggcgttagacaggctgcggcggccgaggcgaggggcggcagcggttatctggtccgcggcgaccttcggccgggcccgggggtgggaaggcctggggcgggggtcgtccctggttgcacggggccgcggggcggggctcgccggccgtcggggtgcaggaggcctgggccgctgaaaggagaaggcgccgtcggtcgccaggccctgccgccgggccgcttgacgacgacgctcccgcgggggccccgcctgaggaggacgcggcggcggtggcggcgaggccgcgggaggccgcggaggatggaggagcggaaggaggagggcgaggccgagatccaggagcacgggcccgagcactggttctccaagtgggagcggcagtgcctggccgaggccgaacaggacgagcagctgccccccgagctgcaggaggaggcggcggccgccgcgcagcccgagcacaagcagcagaagctgtggcacctcttccagaactcggccaccgccgtggcccagctctacaaagaccgagtgtgtcagcagccaggactttctctctgggtccccttccaaaacgcagccaccgccgtcaccaatctctacaaagaaagcgtggatacccatcaacgaagttttgatattggaattcagattggctatcagcgacgcaataaggatgtgttggcttgggttaaaaaacgcagaagaactattcgtcgagaagatttgatcagcttcctgtgtggaaaagttcctccaccacgaaactctagagctcccccaagactgactgtagtgtcccctaaccgagctacttcaacggaaactagctcatctgtagagactgatttgcaacccttccgggaagccatagctctgcatggtcttagtggtgcaatggctagtataagcgtgcgttcgagtaccccaggctctcctacacatgtaagcagtggatcgaatgctagtcgaaggagaaatggactccatgatgtcgatttgaacactttcatatcagaagaaatggcactccacttggacaatggtggaactagaaagcgtacctcagcccagtgtggcgatgtcattacagactcaccaacccataaacgcaacagaatgatctaaactgcaaacattttcacacccaccatgctgcttgaaagccacttgatcctcaacatatactataattgcaaaggaaacatgaggccatcttcccttgttcactgtttaagacaagtgaattctatagtggttgccataaaaggaagttctaggtatttatagtagatgcctcttgtaattatggctttcttaaaactataatcctagcagaggacatcagatattgtgtagtcgttagcaagatcatcataggcaaacatatatccgttccaaggctaaaagtgaccttaactgtatttattctcaaagggaaaggaaatatcagatgtttatttggttatagaatgctttttttttttttgggtccatttcctgctgtgttgagtattttgcttcaacagtattgccaggttcctaaaattgtctaaaaacatgatttggcttccatttttgcagctgcactgtaccatgcacctggtttctatatagtaacagtgtgcaattctaattattggactgtgccctgtttttagttttcaaatcaatttctaattctggtgattgtgtgatgtaaagaggtgctatgatggtcatgcaattaatactaaatattgaatcaatgcccagagctttattggattcactttgtgtgtgttagtgctctaaagtagcagtattattattaaactgtccccagagtaaccctgtaggcctaaagtactcagttttaagacaaacactacttcccatgcggggtactttccttatggtaaatgtaaacatgtagactgcattcgaggtgacctaaagtagagaggtcatgaactttgagaatgggcttcctttttggttcagtattagtgagagggagagggagatggatggtggggtaggttttctagtctatcattttacatttttcatggagtccctgcttagtgcagtttccattggaatgggtggaagatgataaagctctcttttttatctactaataatgtgattgcaacttaaaatagcaaaacccaactctccctgtccctccaatccctctcctaaaaagttcagtttggaatctcattctggaaaagatggaatcgcatggagattctctagctgttaggtagacctaaataaaaagttctcaatagattcctcttttgagtaaatataagacctcttgtagctacaatgttttagagcatgtttcatcttcatttttaatatcctgaactgaatgatagtgtttttttagatgaagaactgatgtcagcctgccaggtactgtaatttattctatcatattattatattatatatcaagtaggacagtgaaaaatgtttccttgcaaacttgtagtccagtatcagttacttcctatttttatccttaaaagaccattgcaaatcagtgtaagggtttttccagtaattactcacagcactttgttaaagtttgcaatttcttcagccatttaataatatctttctgtgaagaaactttgctgagttaaccataaatgttcattcattgactgggtgggatgtgaatggaatgttagaaatgttgtgtgaattgaagttctgtattcattatagatgtagcccttatttaaaaaagtgaattccatactaaaactaggaatgaaagtgagagatttctaaacttttgcgaaagtgggtcattttttgtttgactataatagcaggaagaattatagcaatctgtcattttacctgaaacagacaagcctatgtattatgaatactttcaagcttccctttggaatatacaagacatgcgtttggagttacctttgtttttctatcgtaaatttagattctggaattggggtttggtggtgcaatgtgttgctcacaagtggccagaactcctattcctaaaaggattttgagatggaggaacacatatttaattcccctttatgccttggttcttgctcctctttccacgttggataacaattttttggttgttttgtttaagttggtgctctgaagcttaatctcagtaccctttactctgaattgtcaaattttgataaaacgtgccattttctttggtaagagaaagcaggtcttaatgtctgccagaacacaatttatatgccttattggcttcattaaacttttagaaaactttagcatttgttacttttttccattgcgtttactttcaaatgcacctaatgaatttgtcacccagtcgcaacttttcccttctctgtcccattgctttctcctttccccgacgcacagaataaacatgaagctcagcagtagaagcgtaatgatttccctcaggaaaaacttctgacagctaggtttttcaagggtttccctgtgctagctgagatgcaaaacaaatcatggaagattgcatacctgtgtggtattttaaaaacaagttgactttttcagtttcttgaacggttaagggtggatttaaaaactagacagtttagttttggggaacagaagctctcttcgtcttaagccagattctctgattcttttagacgtcatagctccttagttctgctcctgtcgccctaacttggcatgggcaagttgaagttcatccttagactgcagcgttctgagcatggctgaagtattaaaatgtttaatattttttagagcaaaattgttggaaagcatttggctgaatctaaagacctgcagtcagattcttcaatgtggtttacccaactggagtagtgataaacaccttaatcataaaatgaataaaaacaaaaaaaccatggggcttgtctgcagttttgttttggtcatcacatctgaataactttttgatgcaatcaaatgaagtttaggcttttaaaaaagaattagctttctaaatgtttttttctaagggctactggaactcattaaactcgaataattgtggctttgggcctgaagatttccattcaacagtgaaaactggctaacttcctttatagtgagagggatggccaacatccaacccagagggctagtcagcctcagaggccagtgcaagacgccaagagatgattttgaaatggggccataagtttagaaaattatgaacagaatgattgagtttttggcctggctactacctctagtggtgactacgtcagcagattaatctcattgcattttactttatgtagtatgttgtaacctggtgcttcattcattagattggtgactgaggtatttagtcatggtgaggatgggaatcttcagagatacattctggatttgtggaataaagtgactagaaaggttcttccagagcaaccccttgtttaaagttataagtgtttatggtacctgctaccccttctggaaagttgtcggctttgatggtttagatgaccttaccccataaggccagcttctagcctccctttggaatatttgaggtgtgtgatgttttagtgggggcagcatttgagagacgagcaggcccgagcacccaggctggctgtcagaccgtgtgttgtgctgttgggtttgatgggatgagatatccagggttttacttcctataatgggatctgcaggctccttgtgaagttcagttagacagtagcctgtgacgtagcaagtcaagttttcgatggcccctcattttttttttatttagtgcttaaaaaaaagatttaaaacagcaaaaatcaagccacacagcagcttatagtatatacaggtcttttatacattagaagtaatatggtgaaatcttttttttttttttttttttttgtgatggagtttcactctctcacccaggctggagtgcagtggcacgatcttggctcaccacaacctctgcctcctgggttcaagcaattttcatgcctcagcctcccgagtagctggtattacaggtgcctgccaccacacctggctattttttgtatttttgttagatacggggtttcaaatatggtgaaatcttgtgacagaatagtattcccttgtacagataagccttgatgcaggttacagattttttataattagtaatgcagcagtggagtgttttctttttcttgttttttgagatggagtctctgtcgctggagtgcggtggtgcgatcccagctcaccgcaatctctgcctcccgggttcaagcgattctcctgcctataactacaggtgtgcgccaccacgcccagctaatttaattttgaatttttagtagagacgggatttcaccatgttggccaggccagtcttgaattcctgaccttaagtgatctgcccgccttggcctccccaagtgctgggattacaggcatgagacactgcgcctggcctatgttttaagtttctctatgacaaatttctgtagatgaactatctgggtcaaaaaaattcatctataaaatactgatgggtcttgccaaagtaccttctgcaaggtaccagttaatacttccatcagaaagtaagagcgcctgttcccttacatcgtagccagtgttgggtatttatacttcctttggcagaagtgacctttcagttttaatctgttttttacctgctcgtatgaaggaagactttttgcttgatatcacgtgggtttgaatgctgactctactaccaggtctgggaacctaggtaagtttgcctctctgggctgttttctcatctgtgaaataaatagaaaacatagaaaaataaattaaaaaatgtgaatgtta

SEQ ID NO: 118479 - DNA, 10359 bp, Homo sapiens
  Payload ID: 3180
  Gene Symbol: C16orf72
  Gene Name: chromosome 16 open reading frame 72
  ENST ID: ENST00000574285
  CDS Start-End: 1-451
cgcgcagcccgagcacaagcagcagaagctgtggcacctcttccagaactcggccaccgccgtggcccagctctacaaagaccgagtgtgtcagcagccaggactttctctctgggtccccttccaaaacgcagccaccgccgtcaccaatctctacaaagaaagcgtggatacccatcaacgaagttttgatattggaattcagattggctatcagcgacgcaataaggatgtgttggcttgggttaaaaaacgcagaagaactattcgtcgagaagatttgatcagcttcctgtgtggaaaagttcctccaccacgaaactctagagctcccccaagactgactgtagtgtcccctaaccgagctacttcaacggaaactagctcatctgtagagactgatttgcaacccttccgggaagccatagctctgcatggtaaagccgtttaaacatatttctttggaaaaatggttaagagggtgcctgtggacccatttttcacggttaggtttaggtccagatatactgttttttgtcttacagtaaacagcttgctctagaaatgtttaatagaatgtaagctaagaacttaatatgggcgatttctgtcagctaacctatcctagaaaatgtttttagaaagttagtttgagcttattggtgttaaaatgacatatctttctgcagtgttgattagaatttatcgctttacacttatgtgttgtacgtgtttttttcctcttctgaagtcaaagaggaagttcttgtgtcttaagaattctgttatatttctaatggtccatgacaggcaagtaaggtgggaaattgttgggttagttctcatgggacctgggacctcccttgacacctttcttacttggtttgctgtagatggtgggagaggatggatgtaagacttgaccttctgcctgtcgtccctcaggtcccttgcactttaagaggcaggaccagcagagtgcagccagtgggcaggtggatctctatctccccaggccagacctgtcataagaaggcactcttggctaagggattttagtattgctggagaaacccgggaaatgtagtcagtgataagtctgttgttgcttgttgctgtctaatacagacttccaaatagagctgggagagttaacctgtgtgacagcattgaatactgctgtaggaaaaaaagcaacagaataataagacttgcttgaaaccatgatggaaagatggatcacgcagatggctaagcaggtagaagtaattaggtcatgaatcctttttttcttttttttttttttttggagacggagtttcgctcttgtggcccaggctggagtgcattggcgcgatattggctcaccgcgacctctacctctgggttcaagcgattctcctgcctcagcctcccgagtagctgggattacaggcatgtgccaccacgccggctaattttttagagacagggtttcaccgtgttggtcaggctggtctcgaactcccaacctcaggtgatccgcccaccttggcctcccaaagtgttgggattacaggtgtgagccactgcgcctggccatgagtcttgttgaaagttaacatttttgggccatagtacaggtcatctaaaacaaagtaacctggtaaggtactaagaaatagtggcatataaagaaactttatagacgttgaatcattgagactttataatacctgtagagatcttgttctctctggcaaaccgtagttctttcctgaaaccccaatgttgttttttcccttgatagtgtttaggacaattaaaaacaaaaacatgaattgcaggaaagttcaggttgtgtggatgcagtactttaagactgcacactgttcctgacacagtggaatagttaggctgtcagaactttggaagctcaggcaaaaatgggattgatctgtttatgctgaattagagagtttcacatctttccccctaaagtttgggaaaacaattaactagaggtgtacatagtttgttagattaattttagcgcatggtaatatttgatgcagttgtctctccttaagtattgtgattttcttcctttattaagagggttgtgggtcattccatgcttctcttaaggtatctttttactctgttttactgttatattttagaagatagttttaagaaacataaaaaccatgcttgttatcttaacgtagtagtagtgtacataatagtaaaaagggcaagccagccccctctgccctcgaaaaactgtattctccaactcccactacattttctcatattgaatctgttccacctgtgatttattgttttcctgaactttgggagttttaagcaatgatacagttgaagggactgtttataattttcacatgtttaagttgtgaggctttaaaacttaaatataaggctttgtctaggaagaaaatgatctttaccttcaataaatttataatgtagcactaatccagtatagattggagactgaatgcattcttactcttagggttcatacctctaattcatgtggttaagacagtgttgtggtgaagtaatagggccccttgaaagaatctacagaaacataaattatactgagttgtgctgtactggtttgtgagaacatcagtgtattaaggagaatggtagtttaatttgaatatttaaagaaagtaatttgaatggttctagtactagggccattattaactagtaacatagattagtgacttcaactgggtgtccttattatctgatttgtctgaagtgaaaactgttaaggtgctcttttaaaatgtatttggaaacaccatagttagggtaaatacaatgtcacaattcactcttgcatattatttgcttagccaaatttatgaattctaagttaggccaaattgaaggttttggagttttacattgtgggtgagtctaaattcatgcgtttggcaagcacaaggacatgggaaaagaatctggtattttgaggcaggcttgagtttataatgaaagcaaactcagttcctcttcatgtcctatgtatttaagagaggacagttttccctcagtttttttccccttccttacccctacccccatcaaatacagcccaaccaaataactgtgttcttaatttaaaggaaaatggcagacttgacacctgctgaatatttcgtgtagacagagtatgacaatgaatgagatccccagtcattgcccttgtaagcctgggaacccagtttagtgggagagactaatgtaaacagctttaatcaaaagtatatcaattggccgggtgctgtggctcacacctataatgccggcactttgggaggccaaggtgggtggatcacttgaggtcaggagtttgagaccaccctggccaacatggtgaaaccctctccctatttaaagaaaaaaaagtaaggcatatcaatttatggttatcaaataggtttttttttttttttttgagactgagtgtcgctctatagcccaggctggagtgtagtgctcactgcgacttccgcctcctgggttcaaatgattctcgtgcctcagtctcccgagtagctgggattgtaggcgcctgccaccacgcccagctaatttttgtatttgtagtagagatggggtttcatcatgttggcgaagctggtcttgaacacctgacctcaagtgatctgccttagcctcactgcttgcccctaagtggtgggattgcaggtgtgagccactgtgctggcctcaaatagtttttatcaaagctacttcaattagtggttagcaaggcttaaagactaattcagtgctttattttgacacttgttcgcaacatgttgctttttttcctgtgtcctatgggacctagtcatctgtatgttagattcacagaggaattaaagagataaacatgcatgtgctaaattgatttctgtcttgctttgttatcctataataatgttataaaataacattattataaatttcccaagagttgaattaataccaacaactggtaactcgtttttatgtaaacagcatacttgagaccagaaatcttctggatcactttgtggatctctgcctgccattctcattggtcctctgttcatcccttttctagagcttctccttaccttggcttctcttctgccacattggcctgcctgacctgtcctcaggccctgtcactgccctagattacgtttcccatgtcttcacttccaaatctggacctctcgtttagaccttctctcctgactgccagatggcatgtcccactgtcctccggtgtacatctccaaattgtcccacaggcatttatctcagatgaagtttcaggttggactcattcttctgccccaacagcagaatgactcattgagccattgagccattcagcacattctctatatggcagattcggtgctgtctctggaaatacataaacatagagcgattcctttttctgttgaggcaaaatatggatttggttaatttctattcacgtcatgaatgtggtatgtggaaggtcttctgagagcagaaagggatgtttcacagcacagcccggctgtgtggtgctcagggcaggccctctggaggaggtgagcctgggctcttggcctaatgtttcagctctcactttccagtcctgagctgttgttgccagtccatctttcatgagaccattggagtgatctttctggtcttgtcacttcatggtttaaagtttccctgggcctacacagtgaagtccaaattcagcatggtattacaagacccttatgatccagtcttaaccattggttaggtatcctacccatactgtttatctcttgaatacctctatgctctttgacaagtccagcccctacgtgttcatacctcacttctgtgacacagccttgcttcagggctcccaatctctgtagcctccctgaactgtgcatttgctctgctgcttgatttgtttctgtgactgttccattctcctcgggacacatagcagggaccttgtcttggtccttttttttttggctttaacagaacatagcaaagaacctgacataggtgtagtctgagtttaccactggggttatcacagaggtctgctaagtgaatacaacacagtggggacccagaacctctagaaagggttgaggattacaatccccagatagctacaatcagggaataatgtaacctgtttgcctagggtgctacatggtaatcttgaattagaacaactgagacttccatgggaccttagggtgataaccattaaacctactctttcagtgtttactttgtaaaagcatcacactaaggaggttgtcatttaatcctcacacctaccctgggttattaacactgttgatgaagaaagccttacttggctaagatatggagcaggttagtaagtggtagaatagatactccagtcctgtctccaaaatgcaaatttttttttaattaaaaaaatttctaattttcaatatatttatttttgattttttattttctgtagagttggagtttcgccatgttgtccaggctggtctcgaactcatgggtgcaagccataccccaacctcgaccttccgaagtgttgggaatactggcatgagccatgatgcctggcctcaaaatgcatacccttaaccactatgctctcacatttttagatgtgggatttctgtctacgacgtcgcccccactaagacctagggcttaggtgtcgaggtgggaaagatcttgaggcttttcttctcaaaattaatcagaaacgatgtgaattttatatctctttctgaggttttccccataagctaatcgggattagtagacttaaaggtgaatgaccaactgtatccctggttcactggttaggaagagtacatagtctttgtgtataggctattttcctcggtaaccttgggcaacatgcttgacttctccaagccagtctcctttgtgaaaggtgatatacttacaagacattatattaaatgagaacccaggcaggttacctaccctaccatgacactggaagtattctttgccttaagaaaaggagaattgctggttggttccaggtccggtgggtaccctcatttcccctgggcaattttactgtaaaaatagaccaaggatctcaaggcccagtggcttttgccttctgggatacttttttacctccctgtttagtagtaagggtcacattttaaattgcagctatcacactggagggatcagatcatttagaactttgactgcttaaatattactcttgctaagatcttgagcttgtctcatgttgacagactagtgaagttggttacgttgtctgtctcctcactggagggagagattcagagttgccctgtccaacccagtgctatctctggaaagggttggattgaaatctagtctgccttcattctgaggtataatcatgagggttaggtgaaagggtcccgagtgagaagatggcatgggtcctagggtggggagcccgatgccaagtcagacttcactcggtatgtttattcaaagccccactttcactcgtagcatatcataggtggtctctgcaagttgctgaccctgattcagactgttccataaaagtcagacacttggttttagttcccaaactgattttgatgacattcttgactgcagggcttggagttaaccccactgggcctgagttgtctctctgtaaagttacacatcatttcagactcaaaggcctctagcatgcagggtctggtgtcataataggcaccaatgggaaccattactgtcattgccttttttggctttaatcttcccaattgtaagttcctttcatgtttaaaacaagtttaaaagacagggggacttaggcatgctcaggcagtctagcctttaatgtaagaatttcaaaacataaaggaaaaaaaacttttttttttaagcagtactttgtgagttacaagacagcagcagctccttagtgttgattgccgaggcctttttggtttgaaaactctgcttcctttgtgaatttggtgttaggagttcttattgttattctgcagcctttactattgtcctttatttactgaacacagtgaataccaagcactgtttattagaggttaggagtaggggcaggtgattaaaaaaacaaaaaagctaataatctcctcaagcaatttctggcctaatagaattatagtagacagtgaagtatctaaacccagggaatcagattgaggcaccatgtccatcgccttgagaattaataggctgcatttctgggttctcctttttttttttttttttgcccaactgagtctttctgtggacttacatggaacttcttattctcttaaatcattaagttacttgacaatattcttggatttggagaaactggatgtagggccgtatgaaaaaatcattcgaaatcagatttaggggtataaggttggataggaatgttttagaaagaagaatgtaaggcagataactaatttgtcacatccaaagtataaaactgctactttttccctagaaaagggaagctcattttaggcagcctaaaccagtaagattttcttcctcctccaagtgcagatttttgtacctttcgtttgtcaaaacattctttggccctatgcatgccagagtgatatagaaaggaagttaccacatttttttgagaacaaatcactcctgataaaatttcttagacaattgataatcattttaagaagaaatttaattgtatttagctctgtgtctcgcccctttggtgtcactcttctacctcttccatcactatagctaaatatttagaagtatatcttgacacctagcacaaatgttttggttaagtatcttaaaactgatggatggtatggctggggcagcatggctcacgcctgtaatcccagcactttgggaggccaaggcgggtgaatcacctgaggtcaggagtttgagaccggcctgaccaacttggagaaaccccgtctctactaaaaatacaaaaattagtcaggggtggtggcgcatgcctgtaatcctgtctactcaggaggctgaggcaggagaattgcctgaacccgggaggcagaggttgcagtgagctgagatcgtgccattgcactccagcctgggcaacaagagcaaaactcagtctcaaaaaacaaaacaaaaacctgttggtatagtacgaaagaaacgtcttgcagttttctgttgcagagaattaattagaaccaacctgttggattatacacattcacctttcagaatcctttcttctctgtggaaacccacactctcagcagtgtgtgggaacacagtagattcttaaggaatgcttgttgaatgttgcagtctgcatcttcttgaagtaacagaactgttggtagctgtttaaaagtaaaatgtgtctaaagaccttttggaaattaagatgtaagagattaatgcaccaaagcagtctcttaattacttaaaatgaattatttcaaagaatctttaattgaattttctgtgaagtctggaatttgtaaattatgtccctttgttcaaaccagcccctgaaaagaacaattaaggcaattaagatagcattaaagttttcaatgaagttggcattttctgtgtattaagattagatgttagctgctgaagtttgtggaggtcggacataaagcttccaacatcagtaatgcaaaattgtcttgaacctgcgataaaattttgttggacttttttttcattgcagtgaaaagggccatgtagcatgcctcaaagccaggttactcagcctagtccttgtttaagcagttttgatattcattcaagttcaattttctcactgattttatgattaatttcttggaaaatttgaaagttttcaagaagtaaaaaattaatatcttgttatcccagtatatagagattaacttcagttcaatgtttggtgcattttcttctagtctttttttcaatgtataaatattaaagttatttcatagttgagatcatactgcatatatgattactgtatcttgcttttttcattttaacgtcgtgagcaattttcccatgacattacaaactgtctttgaaaaatggaaaacatttggggctgtcagcataactgaaaatgttttcttggtgtgacacatgtatctttgtaattggtttgatttagtgtgctttatttcaataaaaattcagtattataatttacagattggggtggggagtggtatctacttcaaattactgaaatcttcctagtagaattcctttttaaatgtttgaactcccctggtacatcttaaacacgacattgacactgcaagtgcttggatgtcctggcacctcagaacacaactttgtgcaaaaggagtgctgtgcatctgaatagtgcaattcatttccaatgcaagaatgccagtttcttagggcccccggtcaggatattacccacttggtttaagttgtgatttcaaatcccattttctatgggagatacactggtggaacaaatctgcagagggccctgcacctgcgctggtggatcaacggtgtcttctcacctccagggctagctgccttgccttccctcgtggggcttaagtggctgggaagcagatagacagtgtagatgaagtcctgggccactggctgctggactgaggcagtgagatgactgggctggcatttgttctttctctgcctgtgtgtgacctctaactatgtgcctggaaactgaattacatgtaattaatgctgcaaacaggattttcttattgcctaagcatgaacttggtatgaaaataatagttaataatttactatgtaacttggattcttataacctggactgtaagtttgttttagctccagtgggagtttccttttcaaagtatgatgaaaccatcctcatcttttctacccctggactaatcatttaaaatggatacagacactttaaaactgctgagtttatcttgtgttaagcaattaagacttctctgtctaatcatgctacttgttctgcttttgtcaattgatactctcatagcccttttgaaaaagtatgtttttgtagaaattaagttgtatgccctcaggacgtacaacttggttttttttttttgttttttttgtttttttttgttttttttttagttctgaagcatgtttagatttttctgtacttgtataggtctgattgtttatgtggcttagctaaggtttcctaaagcatcttctagtagctgtcattggtttgtaaaataaaatttgggctgtcaaaatgca

SEQ ID NO: 118480 - DNA, 906 bp, Homo sapiens
  Payload ID: 3181
  Gene Symbol: C16orf74
  Gene Name: chromosome 16 open reading frame 74
  Uniprot ID: Q96GX8
  ENST ID: ENST00000284245
  CDS Start-End: 185-415
cgcggctgcccgagcgccggccgggccatgacccccgctgctctgtcttgcaggctcgtcgccgcggccccccgagcccgaccgccgccgccaccaccaccagcgcccgggcgggcctcgcgcgcctcgggcgcggctccgcagtgagcccaccaagaaggaagcggcctgcagaggtgccgacatggggcttaagatgtcctgcctgaaaggctttcaaatgtgtgtcagcagcagcagcagcagccacgacgaggcccccgtcctgaacgacaagcacctggacgtgcccgacatcatcatcacgccccccacccccacgggcatgatgctgccgagggacttggggagcacagtctggctggatgagacagggtcgtgcccagatgatggagaaatcgacccagaagcctgaggaggtgtcctgggtttggctggctggctcctgctccagcggcccggcttcaggtgtccgggggcgtggctgcctggagcaggtgtgctgaataccctggatgggaactgagcgaacccgggcctccgctcagagagacgtggcaggaccagcgaggaatccagcctgtccacttccagaacagtgtttcccaggccccgctgagtggaccggacctctgacacctccaggttcttgctgactccggcctggtgaaagggagcgccatggtcctggctgttggggtcccagggagaggctctcttctggacaaacacaccctcccagcccccagggctgtgcaaacacatgcccctgccataagcaccaacaagaacttcttgcaggtggagtggctgttttttataagttgttttacagatacggaaacagtccaaaatgggatttataatttcttttttgcattataaataaagatcctctgtaacaaa

SEQ ID NO: 118481 - DNA, 744 bp, Homo sapiens
  Payload ID: 3181
  Gene Symbol: C16orf74
  Gene Name: chromosome 16 open reading frame 74
  ENST ID: ENST00000602675
  CDS Start-End: 164-253
gcagtgagcccaccaagaaggaagcggcctgcagaggtgccgacatggggcttaagatgtcctgcctgaaagcagcagcagcagccacgacgaggcccccgtcctgaacgacaagcacctggacgtgcccgacatcatcatcacgccccccacccccacgggcatgatgctgccgagggacttggggagcacagtctggctggatgagacagggtcgtgcccagatgatggagaaatcgacccagaagcctgaggaggtgtcctgggtttggctggctggctcctgctccagcggcccggcttcaggtgtccgggggcgtggctgcctggagcaggtgtgctgaataccctggatgggaactgagcgaacccgggcctccgctcagagagacgtggcaggaccagcgaggaatccagcctgtccacttccagaacagtgtttcccaggccccgctgagtggaccggacctctgacacctccaggttcttgctgactccggcctggtgaaagggagcgccatggtcctggctgttggggtcccagggagaggctctcttctggacaaacacaccctcccagcccccagggctgtgcaaacacatgcccctgccataagcaccaacaagaacttcttgcaggtggagtggctgttttttataagttgttttacagatacggaaacagtccaaaatgggatttataatttcttttttgcattataaataaagatcctctgtaacaaa

SEQ ID NO: 118482 - DNA, 832 bp, Homo sapiens
  Payload ID: 3181
  Gene Symbol: C16orf74
  Gene Name: chromosome 16 open reading frame 74
  ENST ID: ENST00000602766
  CDS Start-End: 389-478
ggggcgggaccgcgggaggcgcgcggctgcccgagcgccggccgggccatgacccccgctgctctgtcttgcaggctcgtcgccgcggccccccgagcccgaccgccgccgccaccaccaccagcgcccgggcgggcctcgcgcgcctcgggcgcggctccgcagtgagcccaccaagaaggaagcggcctgcagaggtgccgacatggggcttaagatgtcctgcctgaaagacgccggttttcatctgtgatgcggggacagctgcgctccttgctgcgaggcgtcaggacccagcagcagcagcagccacgacgaggcccccgtcctgaacgacaagcacctggacgtgcccgacatcatcatcacgccccccacccccacgggcatgatgctgccgagggacttggggagcacagtctggctggatgagacagggtcgtgcccagatgatggagaaatcgacccagaagcctgaggaggtgtcctgggtttggctggctggctcctgctccagcggcccggcttcaggtgtccgggggcgtggctgcctggagcaggtgtgctgaataccctggatgggaactgagcgaacccgggcctccgctcagagagacgtggcaggaccagcgaggaatccagcctgtccacttccagaacagtgtttcccaggccccgctgagtggaccggacctctgacacctccaggttcttgctgactccggcctggtgaaagggagcgccatggtcctggctgttggggtcccagggagaggctctcttctggacaaacacaccctcccagcccccagggctgtgcaaacacatgccc

SEQ ID NO: 118483 - DNA, 1002 bp, Homo sapiens
  Payload ID: 3181
  Gene Symbol: C16orf74
  Gene Name: chromosome 16 open reading frame 74
  ENST ID: ENST00000602719
  CDS Start-End: 223-453
cgccgccctctaggagcggggcgggaccgcgggaggcgcgcggctgcccgagcgccggccgggccatgacccccgctgctctgtcttgcaggctcgtcgccgcggccccccgagcccgaccgccgccgccaccaccaccagcgcccgggcgggcctcgcgcgcctcgggcgcggctccgcagtgagcccaccaagaaggaagcggcctgcagaggtgccgacatggggcttaagatgtcctgcctgaaaggctttcaaatgtgtgtcagcagcagcagcagcagccacgacgaggcccccgtcctgaacgacaagcacctggacgtgcccgacatcatcatcacgccccccacccccacgggcatgatgctgccgagggacttggggagcacaggctggacaaatcaggacgcaaaccctcgtcagctttggaacacaaatatttgccagtgaagaaaacattccctcatcagtcaaaacccggacagtctggcacacacgtctgcagctgcctgagggagcttctactgtgggaggggccagatggcccacagctccccctcctccctgaacactgcaggctccttctcttcctacttcattttgaagataaagagacaggggttcagagttgtcacttgcccttggtcacatagcatccagagtgacctttgatttcttctcttcgagcatatctgtcttttctcttttgtttttatttttttttaatagagatggggtcttggcatgttgcctaggctgatctcaaactcctggcctcaagtgatccttctgcctcggcctcccaaagtgctgggattacaggcgtgcctggccaagagtatgtgtcttcacacatgaaagtaactcagcgaaaactccagatctgtaaataacaacttctaaggcagatacacaacagacacagctttgtgagcaggcctgtgagctttacggctttttttcaccttcccagtgaccctctatggggcttcagggagg

SEQ ID NO: 118484 - DNA, 1237 bp, Homo sapiens
  Payload ID: 3181
  Gene Symbol: C16orf74
  Gene Name: chromosome 16 open reading frame 74
  ENST ID: ENST00000602583
  CDS Start-End: 552-746
gcagccagatctgctgggacacctttcccaaggaagagcccgttgcactgggctttgaaggataagcaggagcttgttactcaggcagaggaagaaagagcatcccaggcggggggagcagcatatgcaaaggcacgaaggggccccaggagcctagggagtctggggaagtgtgagcactttggagagtggaggctggagcgctgtggagagtgggggctggtggccgggaatgaggctgcagctggctgggccacatggtaaaggctgacaactggacccagaggccaactagcctatgatcagcatttcccaaaatctgtttcccgactcatggttctgtgagatgtgacaagggctcctttttcattcctgagacgccggttttcatctgtgatgcggggacagctgcgctccttgctgcgaggcgtcaggacccaggtgatagtgaagggagggtggcgcccgcggttcccggcggccactgatgcctgtctctctgtcgtgtgtacgtgcgtgtgtgctccacgcctggcttctcaggctttcaaatgtgtgtcagcagcagcagcagcagccacgacgaggcccccgtcctgaacgacaagcacctggacgtgcccgacatcatcatcacgccccccacccccacgggcatgatgctgccgagggacttggggagcacagtctggctggatgagacagggtcgtgcccagatgatggagaaatcgacccagaagcctgaggaggtgtcctgggtttggctggctggctcctgctccagcggcccggcttcaggtgtccgggggcgtggctgcctggagcaggtgtgctgaataccctggatgggaactgagcgaacccgggcctccgctcagagagacgtggcaggaccagcgaggaatccagcctgtccacttccagaacagtgtttcccaggccccgctgagtggaccggacctctgacacctccaggttcttgctgactccggcctggtgaaagggagcgccatggtcctggctgttggggtcccagggagaggctctcttctggacaaacacaccctcccagcccccagggctgtgcaaacacatgcccctgccataagcaccaacaagaacttcttgcaggtggagtggctgttttttataagttgttttacagatacggaaacagtccaaaatgggatttataatttcttttttgcattataaataaagatcctctgtaacaaa

SEQ ID NO: 118485 - DNA, 761 bp, Homo sapiens
  Payload ID: 3181
  Gene Symbol: C16orf74
  Gene Name: chromosome 16 open reading frame 74
  ENST ID: ENST00000602914
  CDS Start-End: 199-285
gaccgcgggaggcgcgcggctgcccgagcgccggccgggccatgacccccgctgctctgtcttgcaggctcgtcgccgcggccccccgagcccgaccgccgccgccaccaccaccagcgcccgggcgggcctcgcgcgcctcgggcgcggctccgcagtgagcccaccaagaaggaagcggcctgcagaggtgccgacatggggcttaagatgtcctgcctgaaagtctggctggatgagacagggtcgtgcccagatgatggagaaatcgacccagaagcctgaggaggtgtcctgggtttggctggctggctcctgctccagcggcccggcttcaggtgtccgggggcgtggctgcctggagcaggtgtgctgaataccctggatgggaactgagcgaacccgggcctccgctcagagagacgtggcaggaccagcgaggaatccagcctgtccacttccagaacagtgtttcccaggccccgctgagtggaccggacctctgacacctccaggttcttgctgactccggcctggtgaaagggagcgccatggtcctggctgttggggtcccagggagaggctctcttctggacaaacacaccctcccagcccccagggctgtgcaaacacatgcccctgccataagcaccaacaagaacttcttgcaggtggagtggctgttttttataagttgttttacagatacggaaacagtccaaaatgggatttataatttcttttttgcattataaataaag

SEQ ID NO: 118486 - DNA, 1068 bp, Homo sapiens
  Payload ID: 3182
  Gene Symbol: C16orf78
  Gene Name: chromosome 16 open reading frame 78
  Uniprot ID: Q8WTQ4
  ENST ID: ENST00000299191
  CDS Start-End: 118-915
catctggaggccacaccctaccttctaagtcaccaggccatcaagtccagacaaagggatcgaaagagtgagacagtgccagccacctcccacccaagccactagcaagactccacaatgtcagagcaacaaatggacctgaaggatttaatgcccacaaagaggaaatacatgtggaagactgctgaagataggcgcatgtctgacctcacctgtgtgctggagtggctggagcggaggcaggggaagaagaaacaagctcccgagaagcaaaagcccaaagtggtgacagtccttaaacgaaataagaagaaggaagagaagaaaggcaaaggcctcatgacagcacggggagggaaccgcagggacacggagacttcccagcaggccttaggaaagagattcaggaaggacgccgcctcctaccgaagcctctatggagtggagcaaaaggggaaacacctcagcatggtccctggcagctacatcaaggatggccccaagaaatctgatacagacatcaaggatgcagtcgacccagagtccactcagcggccaaacccattccgtcgacaaagcattgtcttagatcccatgttacaggagggtacctttaacagccagagggcaaccttcataagagactggtccaacaagatgcctgacatggcttacgaacgcaagctaaagagcctcatggagaaaagcaccgaacctaagatggaaaccatgaggatgttgaagccagaggaggtgctgagctgccgatacctgaggttatccaaggagaacattcggaccttgctcaagttgtgcaaggatgcaggaatgaatgtggatatccacccccacatggtcgaagaggacatagatgctaaaaaggtgttcaccggaatacccagcatggccctctaaatagctcctctcgccaccaccttcaggctccttctgtcatgggacccttcacctccagatgccatcctctggcacactacaagtggtccttccaacttagtgcatccctttagaaagtaagcaatcagaaaacaagcctcggctgtgtgatca

SEQ ID NO: 118487 - DNA, 1267 bp, Homo sapiens
  Payload ID: 3183
  Gene Symbol: C16orf86
  Gene Name: chromosome 16 open reading frame 86
  Uniprot ID: Q6ZW13
  ENST ID: ENST00000403458
  CDS Start-End: 156-1109
agtttcggccgagggtgggctccgcggtcgccggtttctcttcccagctctgccctcgcttgctggccggtctccggggtcagcgcggggccaccatccagccccttggggcccgccccaagcagctgtcgaggacgcactcagcctgcgcagccatggcctcggcaggggcggagaggcggccgggggtccaggaggcgacggtcgtggggcagggacagctcacggaggagcccggcagcgctcagacctccgagtgtccagtggcgggagaccagttcctggtgcctgcccatgaggcccgcggaacccagagtgaagaccagcgcccagcaggcgcagcttcggagtcggagctccaggaggaaggacccaagctgggggaggagcggcccaagccgcatgccggggcgctagaggagagaggccccaggcccgtggtctccattgtgaggccccgtcatggtccaaagagaaagcctgtcaagtctctcagcctcccgggccttcgtgcccatcttaaggctgaagctgagctgccacccaagctgccgctgcaggaggaggagccagaggacagccagagtgagccctcaccatctgccaaacagcacaaaaaagccaagaagcgcaagagcctgggggctcccgtgctccacgctgtggccagcatggtgtctgcacccttagagacattgaggctggagcgaaaggcccagcgcctgcggccgctgtaccagtacgtcaactattgcaaccctgagctgaaccaggcagggaagggggacggggaggctgaggtggaggcagaggcagagctggccccggttcccgaggagggaggtgtggagcaactgcaggccttgctgcccttggcaggtgagctgggcccaggcctcgctttgccctgtcccagtccactagtgacccccacccatgccctggctcccctcggagaggaggctggagaggagcctgggggcttgcccagcttgggggtgagtgaccacaaggccgaggtggataagtcaacccaggtggacatcgacaagatgctgagtgtctgcactgctccacttgtccccccgctctctcctcagtacaagtgactgtcccgccccactggtggctcccctccttccacgcctgaatttggcttcaggcttcctgtgggcctaggccctctggtggcgggggcaaatttggcacctgcccccacttgggactttggtcttgctgaaaataaatatttttctttttcaaagac

SEQ ID NO: 118488 - DNA, 1314 bp, Homo sapiens
  Payload ID: 3183
  Gene Symbol: C16orf86
  Gene Name: chromosome 16 open reading frame 86
  ENST ID: ENST00000445068
  CDS Start-End: 135-305
ccgcggtcgccggtttctcttcccagctctgccctcgcttgctggccggtctccggggtcagcgcggggccaccatccagccccttggggcccgccccaagcagctgtcgaggacgcactcagcctgcgcagccatggcctcggcaggggcggagaggcggccgggggtccaggaggcgacggtcgtggggcagggacagctcacggaggagcccggcagcgctcagacctccgaggtgttcagtgacggatccctatgtcctttgcccggccatggtgaccgatggcctgtgtgtcatctctagtgtccagtggcgggagaccagttcctggtgcctgcccatgaggcccgcggaacccagagtgaagaccagcgcccagcaggcgcagcttcggagtcggagctccaggaggaaggacccaagctgggggaggagcggcccaagccgcatgccggggcgctagaggagagaggccccaggcccgtggtctccattgtgaggccccgtcatggtccaaagagaaagcctgtcaagtctctcagcctcccgggccttcgtgcccatcttaaggctgaagctgagctgccacccaagctgccgctgcaggaggaggagccagaggacagccagagtgagccctcaccatctgccaaacagcacaaaaaagccaagaagcgcaagagcctgggggctcccgtgctccacgctgtggccagcatggtgtctgcacccttagagacattgaggctggagcgaaaggcccagcgcctgcggccgctgtaccagtacgtcaactattgcaaccctgagctgaaccaggcagggaagggggacggggaggctgaggtggaggcagaggcagagctggccccggttcccgaggagggaggtgtggagcaactgcaggccttgctgcccttggcaggtgagctgggcccaggcctcgctttgccctgtcccagtccactagtgacccccacccatgccctggctcccctcggagaggaggctggagaggagcctgggggcttgcccagcttgggggtgagtgaccacaaggccgaggtggataagtcaacccaggtggacatcgacaagatgctgagtgtctgcactgctccacttgtccccccgctctctcctcagtacaagtgactgtcccgccccactggtggctcccctccttccacgcctgaatttggcttcaggcttcctgtgggcctaggccctctggtggcgggggcaaatttggcacctgcccccacttgggactttggtcttgctgaaaataaatatttttctttttcaaaga

SEQ ID NO: 118489 - DNA, 677 bp, Homo sapiens
  Payload ID: 3183
  Gene Symbol: C16orf86
  Gene Name: chromosome 16 open reading frame 86
  ENST ID: ENST00000602365
  CDS Start-End: 82-677
cggggtcagcgcggggccaccatccagccccttggggcccgccccaagcagctgtcgaggacgcactcagcctgcgcagccatggcctcggcaggggcggagaggcggccgggggtccaggaggcgacggtcgtggggcagggacagctcacggaggagcccggcagcgctcagacctccgagtgtccagtggcgggagaccagttcctggtgcctgcccatgaggcccgcggaacccagagtgaagaccagcgcccagcaggcgcagcttcggagtcggagctccaggaggaaggacccaagctgggggaggagcggcccaagccgcatgccggggcgctagaggagagaggccccaggcccgtggtctccattgtgaggccccgtcatggtccaaagagaaagcctgtcaagtctctcagcctcccgggccttcgtgcccatcttaaggctgaagctgagctgccacccaagctgccgctgcaggaggaggagccagaggacagccagagtgagccctcaccatctgccaaacagcacaaaaaagccaagaagcgcaagagcctgggggctcccgtgctccacgctgtggccagcatggtgtctgcacccttagagacattgaggctggagccctctgccctgccctgggtctttgcaggaaaggcccagcgcct

SEQ ID NO: 118490 - DNA, 537 bp, Homo sapiens
  Payload ID: 3183
  Gene Symbol: C16orf86
  Gene Name: chromosome 16 open reading frame 86
  ENST ID: ENST00000602987
  CDS Start-End: 1-513
ggagaccagttcctggtgcctgcccatgaggcccgcggaacccagagtgaagaccagcgcccagcaggcgcagcttcggagtcggagctccaggaggaaggacccaagctgggggaggagcggcccaagccgcatgccggggcgctagaggagagaggccccaggcccgtggtctccattgtgaggccccgtcatggtccaaagagaaagcctgtcaagtctctcagcctcccgggccttcgtgcccatcttaaggctgaagctgagctgccacccaagctgccgctgcaggaggaggagccagaggacagccagagtgagccctcaccatctgccaaacagcacaaaaaagccaagaagcgcaagagcctgggggctcccgtgctccacgctgtggccagcatggtgtctgcacccttagagacattgaggctggagcgtgagtggcagtccctggactgttccttctccccctgcctgtggggcccgacatggcacaacctggcgctctagcctctgccctgccctgggtctttg

SEQ ID NO: 118491 - DNA, 1585 bp, Homo sapiens
  Payload ID: 3184
  Gene Symbol: C16orf87
  Gene Name: chromosome 16 open reading frame 87
  Uniprot ID: Q6PH81
  ENST ID: ENST00000285697
  CDS Start-End: 263-727
gatactctgggcgagctcgcgggcgggctgtgggtcgcgagccgccgtgggagcgcgtgtcgcggtccccaggagccgccggccgacgctccgccccgcccccttggcgcccaggtcccgcgcgagctcgcgcacgcgcgcgcgcgcacccgccagaggcttgtttgaggcccgcggggactgggcgggcggaggccgggctgccgaagtgtgaggggaggagcccgagccgtcgctgctgccgccgctaagggagaggagcatgtctgcaactcgagccaagaaagtgaagatggccaccaaatcatgccccgagtgcgaccaacaggttcctgttgcatgtaaatcatgtccttgtggttacatatttattagcagaaaacttttaaatgcaaaacactcagagaaatcaccaccttctacagaaaacaagcatgaggccaagaggaggcgaacagagagagttaggagagagaagataaattctacagtaaataaagatttagaaaacagaaagaggtctcgaagtaacagccattcagatcatatcagacgaggaagaggaagacctaaaagtgcatctgccaaaaaacatgaggaagaaagagagaaacaggaaaaggaaattgacatctatgctaacctgtctgatgaaaaggctttcgtgttttcagtcgccttggcagaaataaatagaaaaattatcaatcaaagacttattctctgatacttgtttgcaaaatctgctgaaacttctgtcaggataacatcagcaaattctcaaacagttatggactctcaggagcattctgactgcatcaataagggccatcgattgtttctttctcgcctgtcgtttagcctgtgccacacttcgggagcaaagctgtgtaggcttggactgttctgggatttccttgtttaccaaggagtattgtcagtgttttgtgtttgggatataagtaagtgtatttgccaacaacaaaaaaaaaccaacaaaaatgctggatggatgttaaaggataaaaagtgatggggtatggggtaggtatgaaaactagggtaataagatgcttgattgttttcaggtttgccaccagagatgcaatattttaaatactgtcagaaagagtgatttttaaaaatatatatttcagattttcagtgctaacagattgcatatatacagttcatttacttttattaaattggcaatcgatattttattgaatggggaattaagaatataaactgtaaattttgtcttaaattgattttttttcttggcctttatttttattacttaaggtatgagttatattttaggagatactttctagacagtttgaagtttgggtgctatatgaagaaaaacatttaatgatatactcagatataaacaccttgttttcttgaatgtaatttatttattagctaaaaaaaaaaaacaaactgctctcaagatggtgcctgttaacctaaacatgaaatatatttattacatgcaaaatatttcttagccacttttaagcagtaatgttttatctgaatggatatttgtttctatatcctgataattatttaa

SEQ ID NO: 118492 - DNA, 6640 bp, Homo sapiens
  Payload ID: 3184
  Gene Symbol: C16orf87
  Gene Name: chromosome 16 open reading frame 87
  Uniprot ID: Q6PH81
  ENST ID: ENST00000394806
  CDS Start-End: 14-295
aagggagaggagcatgtctgcaactcgagccaagaaagtgaagatggccaccaaatcatgccccgagtgcgaccaacaggttcctgttgcatgtaaatcatgtccttgtggttacatatttattagcagaaaacttttaaatgcaaaacactcagagaaatcaccaccttctacagagaaacaggaaaaggaaattgacatctatgctaacctgtctgatgaaaaggctttcgtgttttcagtcgccttggcagaaataaatagaaaaattatcaatcaaagacttattctctgatacttgtttgcaaaatctgctgaaacttctgtcaggataacatcagcaaattctcaaacagttatggactctcaggagcattctgactgcatcaataagggccatcgattgtttctttctcgcctgtcgtttagcctgtgccacacttcgggagcaaagctgtgtaggcttggactgttctgggatttccttgtttaccaaggagtattgtcagtgttttgtgtttgggatataagtaagtgtatttgccaacaacaaaaaaaaaccaacaaaaatgctggatggatgttaaaggataaaaagtgatggggtatggggtaggtatgaaaactagggtaataagatgcttgattgttttcaggtttgccaccagagatgcaatattttaaatactgtcagaaagagtgatttttaaaaatatatatttcagattttcagtgctaacagattgcatatatacagttcatttacttttattaaattggcaatcgatattttattgaatggggaattaagaatataaactgtaaattttgtcttaaattgattttttttcttggcctttatttttattacttaaggtatgagttatattttaggagatactttctagacagtttgaagtttgggtgctatatgaagaaaaacatttaatgatatactcagatataaacaccttgttttcttgaatgtaatttatttattagctaaaaaaaaaaaacaaactgctctcaagatggtgcctgttaacctaaacatgaaatatatttattacatgcaaaatatttcttagccacttttaagcagtaatgttttatctgaatggatatttgtttctatatcctgataattatttaaattgttactttcaatctggaagaaaaaataaaccttaatattgaaactaagtagattaaatagtgtgataaaagttttttgttctggtgaagtttgtgaaatatatttaaattcttaatttttctagtgttaagtcataatcgtttatagttgatttatattaaatgcttttgcattttggcatatcaatttaatgattaacatattcaaacttggtaatcactccccttattttcagtcgctcttcccccaatctgtttagaaatccttttaaagccttcttacagaagatagtcatcagttagatttagcccccttttaagagaatctccctttcaattttagccgtaacattatcaatttcagacttcatcctgcatctcccatcacctcctcaaagaaaaaaggtcaacattttttcctactttatttaaatggtaaccagcagagggagcttaagaggtactctagataggataaagaattttcctaaggattccttttcctttaatccctgtatctatctgcaggtactactgcaactattttgtatgcattttatttatttatttaggagacagagtcttgctcggtcgcccaggctggagtgcagtggcactgtctcagctcactgcaacctctgcctcctgggttcaagtgattcttatgcctcagcctcctgagtagctgtgactagaggcgtgcgccaccacgcctggctgtttttttttttgtattttttagtacagatggggtctcagcatgttggccaggctggtctcaaattcctggccttaggtgatctgcccgccttggcctcccaaagtgctgggattacaggcatgagccactgcactcagccttgtgtgcgttttagagtcttaactagtagtttccccaataatgtaatgtgattttatctttgaaacatactgtaaggaaacttttgattttaagtaaaaaagcttaaaaatgattaatatctaaaaatgcttgtatacatatatatgtcctcagaaaaagcaagaacagcttgtggaataagcacgtctttaaggaattatcgatgtcagagtctatccatttaaagctgaagaccattacaggaaagtcatgttaaaatattcattggatatggtaaaggaggtactggtggctgggctggagcttgccgtatagaaaagtaattacttcagatctcataatgttaaattattggcttatttaaaaatttccgtggcagagaggcaaattaggtttcctctgtgacataacctatttaaccaatttttcaaaaaattgtactctatgagctttcttgttataaagctaaaaaatttaatttgtctaggcatgttgtaatggtcccagaaaatattactttgtcactggtgtcagagaaacctctgtcatcagcagatgtcctaagagtataattatagttctttacttaatccaaaatttgttctgctctgatatctataaatgatatgattattcaaaataccttgaaatgattccacaattagattaggtctgttgaagataacttattcttaaatatgagtaagattaaataaaagtagtttgagagttgttactccctgcctcaactccatggtattccaaaatgtttttgtgggcactttaatacttgtagtttgattttgtttgttagttttagaaatgaacatttcttagattttcatgggtattttttggctgtatttaaatgtaaatgatataaaagtaagggaaattgtgcaaattatttcttgtgtagtaatcagtggaagtgatcaaacagcttgaagcagtttatgatgagaaaatttaaaattgcaaatgacctgaaaatttagccagtctattcttatttctttaaatttcagaaatacttaagaaaaaaaaaaaaaaggtcagtatgacctctgagttgcttcctaaaagtaatcagatagtgttctccctcagataagatttcaaattgaaaagtatttgacttctttaactctagtaattgcacttgattctctaattctgatcattaaaatgacttggcaatatttaattttggcttgcctttcaatctgcatgtttgtcttaaatttagaaaaattaagctctttacttacttttatataaagtattaattggccaggcatggtggcttacacctgtaatcccaacactttgggaggccaaggcaggagagttgtttgaagccaggagtttgagaccagcctgggcaacatgatgagaccgcgtctctacaaaaagtaaaattagctgggtgtggtgcttccagctactaggcagctgaggctaaaggatcacttgagcccaggagttcgaggctgcagtgagtgatgatcttgccactgcactccagcctgggaggcagagcaagaaacaccctgtgtgaaaaaagtattgaatttgtttgattccactttcaaaatatgctctagatacaggtagtcattctgccaaattgtgttcttctctaaaacattttgtccgtcattctttgaaactcattcttaattatttccactttaccttctagtttggtttgatgccttatattcttgctagttaaaagcattttttccctagtattttctgtctttctagcctttaaggcatattgttgttaacaaatctcttatttaagttaattaaagttttttctgtgcagctgggttttttcttttactacatgacaagcttcatttttacatttggaagtacatgtatatatgtttatatatttttattctcaggatctattttctagggaactatttttttaaattattcttttgtgctgccttaacccatttattatagtttgaatattagtagtacttactactcaaagattacaactatactaataactatcctaacatacaaagcagactctccaggattaaaagtatgagacatataacagagtctggaatagaataattctttttaccccagtcaagtatttgccttttgcattattaaggaatctgttttgttcttttattgataatttctatatttttttctttgccttattgcactggttgggactttttgccttgatccagttgtaggggggaaacattcagtcattaagcattaaataactttgttgttgttgtgggcttgaaaaaataccctttagtagattgagggtagactcttttatttctgcttgttggaagttttctgtcaggaacagatgttgaattttgtcagatgctttttctgcataattgataggaccttttttctcccctttagaatgttcatatggtgaaacatactgatagcttttcttttcttttttttttgacacggagtctcactctgtcacccaggctggagtgcaatggtgcgatcttggctcactgcaccctctgcctcttgggttcaagcttccctcaccagcctcccaagtacctgggtatacaggtgtgcatcaccatgcccggctaatttttgaatttttagtagagataggtttttaccatgttggccaggctggtcttcaactcctgactcagcctcccaaagtgttgggattacagtctcgctctgtcgcccaggctggagggcagtggtgtgatcttggctcaatgcaaccttgcaacctctgcctcccgagttcaagcgattctcctgccttagcctcctgagtagctggaattacaggcgcacgccactacacccagcttctttttgtatttttagtagagatggagtttcaccatgttggccaagctggtctcgaactcctgagctccggtgatccacccgcctttacaggcatgagccaccgtgcccggctgcatttctcttttgtaagaacctgctctggtttattgatattttgctgtttttctgttttaagtttcattaatttctgatctttagtattttctcctttctttgctttgggcttatttgctcccttttctagcttattgtggcggaagctcagatcattgattttaaaatttacttatttatttatttatttatttaattcaacactgatcagaaggctttttgtgcttttctaaaaaaagcatttaatgctataaatttcccatttgctttatctcacaaattttattgtgttgtaattttgtgttcaatttagaatattctgatttttcttggtattactataattttcaaatatttagagtttttttcagttatctttctgttactgattgtaatttattgttttttaaaattatagttctttgaatagttttgcagtatttgctctagggattactataaacatacttcactttttacagttcacttagaagtcaatattttaccagttcaagtggaatgtagaaaaatcttaccactgtttacattcctttaccctctcccctttatgttataattttcttataaatcataagacttggctgggcacagtggctcacctgtaatcccaggactgggaggccgaggcgagcagattgcttaagtccaggagttcgagaccagcctggacaatgtggtgaaaccccaactctacaaaaaatacacaaaattagctaggcgtggtagcatgttcctgtagtcccagctactcaggaggctgaagtgggaggattacttgagcccaggaggcagaggttgcagtgagccaagatcactccactccactccagcctgagtgacagagctagacactgtgtctcaaaaaataaaaataaaaaataagactcatcagataatgtattttttccttacaactatcatagatatttttaagaacccaagaggaaaacagtctatcacatttaccacaatatttatcatttgtattaatcttccttaattcttgatgttccaagtttacataggtatcagtccttttcatctggaaaatttcttttagtgcaggtctgttgacatttaattctcttattttttcttcatctgagaatgtctttattttgccttaattcatgaaagatatttttgctggatataaactactgtgttgacagttctttcagcctccatggtttctgatgagaaatgtgcagccattaaagtaatatttcccctgtatgaaacatgttatttttctctgagtattttcaggaatctttgtctttggtttttattggtttgattatgatgtgcccgggtgtttgaatttattctctttgggatttgttgagcttaaatgtgtaagtttatgcctttcatcagattatgtaaagttttaaaccattcagatattttctgctctactttctcctccctcttaggctccagtgatgcaagtgttagactctttggtattatctcacagatctcagaacctctgttcatttattttattttaataaatcatttcagttaacaaaatcatatattgtatgcagcatgatgtttcaatatgtatgttcacattgtaggatgtctaaagtaaagataatgaacata

SEQ ID NO: 118493 - DNA, 879 bp, Homo sapiens
  Payload ID: 3184
  Gene Symbol: C16orf87
  Gene Name: chromosome 16 open reading frame 87
  ENST ID: ENST00000565112
  CDS Start-End: 1-485
cgggcgcgcgggcgggcggcagtggcttggcggccgttgtctgtggaggggggcctcgccgggctcccggaggccgagcggttcctgttgcatgtaaatcatgtccttgtggttacatatttattagcagaaaacttttaaatgcaaaacactcagagaaatcaccaccttctacagaaaacaagcatgaggccaagaggaggcgaacagagagagttaggagagagaagataaattctacagtaaataaagatttagaaaacagaaagaggtctcgaagtaacagccattcagatcatatcagacgaggaagaggaagacctaaaagtgcatctgccaaaaaacatgaggaagaaagagggtgcagaaaacctatgccgaggactcctattttagaagggaaactaggtaaagaaaagtcagcagagaaaaaggaaaagagagaaatactgcctggctcagaaaacaacattcttttcagttgaaatagagggaatgcagctgaaagaagagaatgcttctggtgagaaacaggaaaaggaaattgacatctatgctaacctgtctgatgaaaaggctttcgtgttttcagtcgccttggcagaaataaatagaaaaattatcaatcaaagacttattctctgatacttgtttgcaaaatctgctgaaacttctgtcaggataacatcagcaaattctcaaacagttatggactctcaggagcattctgactgcatcaataagggccatcgattgtttctttctcgcctgtcgtttagcctgtgccacacttcgggagcaaagctgtgtaggcttggactgttctgggatttccttgtttaccaaggagtattgtcagtgttttgtgtttgggatata

SEQ ID NO: 118494 - DNA, 1872 bp, Homo sapiens
  Payload ID: 3185
  Gene Symbol: C16orf89
  Gene Name: chromosome 16 open reading frame 89
  Uniprot ID: Q6UX73
  ENST ID: ENST00000315997
  CDS Start-End: 203-1411
ccgtcatccccctgcagccacccttcccagagtcctttgcccaggccaccccaggcttcttggcagccctgccgggccacttgtcttcatgtctgccagggggaggtgggaaggaggtgggaggagggcgtgcagaggcagtctgggcttggccagagctcagggtgctgagcgtgtgaccagcagtgagcagaggccggccatggccagcctggggctgctgctcctgctcttactgacagcactgccaccgctgtggtcctcctcactgcctgggctggacactgctgaaagtaaagccaccattgcagacctgatcctgtctgcgctggagagagccaccgtcttcctagaacagaggctgcctgaaatcaacctggatggcatggtgggggtccgagtgctggaagagcagctaaaaagtgtccgggagaagtgggcccaggagcccctgctgcagccgctgagcctgcgcgtggggatgctgggggagaagctggaggctgccatccagagatccctccactacctcaagctgagtgatcccaagtacctaagagagttccagctgaccctccagcccgggttttggaagctcccacatgcctggatccacactgatgcctccttggtgtaccccacgttcgggccccaggactcattctcagaggagagaagtgacgtgtgcctggtgcagctgctgggaaccgggacggacagcagcgagccctgcggcctctcagacctctgcaggagcctcatgaccaagcccggctgctcaggctactgcctgtcccaccaactgctcttcttcctctgggccagaatgagggggtgcacacagggaccactccaacagagccaggactatatcaacctcttctgcgccaacatgatggacttgaaccgcagagctgaggccatcggatacgcctaccctacccgggacatcttcatggaaaacatcatgttctgtggaatgggcggcttctccgacttctacaagctccggtggctggaggccattctcagctggcagaaacagcaggaaggatgcttcggggagcctgatgctgaagatgaagaattatctaaagctattcaatatcagcagcatttttcgaggagagtgaagaggcgagaaaaacaatttccagattctcgctctgttgctcaggctggagtacagtggcgcaatctcggctcactgcaacctttgcctcctgggttcaagcaattctcttgcctcatcctcccgagtagctgggactacaggagcgtgccaccatacctggctaatttttatatttttttagtagagacagggtttcatcatgttgctcatgctggtctcgaactcctgatctcaagagatccgcccacctcaggctcccaaagtgtgggattataggtgtgagccaccgcgtctggctgaaaagcactttcaatgagactgtgttgaataaagggccaaggttcttgccacccagcactcatgggggctctctcccctagatggctgctcctcccacaacacagccacagcagtggcagccctgggtggcttcctatacatcctggcagaataccccccagcaaacagagagccacacccatccacaccgccaccaccaagcagccgctgagacggacggttccatgccagctgcctggaggaggaacagacccctttagtcctcatcccttagatcctggagggcacggatcacatcctgggaagaaggcatctggaggataagcaaagccaccccgacacccaatcttggaagccctgagtaggcaaggccagggtaggtgggggccgggagggacccaggtgtgaacggatgaataaagttcaactgcaactga

SEQ ID NO: 118495 - DNA, 1829 bp, Homo sapiens
  Payload ID: 3185
  Gene Symbol: C16orf89
  Gene Name: chromosome 16 open reading frame 89
  ENST ID: ENST00000474471
  CDS Start-End: 64-1368
agtctgggcttggccagagctcagggtgctgagcgtgtgaccagcagtgagcagaggccggccatggccagcctggggctgctgctcctgctcttactgacagcactgccaccgctgtggtcctcctcactgcctgggctggacactgctgaaagtaaagccaccattgcagacctgatcctgtctgcgctggagagagccaccgtcttcctagaacagaggctgcctgaaatcaacctggatggcatggtgggggtccgagtgctggaagagcagctaaaaagtgtccgggagaagtgggcccaggagcccctgctgcagccgctgagcctgcgcgtggggatgctgggggagaagctggaggctgccatccagagatccctccactacctcaagctgagtgatcccaagtacctaagagagttccagctgaccctccagcccgggttttggaagctcccacatgcctggatccacactgatgcctccttggtgtaccccacgttcgggccccaggactcattctcagaggagagaagtgacgtgtgcctggtgcagctgctgggaaccgggacggacagcagcgagccctgcggcctctcagacctctgcaggagcctcatgaccaagcccggctgctcaggctactgcctgtcccaccaactgctcttcttcctctgggccagaatgagggggtgcacacagggaccactccaacagagccaggactatatcaacctcttctgcgccaacatgatggacttgaaccgcagagctgaggccatcggatacgcctaccctacccgggacatcttcatggaaaacaatgtaactgggcatcctgtattttacctgccactgtgtgacagtttcctgcccccaaaggctgccccagtgacggagctctacacagatggaccagtcatgttctgtggaatgggcggcttctccgacttctacaagctccggtggctggaggccattctcagctggcagaaacagcaggaaggatgcttcggggagcctgatgctgaagatgaagaattatctaaagctattcaatatcagcagcatttttcgaggagagtgaagaggcgagaaaaacaatttccagattctcgctctgttgctcaggctggagtacagtggcgcaatctcggctcactgcaacctttgcctcctgggttcaagcaattctcttgcctcatcctcccgagtagctgggactacaggagcgtgccaccatacctggctaatttttatatttttttagtagagacagggtttcatcatgttgctcatgctggtctcgaactcctgatctcaagagatccgcccacctcaggctcccaaagtgtgggattataggtgtgagccaccgcgtctggctgaaaagcactttcaatgagactgtgttgaataaagggccaaggttcttgccacccagcactcatgggggctctctcccctagatggctgctcctcccacaacacagccacagcagtggcagccctgggtggcttcctatacatcctggcagaataccccccagcaaacagagagccacacccatccacaccgccaccaccaagcagccgctgagacggacggttccatgccagctgcctggaggaggaacagacccctttagtcctcatcccttagatcctggagggcacggatcacatcctgggaagaaggcatctggaggataagcaaagccaccccgacacccaatcttggaagccctgagtaggcaaggccagggtaggtgggggccgggagggacccaggtgtgaacggatgaataaagttcaactgcaactga

SEQ ID NO: 118496 - DNA, 1444 bp, Homo sapiens
  Payload ID: 3185
  Gene Symbol: C16orf89
  Gene Name: chromosome 16 open reading frame 89
  Uniprot ID: Q6UX73
  ENST ID: ENST00000472572
  CDS Start-End: 133-1218
gccgggccacttgtcttcatgtctgccagggggaggtgggaaggaggtgggaggagggcgtgcagaggcagtctgggcttggccagagctcagggtgctgagcgtgtgaccagcagtgagcagaggccggccatggccagcctggggctgctgctcctgctcttactgacagcactgccaccgctgtggtcctcctcactgcctgggctggacactgctgaaagtaaagccaccattgcagacctgatcctgtctgcgctggagagagccaccgtcttcctagaacagaggctgcctgaaatcaacctggatggcatggtgggggtccgagtgctggaagagcagctaaaaagtgtccgggagaagtgggcccaggagcccctgctgcagccgctgagcctgcgcgtggggatgctgggggagaagctggaggctgccatccagagatccctccactacctcaagctgagtgatcccaagtacctaagagagttccagctgaccctccagcccgggttttggaagctcccacatgcctggatccacactgatgcctccttggtgtaccccacgttcgggccccaggactcattctcagaggagagaagtgacgtgtgcctggtgcagctgctgggaaccgggacggacagcagcgagccctgcggcctctcagacctctgcaggagcctcatgaccaagcccggctgctcaggctactgcctgtcccaccaactgctcttcttcctctgggccagaatgagggggtgcacacagggaccactccaacagagccaggactatatcaacctcttctgcgccaacatgatggacttgaaccgcagagctgaggccatcggatacgcctaccctacccgggacatcttcatggaaaacatcatgttctgtggaatgggcggcttctccgacttctacaagctccggtggctggaggccattctcagctggcagaaacagcaggaaggatgcttcggggagcctgatgctgaagatgaagaattatctaaagctattcaatatcagcagcatttttcgaggagagtgaagaggcgagaaaaacaatttccagatggctgctcctcccacaacacagccacagcagtggcagccctgggtggcttcctatacatcctggcagaataccccccagcaaacagagagccacacccatccacaccgccaccaccaagcagccgctgagacggacggttccatgccagctgcctggaggaggaacagacccctttagtcctcatcccttagatcctggagggcacggatcacatcctgggaagaaggcatctggaggataagcaaagccaccccgacacccaatcttggaagccctgagtaggcaaggccagggtaggtgggggccgggagggacccaggtgtgaacggatgaataaagttcaactgcaactga

SEQ ID NO: 118497 - DNA, 929 bp, Homo sapiens
  Payload ID: 3186
  Gene Symbol: C16orf90
  Gene Name: chromosome 16 open reading frame 90
  ENST ID: ENST00000399645
  CDS Start-End: 1-574
agagcagggccctgctgcacccaagtcctggttgctcctccccaccacactggccctccatggaagccttgatgcagtgagccaggcccaaggacgccccggccaccctgacgcaccccccaacatctacgaggggggcctggggtccccgcagccgcagtgccccagtgcccagggaagcaagcccaagaacttccggctgcgccacctccggggcctgggcctctacctggagagccacccgccacccactggccagtgtgagagccactggctgggccggcttatggctgggggctgcctgccacagcctgagggcacagcctgggccctggacctgccacaggggactctgggcccacgtaacagcctctgttcagcccttctggaagcccgattgcccagggacagcctgggaagcagtgcttccagttccagcatggacccagacaagggtgccctcccccagcctagtccttctaggctcaggcccaagaggtcctgggggacctgggaagaggccatgtgtcccttgtgcaagagaacccgctctggggccctggagaggccatagggatcccgagtgccaggactgggtacaggaggggcaggatggccgaggaggcagcctgagcaggaggggctcggcccccggcagtggccctgccacatggggtggcccaggcagcggcccagcgcccaggcctgggcctcgggagaatgtgatggggagagggaggaggaggaggttccgagggaggggcagaagcaatagaagcatggccgtgcccttgcagcctgcttagactccagtcagccacttgtacctgggaggccgggctgagtgcagaatcaggcccccccgccaccgcctccctgagaggccggggagcccacagctctgatctcaataaaagccaaggcctgca

SEQ ID NO: 118498 - DNA, 907 bp, Homo sapiens
  Payload ID: 3186
  Gene Symbol: C16orf90
  Gene Name: chromosome 16 open reading frame 90
  Uniprot ID: A8MZG2
  ENST ID: ENST00000437192
  CDS Start-End: 4-552
tccatggaagccttggtctgtgcattttctgagctgcacataagagaagatgcagtgagccaggcccaaggacgccccggccaccctgacgcaccccccaacatctacgaggggggcctggggtccccgcagccgcagtgccccagtgcccagggaagcaagcccaagaacttccggctgcgccacctccggggcctgggcctctacctggagagccacccgccacccactggccagtgtgagagccactggctgggccggcttatggctgggggctgcctgccacagcctgagggcacagcctgggccctggacctgccacaggggactctgggcccacgtaacagcctctgttcagcccttctggaagcccgattgcccagggacagcctgggaagcagtgcttccagttccagcatggacccagacaagggtgccctcccccagcctagtccttctaggctcaggcccaagaggtcctgggggacctgggaagaggccatgtgtcccttgtgcaagagaacccgctctggggccctggagaggccatagggatcccgagtgccaggactgggtacaggaggggcaggatggccgaggaggcagcctgagcaggaggggctcggcccccggcagtggccctgccacatggggtggcccaggcagcggcccagcgcccaggcctgggcctcgggagaatgtgatggggagagggaggaggaggaggttccgagggaggggcagaagcaatagaagcatggccgtgcccttgcagcctgcttagactccagtcagccacttgtacctgggaggccgggctgagtgcagaatcaggcccccccgccaccgcctccctgagaggccggggagcccacagctctgatctcaataaaagccaaggcctgca

SEQ ID NO: 118499 - DNA, 978 bp, Homo sapiens
  Payload ID: 3187
  Gene Symbol: C16orf91
  Gene Name: chromosome 16 open reading frame 91
  Uniprot ID: Q4G0I0
  ENST ID: ENST00000442039
  CDS Start-End: 78-476
cccggtttccggtttccggcgacggaagtgacgctatcacggcgcgccaaggcgtcagtcgaggagtcaaggcagcaatgaatcgtgtcttgtgtgccccggcggccggggccgtccgggcgctgaggctcataggctgggcttcccgaagccttcatccgttgcccggttcccgggatcgggcccaccctgccgccgaggaagaggacgaccctgaccgccccattgagttttcctccagcaaagccaaccctcaccgctggtcggtgggccataccatgggaaagggacatcagcggccctggtggaaggtgctgcccctcagctgcttcctcgtggcgctgatcatctggtgctacctgagggaggagagcgaggcggaccagtggttgagacaggtgtggggagaggtgccagagcccagtgatcgttctgaggagcctgagactccagctgcctacagagcgagaacttgacggggtgcccgctggggctggcaggaagggagccgacagccgcccttcggatttgatgtcacgtttgcccgtgactgtcctggctatgcgtgcgtcctcagcactgaaggacttggctggtggatggggcacttggctatgctgattcgcgtgaaggcggagcagaatctcagcagatcggaaactgctcctcgcctggctcttgatgtccaaggattccatcggcaagacttctcagatccttggggaaggtttcagttgcactgtatgctgttggatttgccaagtctttgtataacataatcatgtttccaaagcacttctggtgacacttgtcatccagtgttagtttgcaggtaatttgctttctgagatagaatatctggcagaagtgtgaaactgtattgcatgctgcggcctgtgcaaggaacacttccacatgtgagttttacacaacaacaaatgaaaataaattttaattttataatatgggattagatga

SEQ ID NO: 118500 - DNA, 1005 bp, Homo sapiens
  Payload ID: 3187
  Gene Symbol: C16orf91
  Gene Name: chromosome 16 open reading frame 91
  ENST ID: ENST00000563974
  CDS Start-End: 314-511
cgccaaggcgtcagtcgaggagtcaaggcagcaatgaatcgtgtcttgtgtgccccggcggccgggtgagctcctcaaggtctcggagggccgagggcagacaccggcgggcgggcggagcgcttactgctctctctcttccagggccgtccgggcgctgaggctcataggctgggcttcccgaagccttcatccgttgcccggttcccgggatcgggcccaccctgccgccgaggaagaggacgaccctgaccgccccattgagttttcctccagcaaagccaaccctcaccgctggtcggtgggccataccatgggaaagggacatcagcggccctggtggaaggtgctgcccctcagctgcttcctcgtggcgctgatcatctggtgctacctgagggaggagagcgaggcggaccagtggttgagacaggtgtggggagaggtgccagagcccagtgatcgttctgaggagcctgagactccagctgcctacagagcgagaacttgacggggtgcccgctggggctggcaggaagggagccgacagccgcccttcggatttgatgtcacgtttgcccgtgactgtcctggctatgcgtgcgtcctcagcactgaaggacttggctggtggatggggcacttggctatgctgattcgcgtgaaggcggagcagaatctcagcagatcggaaactgctcctcgcctggctcttgatgtccaaggattccatcggcaagacttctcagatccttggggaaggtttcagttgcactgtatgctgttggatttgccaagtctttgtataacataatcatgtttccaaagcacttctggtgacacttgtcatccagtgttagtttgcaggtaatttgctttctgagatagaatatctggcagaagtgtgaaactgtattgcatgctgcggcctgtgcaaggaacacttccacatgtgagttttacacaacaacaaatgaaaataaattttaattttataatatggga

SEQ ID NO: 118501 - DNA, 895 bp, Homo sapiens
  Payload ID: 3188
  Gene Symbol: C16orf92
  Gene Name: chromosome 16 open reading frame 92
  Uniprot ID: Q96LL3
  ENST ID: ENST00000300575
  CDS Start-End: 22-420
aggagtcatgaggctgtggccatgggtgctggtgtgggtgtggctggctgcactaggggccatagaaactgggtcccaagtcagcttccgcctcgagagataaaggcaggggtcagcttggctgttgtcacagagtttgcttgggtcctagcacccagacccaagcgtgccacggcgtcagccctggggacagagtctccgcgcttcttagacagacctgacttcttcgattatccggactcagaccaagccaggctgctggctgtggcccagtttattggagagaaacccatcgtgttcattaactcaggttccagccccgggctcttccatcacatcctggtgggcttgctggtggtggcgttcttctttctccttttccagttctgcacccacataaacttccagaaaggggcctaaagagccggacaagggctctggactcaacctgagcacccacacccacctcctctcctgttgatgagcaaaagttccctgctttcctcctccctgactgcccagcgagcagctggggatcctgtcccctctgtttcccatggcccaagccccccacctcctcccttcccagccccaaagaacttggtggcaagggccttggtggcgttcacgcagatcgtcttttattagcggtctgtaaagcacctcccagggtcccccgaccccagattggaggaagccttgagaggtcagtagcaccagggacatggcagggcccgagggcgcgatgtgcagccgatggtgagggactgggcgccctcgcctgcccccggggttgtcagcactgggaaggcttgggggtagcagccacctccttcccccaacccaacagactagttcaaatttgggtaaataaataaaataaataagattcctc

SEQ ID NO: 118502 - DNA, 462 bp, Homo sapiens
  Payload ID: 3188
  Gene Symbol: C16orf92
  Gene Name: chromosome 16 open reading frame 92
  ENST ID: ENST00000569198
  CDS Start-End: 1-345
gcacccagacccaagcgtgccacggcgtcagccctggggacagagtctccgcgcttcttagacagacctgacttcttcgattatccggactcagaccaagccaggctgctggctgtggcccagtttattggagagaaacccatcgtgttcattaactcaggttccagccccgggctcttccatcacatcctggtgggcttgctggtggtggcgttcttctttctccttttccagttctgcacccacattatagtcgggggaaaagaaaagaccagaagatgcccacagaccaaaaggcacagatacagtgccaaaataagcccaggacaggcagccaagcgttaaggggaaaatgcagagcaaaaggagccaaggacaaagaaagttccatgtacttggagagtaaacaaaaacgagaaatggatgaatagacaagacagcatttttcttctggagtcagca

SEQ ID NO: 118503 - DNA, 413 bp, Homo sapiens
  Payload ID: 3188
  Gene Symbol: C16orf92
  Gene Name: chromosome 16 open reading frame 92
  ENST ID: ENST00000561910
  CDS Start-End: 22-141
aggagtcatgaggctgtggccatgggtgctggtgtgggtgtggctggctgcactaggggccatagaaactgcacccagacccaagcgtgccacggcgtcagccctggggacagagtctccgcgcttcttagacagacctgacttcttcgattatccggactcagaccaagccaggctgctggctgtggcccagtttattggagagaaacccatcgtgttcattaactcaggttccagccccgggctcttccatcacatcctggtgggcttgctggtggtggcgttcttctttctccttttccagttctgcacccacataaacttccagaaaggggcctaaagagccggacaagggctctggactcaacctgagcacccacacccacctcctctcctgttgatgagcaaaagtt

SEQ ID NO: 118504 - DNA, 233 bp, Homo sapiens
  Payload ID: 3188
  Gene Symbol: C16orf92
  Gene Name: chromosome 16 open reading frame 92
  ENST ID: ENST00000567847
  CDS Start-End: 1-150
tcagccctggggacagagtctccgcgcttcttagacagacctgacttcttcgattatccggactcagaccaagccaggctgctggctgtggcccagtttattggagagaaacccatcgtgttcattaactcagggacagccaagcgttaaggggaaaatgcagagcaaaaggagccaaggacaaagaaagttccatgtacttggagagtaaacaaaaacgagaaatggatgaa

SEQ ID NO: 118505 - DNA, 953 bp, Homo sapiens
  Payload ID: 3189
  Gene Symbol: C16orf95
  Gene Name: chromosome 16 open reading frame 95
  Uniprot ID: Q9H693
  ENST ID: ENST00000253461
  CDS Start-End: 175-651
agcgggacgggcgggcgcgcgggcgttgttgggctcctctgagcggttgaggttggggctggggttgagctcgggttgggttcctcctggggcaggagggaaaggcgggagccagggcgtcagggcctgcggacgatgtgtgtgtgaaagggcgcgtcagccataagaagccatatgcgtgcgagccggtccccaccgtccccgcggcgttgtcaccatcatcatgaggccactggagcagcctcaggcgctgctgccggggggccgggcgcggggtgcgtcgggctctgcaggttggcactcacacccagcgcgcaggatggcaggaatagcacatttcaaacctacaagaaagaagtgtgcctcccccgtcattcgatgcaccctggcccctgggccatctgctgtgaatgccagaccagattcgggggccgcctgcctgtgtccagggtggaagcagcactgccttactgggtccctctgtccctgagaccccgaaagcagcacccctgctggatgcatgctgctggcacaactgctggcggatctgcggtgatgagtgcctgttgtccaagttccagcagctccaggccccctaccaggaccagctaccggctcctgcagcgcgtctgctgcccctcggcctcctgaccctcctccaggccatcccgagggtcatcatggccattcgccagtgttttggggtttgaagttggaatcttcagctactgtcaagaacagccacaaaaatgtgtcacgatcaagatctttgagagtccaccaatcaggaggcgtctgtgacagtcgctgtcttctcagaacagaatccacacccaggattcaacccaaatgatttctcatcaggtgattcttggttgtagcaaagttcatgtgaatgtgggtgagtttctgttatgaatgtggtcaataaatgttatttgtgaaactctaaa

SEQ ID NO: 118506 - DNA, 1031 bp, Homo sapiens
  Payload ID: 3189
  Gene Symbol: C16orf95
  Gene Name: chromosome 16 open reading frame 95
  ENST ID: ENST00000567970
  CDS Start-End: 139-858
ctctgagcggttgaggttggggctggggttgagctcgggttgggttcctcctggggcaggagggaaaggcgggagccagggcgtcagggcctgcggacgatgtgtgtgtgaaagggcgcgtcagccataagaagccatatgcgtgcgagccggtccccaccgtccccgcggcgttgtcaccatcatcatgaggccactggagcagcctcaggcgctgctgccggggggccgggcgcggggtgcgtcgggctctgcaggttggcactcacacccagcgcgcaggatggcaggaatagcacatttcaaacctacaagaaagaagtgtgcctcccccgtcattcgatgcaccctggcccctgggccatctgctgtgaatgccagaccagattcgggggccgcctgcctgtgtccagggtggaagcagcactgccttactgggtccctctgtccctgagaccccgaaagcagagtcaaaagacggttcaatttcctatcccccaaaccgccaagatgtgcccctgcctatgccaccgctttgggggccgcctcccgatgcctagggaccaggcagtgatgccctactgggtgccccaggtcctgaggtctcagcagcagatagtcaggaggcagcagagtttgaaaggcatccaagcacccctgctggatgcatgctgctggcacaactgctggcggatctgcggtgatgagtgcctgttgtccaagttccagcagctccaggccccctaccaggaccagctaccggctcctgcagcgcgtctgctgcccctcggcctcctgaccctcctccaggccatcccgagggtcatcatggccattcgccagtgttttggggtttgaagttggaatcttcagctactgtcaagaacagccacaaaaatgtgtcacgatcaagatctttgagagtccaccaatcaggaggcgtctgtgacagtcgctgtcttctcagaacagaatccacacccaggattcaacccaaatgatttctcatcaggtgattcttggttgtagca

SEQ ID NO: 118507 - DNA, 974 bp, Homo sapiens
  Payload ID: 3189
  Gene Symbol: C16orf95
  Gene Name: chromosome 16 open reading frame 95
  ENST ID: ENST00000618367
  CDS Start-End: 228-659
agtcagcgggacgggcgggcgcgcgggcgttgttgggctcctctgagcggttgaggttggggctggggttgagctcgggttgggttcctcctggggcaggagggaaaggcgggagccagggcgtcagggcctgcggacgatgtgtgtgtgaaagggcgcgtcagccataagaagccatatgcgtgcgagccggtccccaccgtccccgcggcgttgtcaccatcatcatgaggccactggagcagcctcaggcgctgctgccggggggccgggcgcggggtgcgtcgggctctgcaggttggcactcacacccagcgcgcaggatggcaggcaagaatagcacatttcaaacctacaagaaagaagtgtgcctcccccgtcattcgatgcaccctggcccctgggccatctgctgtgaatgccagaccagattcgggggccgcctgcctgtgtccagggtggaagcagcactgccttactgggtccctctgtccctgagaccccgaaagcagcacccctgctggatgcatgctgctggcacaactgctggcggatctgcggtgatgagtgcctgttgtccaagttccagcagctccaggccccctaccaggaccagctaccggctcctgcagcgcgtctgctgcccctcggcctcctgaccctcctccaggccatcccgagggtcatcatggccattcgccagtgttttggggtttgaagttggaatcttcagctactgtcaagaacagccacaaaaatgtgtcacgatcaagatctttgagagtccaccaatcaggaggcgtctgtgacagtcgctgtcttctcagaacagaatccacacccaggattcaacccaaatgatttctcatcaggtgattcttggttgtagcaaagttcatgtgaatgtgggtgagtttctgttatgaatgtggtcaataaatgttatttgtgaaactctaaactggccacctctt

SEQ ID NO: 118508 - DNA, 3823 bp, Homo sapiens
  Payload ID: 3190
  Gene Symbol: C16orf96
  Gene Name: chromosome 16 open reading frame 96
  Uniprot ID: A6NNT2
  ENST ID: ENST00000444310
  CDS Start-End: 1-3426
atgagcttctcactcacgttcaccgagctggccaacatcgccatcccacagtgcggggtgctgaacttcaaggccctgcacctcctgctgcacggcatcttggagcacatccacatggccgagctcaagaaagtcctctcaggcgatgaggacttcctgcagacctcgcaggtggtcatcatgcccagggaaggagacgcccagcctatcctcaaccccatgaagaggctcagcaatgtcttcgaccacgtggtgagccgcctcgacaagttggagaaccagctggccctgctgcaggacctgccctccactgcccagctgctggaagccagccagggcactgcccggcccgtccaggacctgtggcatctgatcaagctccggaagatggtggagggtcatgatgaagtcatggccaagtcaatgcagaccctgcaggacttgctcactgatcttcatgcactccaggtcaccatcacagccctcagaaaagaagtggacatgctgaagaacatgcttgacaaggtacacccagaaagaatggacatctttgctgaagacttcaaaatacagaactggaagatggttgcactgcagcgggaagtggcttctctccagaataagtttaaaaccatccccaaaaccgaggacatggtgctctggagtggccttcatgatgccatgttcacctcagaaattggttcatcaccactggacctgtggcagtctgtagagcagctcccagaggctgccctggcccagaccaccaagtaccttgaagctactcgtgccatccaggtctccgagcccgtccaaaacccccagctactgcagactgtctggcattatgaggtcccagagctcctcccggagggctcatctgcccaagcagtttcactcagcagagcccaggagccagcgcagcctccggccctcacgcctgagtctgcacctgggtgcacaactgaatttgcacctgggcctgcacctgggactgaacctgtgccaggactggagctggggctggagctggagcctgtgcctgccctggggcctgtcccagggcccagtgtgacacctgggtccttgccagcaccttggcctgtgcttggacctgtgcctgccccaggtgcccagcctccaccactgggagactggcctgcactcccaagacgctggcctcttccccaaggctggcccagggtgggctcttggcctctgtgggacttaggtgtcctgcggccaactcagccccaaccctccagggccccaccaccagccactgagtttggctcattgtggcctcgaccactccagccatatcagtctcgccagggagaagccctccagctcgcagctgtccaagtaaagggggaggaaaatgatgtccccagcctaaggggccttcgggagagggcccgcaaggatggggcccccaaggatagaactcgcaaggatggggtccccaaagatagaggtggcaaggatgtggaccccaaggatagagctcacaaggatgatgtccccaaagatagaggtggcaaggatgtggaccccaaggatagagctcacaaggatgatgtccccaaagatagaggtggcaaagatggggaccccaaggatagagttggcaaggatggggcccccaaggaagcacagcctaaggctccccagtctgcccttcaccggctgaaaaccaccgctgccatcgccgccgctgccgccgcagcctacgccgctgccacatcctccgctgcccaggcagccaaagttgctgccaagtttgtcaaggatgccccagccaccaaaatggccgccattgcaacagacacggctgcagctgggcccctaggggtctttgcagatgtcctgggtgcagggccttcccggggagccacagaatcccagatcttgggcgatgattccgaaatctacgaaatcctctctccctcctactctgctgccagcatcggtcccgatccagccctgtcccaggccatggtggctaccaagcaggccatgagccctgaagacaagaagagggctgtcaagtattccatgagccacatagcccagatacctgtcaaacacgactctctgaaggaagaatttgcccagctgtcctgtaacctgaaccagcgcttgagttatctagccaatatgggaggtccttccagcctcgggacaacagtggacatattgcagaaaaagattggcagcctccagaaatctaggctcaaggaggaagaacttgagagaatttggggcaaccaaatagagatgatgaaggatcgctacatcactttggacaaggcggtggagaacctgcagattcgcatggatgagttcaagactctccaggctcaaatcaaaagactggaaatgaacaaggtgaataagagcacgatggaggaggagctgagagagaaagctgacaggagtgccctggcaggcaaggcaagccgcgttgacctggagactgtggccttggagctgaacgagatgattcagggcatactcttcaaggtcacgatccatgaggacagctggaagaaggctatggaggagctcagcaaggacgtgaacaccaagttagtccacagtgatctggatcccttgaagaaagaaatggaagaggtctggaaaatcgtccggaagctgctgattgagggcttaagactggatcctgacagtgctgctggctttaggaggaagctgttcaagcgcgtgaagtgcatctcctgtgaccggcctgtggagatgatgactggcccacagctgatcaccatccgcaaagcccacctgctgtcccggctgcggccagccagcgccaacagctgcgagtacttgcagcggcaacagatgagggaacagcagtggctgcagctccaggacctcggtatccaggaggattgtcagcaggactggggtgatggcccccaaaacgccaccagcctcaagtgcaagtcctgcaacctgttgacgctctatccctacggggatccccacgtgatcgactatgacagcgccgaggtggacatcctgggcgtggatgggatcctgtacaaaggccgcgtgaacagccagcgtggggctcagcccttggccgtcgcaaaggagctggcagctgtgaaggctccatctcccccgtcacaaagcctgtatgaccgtgtgcactccagtgccctatttggcgccatctgcccccccctgtgcccccgctccagtgcctgctcagctgcctcgggccctcacctgacgatgccagctcgaccaccttccctgccacctctgctgctgctgccaccgctgattccatccctaagggacccccagcaggccccagggtccaccaggctctcaagagctccacacattgagtcccgagtcggcaggaagccccccgaggagcccgccaacccgtgagccccaccccgctgcgccccccatcgccaagtcccctccacgtccgaggctgaggcccatgtggccctcccactcccaccaagtcccctccacatcggaggctgaggcctatgtggccccccacccccacccccaccaagtcccctccatgtccgaggctgaggctcatgcgcccccccccatccctaccaagtcccctccacgtccgaggctgagacccatatgccccccccacccccaccaagtcccgtccccggctgagacccagggccctgagcctggcccagaaagggtgctggggccctggatagaggggaggggtctgtgtaggggacccccatgctgacccagtggctgttttatcctgtgcatataaatacaaacagcacagtgcaca

SEQ ID NO: 118509 - DNA, 357 bp, Homo sapiens
  Payload ID: 3191
  Gene Symbol: C17orf100
  Gene Name: chromosome 17 open reading frame 100
  ENST ID: ENST00000624159
  CDS Start-End: 1-357
atggcctcagcccgaggggccaagcagtcttcgccccgggtggggaccacccgctacacagagacgtccacggtccgcgtggagacctcgtcccaccgcgtggagacgtcgtcccggcgggtggagacctcccagcgccgcagcgaggggccctccctctccccctcggggaagcggctccctcgcatcctcgaggcgtcctcccggcacgtggaatcctcctcgcagcgcacggaaacgacctcccgccacgtcagagcctcgtccctgagggtggagacgtctctgcactgcgcggagagcccgaccccgcgggccaagccggccgcccgccagaacgaaaaaacggcccgatga

SEQ ID NO: 118510 - DNA, 4604 bp, Homo sapiens
  Payload ID: 3192
  Gene Symbol: C17orf104
  Gene Name: chromosome 17 open reading frame 104
  Uniprot ID: A2RUB1
  ENST ID: ENST00000409122
  CDS Start-End: 143-3001
tggctccaggcagcgcccgggcggcggaggcggctgcggagacggcggggtgcgggctgagggagccgggcctggacgccccccccatcacccccgtaccccaggagctgtgcctagtccaggagaggctggggggcgccccatggaggtgagacgcggagacacctgcccgcgccctcacccctcaggcctgagggaggaaggacttgagcccaaagtcgcgttccccggaggtgcgaatcgctgttggaacctcggcgccgacgccggcagcaggttaaccgacgtcttcggcagcgtgatgttgactggctccgcttccttctacgattgctacacatcgcagagtgaagacaatgtagacctaaggcagacctatactccattttcttcaacagaatattcaagttctgtagattcttcacttttctgtgcaccatggtctacttatggagatgacattaaacaaccttctaattctcagatcagtataaagaacaggattcaaacagaaagaaatgactatggcagtgaaacagacttatatggacttgtgtctaacattttggaagaacaagataagtcacagccatattttgctgaagggacctgctcctccaatttaaagtcagtttggccaatgaacacaagcagatttgcagatcaccatgacctcttaacagaaaccaaaaggccaatagatacagtcatctctcagcaagctttttatagtgatgaatctgtgtcagcaatggaaaagcaatacctgcgtaacagtaatctcacaccacaacaaaaaatagatgaacttcatcatggatttactggtttagatcttgaagaacaatggatgtacccctcacgaagtgatcattctaactgtcacaatattcagacaaatgatacagctaagacaacattccaagaatatccacttatcaaaaactgttttacaccccaaactggtctgtctgatatcatgaaagaatcaggagttgatatctaccattatggaagagacagaatatgtactaaaggtcttgaagcaccactacagcaaaaaagggcagagatgtttctttctcaatttaatagatacaatgaaaatgtagattattgtagatacccagagtatgttcatcctaataaggctaagcttaataaatgttcaaattttagtgtccaagatagcaaaaaattagccaatggcacacctgaaacaccaactgtagaagcagacacctacacaaagttatttcaggttaagccagcgaatcagaaaaaaatggaggagacaatccctgatcagcagaatttcacatttccaaaaactacgccacatctgacagagaaacagtttgcaaaggaagcagtattcactgctgattttggcttaacatcagaatatggactaaaacctcacacagcttgtcccgctaatgattttgctaacgtcacagaaaagcaacagtttgctaaacctgatcccccacattctgagtattttaaatcagtgaatttattatcaaactcagcaacatcttcaggaggtatcaatttaaacagaccaacttggatgaatgttcaaacaaaaaataacactcctattccttatcgaaatcaaggtaacttgatgaaattaaatagtcatttaagtgcagcttcaaaaggttctaaccattcttcagatttcccccaactatcatccacaaacttaaccccaaatagcaatttatttcagaaatattgccaagaaaacccttcagcattttctagttttgattttagttacagtggtgcagaaagaatccaatctgtcaatcacatagaaggactaacaaagcctggagaagaaaatctcttcaaattggttacggataaaaaaataaagcagccaaatggattttgtgataactattcagctcagaagtatgggataattgaaaatgtaaacaaacataattttcaagccaagccccagagtggacattatgatcctgaggaaggtccaaagcatttagatggcttatcacaaaatacataccaagatctactggagtcacagggtcattctaatagccacagaacgagaggtggagacaatagccgtgtgaatcgcacacaagtgtcatgcttttctaataattatatgatgggagatttaaggcataatcagtgttttcaacaacttggttcaaatgggtttcccctaagatccacccacccatttggccattcagttgttccactgttggattcctatgacttactttcttatgatgacttaagccatttgtacccttattttaatatgatgtatggtgataattctttttctggtctcatgccaacttttggatttcaaagaccaattaaaacccgtagtggaccagccagtgaacttcatattcgtctagaagagtgctgtgaacaatggagagcattagaaaaagagagaaaaaagactgaattagcccttgccaagaattatcctggaaaaaaagtatccagtactaacaacactccagttccaaggctgacttccaacccatctagagttgatcgcttaattgtggatgaacttcgagaactagccagagttgtgactttactaggcaaaatggaacgtcttcggagttctcttcttcatgccagtatctctactgctcttgatagacacttggagtctattcacattgtacagtcacgtagaaaggatgaaattgttaatgcttccaatcggcaaaggcaaggagttcctagatgccaagatgacagagatgtttttgcccttgcttctgcaattaaagagatgtgtgtggctactcggaaaacacgcactgccctgtggtgtgcactgcagatgaccttgccaaaaacagccagtacagctgatgtggtaaagcctttacaagatacagtaaactgtgaagataaagtccatgaaagcataaatagtagcaatccaatgaaccagagaggtgaaacaaacaaacattaaggaaatgccagcagaaagaagaataaaaagctgataaatataccaagacatgctaaaaatgttttaatgaacttgtcaaactttcagtatgttttctttcagatttaaagttaataccagtaccttaatgaagtctaacttctatttaaaaatcttctatttgaagtgaatccgatatagttttaagtaaacgcaaaggtacagttgactactcagagttctgagtagtcagataacaagtttaagtaaattaaatatttcctaacagctaaaatgtgcttaaactcattctgccatgcaggtaaatgcaaatgtgaaattcttctaggagataaatttcatttaggtttgtcttagttaagtataattccaaataatgaatctaagtgactgtaacccaattacggctacagcctagtaaccaagacaagttttgattgtgatatcaaagtgttttccttacaaaactggataatacctgggaaacaaaggaaaatacggataaacccaatattcatgtacaaacttaatatttaaaatactatactaccatatttataaatttggaatcttaatgcctaggtatatggagggaaatgcatctgattctcctaaattaatgataaaagtgtcagtgtaaaaaccatgcaagttactgaatataaaacctattcagatcatttgtgtatattctttaaattttaattatattatcaattgttaaatgtttccaattttaaagttatttaaattgaatcacaaaacattccctttatctggatcttttagacttgatgcacagtaactgaaataatgactactgttttaatacccttagtttgctgccttttatgagggtgtcacgaagttctaaaatgtatttttttaaaggttaatctctaactagtttagcttgcaattggttagtgtatattttgtgtagttgtgttcattagtttgcttctaagttctaaaatgtattttttaaaggttaatctctaactagtttagcttgcaattggttagcctatattttgcgtagttgtgttcattagtttgcttctgtatttttttaaaactattgaaagcttaactttttctgtttctcatcacttagtatctttgtatagaacttgagtaatttattcgttaatatgaaatgttggtattatgtgactcagaagatcttgggttttaacatttctagcatgagttaaactataatgtactgatgaaatttaattgaaatatccttgactagaaacactgatgttttaaatgttagtgtttttcttagttttagaaattctggtattaaaaaaaaaaagagtgtaatcataccacataaattttctttagatgatgtgcagaagaaactgattgagaatgcaagagtaactgtagggagaaacattttgatcactgatatgccttagaactacccaaatgaattacattgagggtagtcaaataaaatagatcatctcaccacagtcactgcatagaaagtggttaagtttaacataagacatgttggatgttataaaaacaaatactgtactgaatttagtctcaggaaaaaaataaattactttgttgaaaa

SEQ ID NO: 118511 - DNA, 4067 bp, Homo sapiens
  Payload ID: 3192
  Gene Symbol: C17orf104
  Gene Name: chromosome 17 open reading frame 104
  Uniprot ID: A2RUB1
  ENST ID: ENST00000409464
  CDS Start-End: 406-2385
gtgttgtggagaaataagaggtaagcatgcactgtaagttagatataggatttgaaatgaaggagaaatatttatgtggaaaagacatttccacataaaaatatttatgtagaaaagaaaatattcttgagttctagtctcttctttatttgaaatgatggtgtagattcagtccacatattttatagataaagatggtaaggtaggataagtctggaaagagtaatcaatatattgtatttcagcacgaattcatttatttttaggattcaaacagaaagaaatgactatggcagtgaaacagacttatatggacttgtgtctaacattttggaagaacaagataagtcacagccatattttgctgaagggacctgctcctccaatttaaagtcagtttggccaatgaacacaagcagatttgcagatcaccatgacctcttaacagaaaccaaaaggccaatagatacagtcatctctcagcaagctttttatagtgatgaatctgtgtcagcaatggaaaagcaatacctgcgtaacagtaatctcacaccacaacaaaaaatagatgaacttcatcatggatttactggtttagatcttgaagaacaatggatgtacccctcacgaagtgatcattctaactgtcacaatattcagacaaatgatacagctaagacaacattccaagaatatccacttatcaaaaactgttttacaccccaaactggtctgtctgatatcatgaaagaatcaggagttgatatctaccattatggaagagacagaatatgtactaaaggtcttgaagcaccactacagcaaaaaagggcagagatgtttctttctcaatttaatagatacaatgaaaatgtagattattgtagatacccagagtatgttcatcctaataaggctaagcttaataaatgttcaaattttagtgtccaagatagcaaaaaattagccaatggcacacctgaaacaccaactgtagaagcagacacctacacaaagttatttcaggttaagccagcgaatcagaaaaaaatggaggagacaatccctgatcagcagaatttcacatttccaaaaactacgccacatctgacagagaaacagtttgcaaaggaagcagtattcactgctgattttggcttaacatcagaatatggactaaaacctcacacagcttgtcccgctaatgattttgctaacgtcacagaaaagcaacagtttgctaaacctgatcccccacattctgagtattttaaatcagtgaatttattatcaaactcagcaacatcttcaggaggtatcaatttaaacagaccaacttggatgaatgttcaaacaaaaaataacactcctattccttatcgaaatcaaggtaacttgatgaaattaaatagtcatttaagtgcagcttcaaaaggttctaaccattcttcagatttcccccaactatcatccacaaacttaaccccaaatagcaatttatttcagaaatattgccaagaaaacccttcagcattttctagttttgattttagttacagtggtgcagaaagaatccaatctgtcaatcacatagaaggactaacaaagcctggagaagaaaatctcttcaaattggttacggataaaaaaataaagcagccaaatggattttgtgataactattcagctcagaagtatgggataattgaaaatgtaaacaaacataattttcaagccaagccccagagtggacattatgatcctgaggaaggtccaaagcatttagatggcttatcacaaaatacataccaagatctactggagtcacagggtcattctaatagccacagaacgagaggtggagacaatagccgtgtgaatcgcacacaagtgtcatgcttttctaataattatatgatgggagatttaaggcataatcagtgttttcaacaacttggttcaaatgggtttcccctaagatccacccacccatttggccattcagttgttccactgttggattcctatgacttactttcttatgatgacttaagccatttgtacccttattttaatatgatgtatggtgataattctttttctggtctcatgccaacttttggatttcaaagaccaattaaaacccgtagtggaccagccagtgaacttcatattcgtctagaagagtgctgtgaacaatggagagcattagaaaaagagagaaaaaagactgaattagcccttgccaagaattatcctggaaaaaaagtatccagtactaacaacactccagttccaaggctgacttccaacccatctagagttgatcgcttaattgtggatgaacttcgagaactagccagagtaagctgtaaaaatagataacagtggatggattttttgttaaattttttttaagtttcaggccaggcgtggtggctcactcctgtaatcccaccactttgggaggccgaggcgggcagatcacctgaagtcaggagttcgagaccagcctggccattatggtgaaaccccgtctctactaaaaatacaaaaattagctgggggtggtggcatgcgcctgtagtcccagctacttgggaggctgaggcaggagaatcatttaaacccaggaggcagaggttgcagtgagtgaagatcacgccactgcactccagcctgagtgacagagcgagactctatctcaataaataaataaataaaactctcatcaagttttagagctttgaagggtttttaaatcacatttacatctaactctctgaaatatatttttttcatgtttggtcctagaactataatatttaggaaaggggctgggtgcagtggctcacacctgtaataccagcactttgggaagtggaggtgggagaatcacttgagcccaggagtttgagaccatcctgggcaacatagggagatcctgtctctactaaaaattaaaaattagctggacatggtgtcacatgcttatgctactcaggaggctgaggtgggaagatagcttgagcctgggatgtcagggctacagtgagccataaccacaccattgcattccaacctggggaacagagcaagatcttgtctcaaaaaaaaaaaaaaaagaaaaaaaaagaaaaaggaacgggaaaatagtcccactcaatcattttaaaagtaattttcgtaatttaaatggttcctcttgaagctcaaattggcagtggagctaatcctcaactgaaagaattttttaaaaagcaaaaatcattttgagtattatttatggagaaagtctcatttctttgtcacatttgttttccagcttgatgagcaagctgtgcttacataagatggtaacttaatagggaattactatctttccttttttttttttttttttttgaggcgggtctcactttgtcacccaggctagagtgcagtggcatgatctatgctcactgtagccttgaccttctgggttcaagagatcctcctgcctaagcccccaaatagctgggactacagatgcacgctaccacacatatctaatttttgtattttttatagagacagggtttcgccatgttgcacaggttggtctcaaactcctgagctcaagcaatccacctgcctcagcctaccaaagtgctgggtgtgagccaccaccagtcaacaaaatacttttgttttggcgaagtaggatatgacttcaagtcaaatgttgtaaagaatcctcgttaagtcattttgtaatttaatgattattcctattctttataatttcagaattttctaagcaacttagggtaggtaaacttttccttttttgaccttcctctcttaaaaacttagttttccaaataaaatttgataaagattcttcctgggaaaaaaaaatgcagcaaaacggattacctcttttattgaataaaaccattttaggaattagaaaaatcaacatgggtcaaatttgtaaatctgtacaatggaatttatccatggtacattcagagcctaacatatgaggtacagccagatgttaataaaaacttcaatcttttatt

SEQ ID NO: 118512 - DNA, 553 bp, Homo sapiens
  Payload ID: 3192
  Gene Symbol: C17orf104
  Gene Name: chromosome 17 open reading frame 104
  ENST ID: ENST00000456912
  CDS Start-End: 166-553
aaccatgtgttgtggagaaataagaggattcaaacagaaagaaatgactatggcagtgaaacagacttatatggacttgtgtctaacattttggaagaacaagataagtcacagccatattttgctgaagggacctgctcctccaatttaaagtcagtttggccaatgaacacaagcagatttgcagatcaccatgacctcttaacagaaaccaaaaggccaatagatacagtcatctctcagcaagctttttatagtgatgaatctgtgtcagcaatggaaaagcaatacctgcgtaacagtaatctcacaccacaacaaaaaatagatgaacttcatcatggatttactggtttagatcttgaagaacaatggatgtacccctcacgaagtgatcattctaactgtcacaatattcagacaaatgatacagctaagacaacattccaagaatatccacttatcaaaaactgttttacaccccaaactggtctgtctgatatcatgaaagaatcaggagttgatatctaccattatggaagagacagaatat

SEQ ID NO: 118513 - DNA, 558 bp, Homo sapiens
  Payload ID: 3192
  Gene Symbol: C17orf104
  Gene Name: chromosome 17 open reading frame 104
  ENST ID: ENST00000432494
  CDS Start-End: 69-558
aaaatgaaaaccatgtgttgtggagaaataagaggacctgctcctccaatttaaagtcagtttggccaatgaacacaagcagatttgcagatcaccatgacctcttaacagaaaccaaaaggccaatagatacagtcatctctcagcaagctttttatagtgatgaatctgtgtcagcaatggaaaagcaatacctgcgtaacagtaatctcacaccacaacaaaaaatagatgaacttcatcatggatttactggtttagatcttgaagaacaatggatgtacccctcacgaagtgatcattctaactgtcacaatattcagacaaatgatacagctaagacaacattccaagaatatccacttatcaaaaactgttttacaccccaaactggtctgtctgatatcatgaaagaatcaggagttgatatctaccattatggaagagacagaatatgtactaaaggtcttgaagcaccactacagcaaaaaagggcagagatgtttctttctcaatttaatagatacaatgaaaatgtagattattgtagatacccag

SEQ ID NO: 118514 - DNA, 425 bp, Homo sapiens
  Payload ID: 3192
  Gene Symbol: C17orf104
  Gene Name: chromosome 17 open reading frame 104
  ENST ID: ENST00000425535
  CDS Start-End: 211-425
aggcaggccaggtaacggcctctgcccccgcccctccctccccgctcggacttcccttacccgcacactggctccaggcagcgcccgggcggcggaggcggctgcggagacggcggggtgcgggctgagggagccgggcctggacgccccccccatcacccccgtaccccaggagctgtgcctagtccaggagaggctggggggcgccccatggagcccaaagtcgcgttccccggaggtgcgaatcgctgttggaacctcggcgccgacgccggcagcaggttaaccgacgtcttcggcagcgtgatgttgactggctccgcttccttctacgattgctacacatcgcagagtgaagacaatgtagacctaaggcagacctatactccattttcttcaacagaatattcaagttctgtagattc

SEQ ID NO: 118515 - DNA, 2272 bp, Homo sapiens
  Payload ID: 3192
  Gene Symbol: C17orf104
  Gene Name: chromosome 17 open reading frame 104
  ENST ID: ENST00000472403
  CDS Start-End: 1-453
gagagaaaaaagactgaattagcccttgccaagaattatcctggaaaaaaagtatccagtactaacaacactccagttccaaggctgacttccaacccatctagagttgatcgcttaattgtggatgaacttcgagaactagccagagttgtgactttactaggcaaaatggaacgtcttcggagttctcttcttcatgccagtatctctactgctcttgatagacacttggagtctattcacattgtacagtcacgtagaaaggatgaaattgttaatgcttccaatcggcaaaggcaaggagttcctagatgccaagatgacagagatgtttttgcccttgcttctgcaattaaagagatgtgtgtggctactcggaaaacacgcactgccctgtggtgtgcactgcagatgaccttgccaaaaacagccagtacagctgatgtgcattagtttgagagtatacttaactgtgacatacatagcagagtcccagaagaaagaactgactactaacaaattgaaacaagtacccttcaggggaccgtggatataacctgactccttcagtgacaaaaatcaagcttgtcctgttccttcttcctttgggattcatcccgaagtgagtctcgctccagttttcgggcattaaggacatcttccacattggtgtttcggaacagaactacagaaacagctccaaataatgatggactgatcaagaagctggtaccaagaagtctcaaagttatttcaacagcttcatggagtgtttagaaacttcccagcttgaacttccaagcttcctcacaggctgtgttaaagttttcccatttataagccaatcttgccagaagaggctctggaactcaaatgggttactgccagaagaatctgggacagctgcactagtgttatatttcaaccatgtacccaatctatgaactgcttccaccaaatggtcactctgtcacccaagctggagtgcagtggcacaatcacggctcactgcagccacagcctcctaggctcaagtgatcctcccacttcagacttctgagtagctgggactacagctctgatctctctcataccctccttcccaccaccaatgattactgtaaatactgtaatggatcaagcacgacgtttgcttcagttctgcgtgggcatgaaaagacttctaccaccagcttaccttttatggactcctacatccatataagaatcaaaagggcacttcctgcaggcttctgtcatgggacagccctgggaactgccttgtaataggcacagacctcccaagagcattttaatacccccagtgaacactgtaaacggatggaaatggaattggtcgtcagatatttatgataacattcccattctgacatttcaatgccttcggaagaaccctcctcggctcactcacaagcatcggagagggccttgtccccaagaatacgagaaagcccttcctctctgtgtacctgcagctttcaggcttcccacacctggttggggagcaacctccttcccccgccgcccagatatcagaggagtatacctctcccaggatacccaagatgtaggctccataaacggctcggtccactcccagtgcctccaaccgtccgtccagccaggagccaaagccgccgcctccgccatcgccttcgccaggggctatcgcggccacttcgctgggcgccgccatcttggggtcagggtcctgcaagcccctagggcgcctaccgcagtgcctgacgggccgcgccgcaggtccaccgcgcatgcctgaagaggaagcccaggcccgtaagtgcaaagagcgcagccgtgtcggccggcttgagagttttgtgctttctagatgaagcgcgtcttcgcatacgtgcggtcgcgtgatctcacaagatgcttggcatgtgagtattcttaacagactcattctacagttcgggaagttgagagaggtgcagtaatttggccaaagtcacgcggctaataactacccaggactggagctcagcgtggatgccatcgcttcctccacccgaccgagctgccttccccgcgctttcgggggatgctggccgcccactcccacacagctgtctggcaagaacctcctgacagcctggaataccctcgtcgtcgctaccgacggctaccaccttcacctgtacaagcccttccctgtcaaagtaaaggttgcagaaaaccttccctgattccatggtaggcactcagtaaataaacaggcaacctc

SEQ ID NO: 118516 - DNA, 3753 bp, Homo sapiens
  Payload ID: 3193
  Gene Symbol: C17orf105
  Gene Name: chromosome 17 open reading frame 105
  Uniprot ID: B2RV13
  ENST ID: ENST00000449302
  CDS Start-End: 29-523
atttctgaagtgagactaggaagagaagatgaacaattccctggattatctggcctaccctgttatcgtctctaatcacaggcaaagcacaaccttcagaaagaaactggactttggccactacgtatctcacaagaatagaatacaaatagcgaagcctactgttgataccaaacctccagtggcgcacacaaatcacattttaaaattgagcaaactacagggtgaacaaaagaaaatcaacaaaatcgagtatgaaaacaagcaactgtgtcagaaaatcgcaaatgcccatcgcggccctgccaaggtggattgctggaatgaatatttttccaagagcttaaacagagaaacaaggaaccgcgagctagtgagaatcaccatggaaaaccagggcattctgaagaggcttgttgatcgcaaaccccactatgaccgcagggcatctgagatagactggcagaattcaaggcgctatatcagaaataccacgagatatcttctctcccaaaatgaataggttactcaccatggaaaagatacaagagaaggccctaggatttcttggctgctcaggatctcaagacactcccgactggctgaatgctccatcttcagatgcttcaataaagcttggaacataaaatgcgtaagttacatttaggggacccaaaggctttatgttctcattccaaaatggggcaggcagaaggaaagatgcaatgagcatttttatttggggctatgaaaagaagttttaacgagagagagagagagaaatctgagagaactctttaaaacatacaccatcatcaccatcccgtggaagaagaaaagctggggtgagatcatccagccacaagtacagcactgtcaaaatggaaaacgaaatcacatgacaacatcaaggttcagaaaacacaaggaacaaatgccattagttcctctgtgaatacacacgatcggaaaagaatgcctcattgaagtttccatggactctgttcatttatagggagcagcagcagtgaaaatgtctcaaaacatacggtgagacaatgttgcaggcctgctatgattggtcatgctagttttcagcccaactatattagtcagcatttgccaaagagacagactcaataggagagagagagagagagagagagtgagagagatagatagagagtgagagagagagagaaagagagagagagaggagaggatttatttggggaattggctcacaagatcatggaagctaaagaagtcccaccacaggccatctgcaagctggagaccctggtggagcagggcagacaacccccaaagtggggcttagcctgcgagtgttcttggcttcacccaggaaagaatttaagggtgagccagtggtagggtagaagaagacagttttattgaagcagcagtgttacagctccatgactgctcctgcagtacagggctaccccaaaggcagagagttttgcagtcatagttatacgtacttttaattacatgtagattaaggggcggtttgtgcagaaattctagggaaggagtagtaatttttttttttttttttgagatgaaatctcactctgtcgcccaggctggagtgcagatggcgcgatctcagctcactgcaacctccgcctcctgggttcaagcgattctcctgcctcagcctcccaagtagctgagactacaggcactcgccaccacgcccagctaatttttgtatttttagtagagacgaggtttcaccatcttggccaggctggtcttgaactcctgacctcgtgatccgcccgcctcggcctctcaaagtgctgggattacaggcgtgagccaccatgtccggcctataggaaagggtagtaatttttgggtccttgggtcattgccctggaaaggggtggtaactcctaggtgttgctacggtaatggtaaactgacatggcacactagtgggagtgtcttatggaaagctgcttccacccctttcctgttttagctagtcctcaattggatcctgtgtccaagccccgcctctggagtcaaggcctgcctcccacctcactgggatgctggtagcatggcttggtccaagcccaaaaacctcagaaccaagaagaaggtggtgtaactctcagttcgaggccaaaggctgagaacccactaggggggacaagggtgctggtgtgagtcttggagtacaaaggccaaggagcctagagttgttgtcccaggacaggagaggaagagtgtattccagttccagcagatagattgacatattcgcctcttgtctgtttttgttctttctgaatccacagcaagttggatgatgcctctccacattgagagtggatcttcccacatagttcactcagacttacatgctaatctcccctggaaacactcacagacacacccaaaaataatgctttaccaggtttctattcagtcaagttggcaccttaaattaaccatcgcactgactttttaaactttctattttgaaataatgaaaattcacaggtagttgcacataaaggaacagggaggcctcctgcaccctttacccagtctccaccaatgttagcatcttgcgtaactggagtacaatatcaaaaccaggaaactgacattggcatgatgcatggaacctatgcaggtttcatcagttatacatgcactcatttttgtacatatatgtatagctctatgcggtttttgccacatgtatagctttgtgtaaccacattcgagatacttaaaaccactattatcaaaagacactcttattgccacccttttagccacagtcacctcagaccctcaagcctaactcttggcaatcacaatctgttttccacctctctgttagttcatggtattacgtaaatggcgtcatgcaatgtatgttcatccttttgagattggcttttttcactcaggataatttccttgatgttcatccaagttgtgtgtgcctttttattgctgagtagtattccatggtatggacatgctacaatatatttaaccatacatccatcaaaggacattggggtagtttctagtttttcaaacattattattattattattattattattttgagatggagtctcattctgttgcccaggctggagtgcagtggcacgatcttggctcactgcaacctccacctctggggttcaagcgattctcctgcctcagcctcctgagtagctgggattacaagcatgcatcaccaggcccggctaatttttatatttttagtagagacagggtttcaccatgttgacccggctggtctcaaattcctgacctcaggtgatccacctgcctcggcctcccaaagtgctgggattacagacatgagccaccacacctggcctgattttttaaatagcaaattttgaaagttatttacatattataggaataagtcctttgcctgctatgcgccttgcatgtatttttctcccagtctataatttgtcttttcatcctcagggtctttgacagagtaaaatatttttatttggatgacatccaatatatcaatgatgaaactgttctatatcttgactctatcaatgtcaatatccttgttgtgatactgtaccatatagttttgcactatgctaccactgggggaatctggtaaggagtttacaggatctctctgtattatttcctacatgcatgtgaatatacaattatctcaaaataaaaagctt

SEQ ID NO: 118517 - DNA, 520 bp, Homo sapiens
  Payload ID: 3193
  Gene Symbol: C17orf105
  Gene Name: chromosome 17 open reading frame 105
  ENST ID: ENST00000590148
  CDS Start-End: 1-175
cagagaaacaaggaaccgcgagctagtgagaatcaccatggaaaaccagggcattctgaagaggcttgttgatcgcaaaccccactatgaccgcagggcatctgagatagactggcagaattcaaggcgctatatcagaaataccacgagatatcttctctcccaaaatgaataggttactcaccatggaaaagatacaagagaaggccctaggatttcttggctgctcaggatctcaagacactcccgactggctgaatgctccatcttcagatgcttcaataaagcttggaacataaaatgcttttaacgagagagagagagagaaatctgagagaactctttaaaacatacaccatcatcaccatcccgtggaagaagaaaagctggggtgagatcatccagccacaagtacagcactgtcaaaatggaaaacgaaatcacatgacaacatcaaggttcagaaaacacaaggaacaaatgccattagttcctctgtgaatacacacgatcggaaaag

SEQ ID NO: 118518 - DNA, 3199 bp, Homo sapiens
  Payload ID: 3194
  Gene Symbol: C17orf107
  Gene Name: chromosome 17 open reading frame 107
  Uniprot ID: Q6ZR85
  ENST ID: ENST00000381365
  CDS Start-End: 228-800
aattcatgacaatgagcgtggcgaccaccatgacgaaaataaggaacctgaggagcccggaaggcatgacatcaccgttcctcctcccagctaccgaaggcgccgcgcgctgacctcacaaacacggcttctcctggtacgggctggttacgccctccagctgcgccccctacacgacgacagacgcgtcccccagcccttctcctgtcctaccacttgtggcggccatgaaggggacccccagctccctggacaccctgatgtggatctaccacttccacagctccaccgaggtggccctccagcccccgcttctgtcttccctggaactctccgtggccgcagcccatgaatatctggagcagaggttcagagagctgaagtccctggagccacccgaaccgaagatgcaggggatgctgcctgccccgaagcccaccctggggctggtgttgagagaagccacagccagcctcgtgagcttcggcaccaccttgttagagatctcagccctgtggctgcagcaggaggcgcggcgactagacggcagcgcgggcccagccccagacggcagggatccgggtgcagcgctgagccgggtagcccaagccgcagggcagggggttcggcaagctggggctgcggtgggcgccagcgcccggctcctagtccagggagcatggctatgcctgtgtggacggggtctgcaggggtctgcctcattcctgcgacagtcgcaacagcagctaggcctcggaatccccggagaaccggtgagctcaggacacggggtgagttaggggccagaggcggcggggctagggaggcactgagccggactgtcccccaagagagctactcgggagacctccaggtgacgtccagcagcagtgaggaggacggcggaccagggactccatccccgtaccagccccacccagcgtccgaataaagcccagggcggggcgagacagccagagcttttcccggggtctctgggttttggccacgcccccacccttcacactggccacacccccgcgggggctccggcttcacctgcccaggagcggcacgctcagagaagtctctgggattttctgggcaatgaggaacaagaagacggtctgggcgagcaggacgttgatggagaccgtgcatttctggccgccggctggagggagagccagtgagagcgggccccgcctcccgggagcgagcccgggtttgggggtaggttcggggccactgcttaccctgcgccggcaggaagtaggcgagcagcaccaggcccgagatgagcacacagggcacgatgatgttaatgacgtagaagagcggcttccggcggatgatgagcgagtagatgacgtcagtctcccctgggccgtcggtggcgccaccgtggtggcggcggatcacccccgggcagaagtcgatggcccactcgccgttctctgcgggacgggggcacggtcagctggctgtcagagcggggcgcccgccgagctgacagcgggctgaagaggaggctgcggctgtctgcaccagggtcatgggccgtcaggatgggggcaattacggacagaaaagggcattctcgttgagggtatggaaagccagaaggcaggactagagtaacaatcgagaatgatttcaggacaggggtaagctaaacccagttgtggaagtcatcctccagtgtcgttggtccggggcaagcccaccgtggaagtcccctctctggaccccgtctagaagcgggtttttctgagcaggcaggggcttcaccagtataggcctctgtgtcgatgtcgatcttgttgatggtcttgccgtcgttgtctacggcaaaagtgaactccacctcttcggcattgtacgtctgagagctgcggagccagggccgggagcccaccccagaagctctgacctgggccccggcctcaggcccagccctggaagctgggatctagcggggccgcgatcccaagcccaccccttcacccaagcccagcccgcacgcctctgttcccatctgtacctccggccgcgctggagcgtcccacccagtgcctacgcctggctccgcctccagcgcgaagccccgccccgagggcggtgcttcccggttggccccgccccataaggcccccccccaacaataatcgtccgggcctcggagtagctcttcccaccggaaaataagcgaacagttctgccaatcgaaggggaagtaggtgacctccactgcgcagacgctgcggtagatggccggaggcagccacgtcacggagccgccctcgtagacgagcacgttggcgtcgtaggccactccgaactggccatcaatactgtgggctcggggaaaccgagctttttgcacaggtctgcaccctctcagagtacccccttccccaaccaagtccagcccgcaccccaggccggcttccctccagcctggcgtctggcccggttctcacttgttttccagcacaatctctggcagccacacgagttctgaagggactcgcagggtttctatacccccaaagtcgtccttgctgtagttgagtcggtaatcctgccaatcctaaggggtgggggatggaaggccgcgtgccctgcatctcccacctggcgctgcctgggaggggtttgggggaaaaggggtgccctggacaagacctcacaccattccccagatttgactcacgattccaatccagacgctagtggtgagagtctcctctttttcattctgcagatgggagatggggatgattgaagtgagatttcagggccagaagtgagctttaggacagagctcagcggttggggccagaagtgggatttttggcttaagatgagggtgggggtagcttaccagtgagatgagattcgtcagggtgaccttgaggctgatggtgacagtatcctcaggctcccgcactggccggcttcctgggtcatagttgttgaagagatggtgataaagacgcagttcctcgttcttccccacacccctgcctgcgatggggtcaagaaggaagggtcattggcaatgaagaggctggagcacctctctcccctctgcctcccctgggtcctcacaggcctctgaggctgtgtactatcagtatctgtctcctaaaccaattatgctgtgcctgggaacgaaatactgtgtctaagtctc

SEQ ID NO: 118519 - DNA, 1275 bp, Homo sapiens
  Payload ID: 3194
  Gene Symbol: C17orf107
  Gene Name: chromosome 17 open reading frame 107
  ENST ID: ENST00000521575
  CDS Start-End: 346-642
agtacgaagccccaccccgacccgggctgcaccgccccctccgcgcttacgtggcgcagccgcggggacatggcgtgggtggtgggcgtccgctgggacacgttgagcacgatgacgcaattcatgacaatgagcgtggcgaccaccatgacgaaaataaggaacctgaggagcccggaaggcatgacatcaccgttcctcctcccagctaccgaaggcgccgcgcgctgacctcacaaacacggcttctcctggtacgggctggttacgccctccagctgcgccccctacacgacgacagacgcgtcccccagcccttctcctgtcctaccacttgtggcggccatgaaggggacccccagctccctggacaccctgatgtggatctaccacttccacagctccaccgaggtggccctccagcccccgcttctgtcttccctggaactctccgtggccgcagcccatgaatatctggagcagaggttcagagagctgaagtccctggagccacccgaaccgaagatgcaggggatgctgcctgccccgaagcccaccctggggctggtgttgagagaagccacagccagcctcgtgagcttcggcaccaccttgttagaggtggggtactggggggcttaggatacgcggcgatcgggtagcgggaacaaggacctctgcctccccgctaacccctgtgcccccaatgcagatctcagccctgtggctgcagcaggaggcgcggcgactagacggcagcgcgggcccagccccagacggcagggatccgggtgcagcgctgagccgggtagcccaagccgcagggcagggggttcggcaagctggggctgcggtgggcgccagcgcccggctcctagtccagggagcatggctatgcctgtgtggacggggtctgcaggggtctgcctcattcctgcgacagtcgcaacagcagctaggcctcggaatccccggagaaccggtgagctcaggacacggggtgagttaggggccagaggcggcggggctagggaggcactgagccggactgtcccccaagagagctactcgggagacctccaggtgacgtccagcagcagtgaggaggacggcggaccagggactccatccccgtaccagccccacccagcgtccgaataaagcccagggcggggcgagacagccagagcttttcccggggtctctgggttttggccacgcccccacccttcacactggccacacccccgcgggggctccggcttcacctgccca

SEQ ID NO: 118520 - DNA, 2123 bp, Homo sapiens
  Payload ID: 3195
  Gene Symbol: C17orf47
  Gene Name: chromosome 17 open reading frame 47
  Uniprot ID: Q8NEP4
  ENST ID: ENST00000321691
  CDS Start-End: 183-1895
atcaccagacagagaggtagctaaggggattatttgagacactcttagaacaacagccacttttgtgggagcccaagaaacagcagctttaaaacagggtaaatattcaggcatcattaggatcctgaatacaagccagccagtaaaatacgggatctactcagaagggcacaatctatcagatggtcaagacaaataaacctggggccaaggtagcggtttcagcacagagagggtctgaggttactactaacacatcccctcagcagggacatgggtacgttcttgcctcaagccatcgaagtgctgcagtctccctgaacccttcccaccgaagatcagaagctgcacatcccaccactccccattcagcatcagactaccctcgatctgtctccctccagtcaggacctggacactatgcagtacccactcctcggggacccgagactggaccaagaacagaatcatcccgccattcctctccccatctaaagagccagaagactcagacactggcttcccatgcttcaagcagacaatggaaagttagtccacccagagaggaagcagcacgaagaggcagtgagagcaagtcagggcgcgaggtcggccatcatgcttcatcaatcccagatgccaaatctactcatcagttgagttttcaagaccagaagaataacttacaatcacaaatcttagaagatgacccaccatccaaggtccagaacccccaaggagtcagagttccccgtaggattttgtcttacccaaaggatgaagcagtacaaactgagcccatccaaagaattacgactactagtgagatcagatctccaaggagtccctctctcctagagcacggaagcagctgtgtctctgcagactatcagacagcccagagaagggtccctgtagaagaatcagaaacaggtccttacggtccaattccttcaaaacccaaggccttgtataggaatatgaacttggactcattgctcaaactctctgtccttaaagattctgatggtgtacaccgagtttctgcacgggtagaccctgagtctcttcataagtattctgcctatcctgaaaccaagccctccgcaaaggtcttagtatcatcacaggtggagtccaacgtgaggaccccaatccgaggaaacagcgaggttggccgcagggtcaccatctccccaggggtacagtcagtagagccaactcaccatgtgacagttccatcagtgtctgagggctcccacaagtcatccatgtttgttactccagagcccatctataaacagcaaacccaaaaacccccagaaattacttacatgtcccaaggacctacacccaggtatccagaactctcgcaaaagccctccatccatgcagaactggaactgacccctaggcccttgcctcctcggtccttacctaggtacggacctgactcctcatggtggcccttgctgaatcctgaagttgaaacaccccaaagccagctgacaacaccggattttgagcctaagtgctctccttccctagatcttttattgtccggttttaaaatagactctagccctttctgtgaggatctgaagttccagagagagaaggcaagcctatcaccaccatcaccaccaaaggagtttccaagttgggcaccactgagtgaagtgccacagacccccaagcacacctgcaaacaacccattcaaaggtttactgctttcttcctggatgtctctgaggaaatgtacaatcgtgtcatctggtggctaaaaggtctgtgcttttccctcctatgggcccactgtgggagcttgggggatgggaggacaggtgaggagtggcatctatgtatctacagagctgggtcgtttaggagataaatgctgggattttgacctgaagaagcagaggaacttctcatcttgctgaaaatttcaccattagagtcatttctttggggcttggaaccttttccattttcaagagtctccttttaacaggaagttacttctggaatggagaataatttaagcctcatggccttttcagcttagttggtcatctatcacatgattttaaaaaatacaccaaagcaaaccgcctgcttc

SEQ ID NO: 118521 - DNA, 850 bp, Homo sapiens
  Payload ID: 3196
  Gene Symbol: C17orf49
  Gene Name: chromosome 17 open reading frame 49
  Uniprot ID: Q8IXM2
  ENST ID: ENST00000439424
  CDS Start-End: 77-595
agtctccctgctctccgtggtcccggctcgcgtgtagcggcggcggcggcgtctccgtgaggaggcgcgcggggccatgacgtcagcgtccacaaaggtcggagagatcttctcggcggccggcgccgccttcacgaagctcggggagctgacgatgcagctgcatcccgtggccgactcttctcctgcgggtgcgaagtggacggagacggaaatagagatgctgagggctgctgtgaagcgatttggggacgatcttaatcacatcagctgtgtcatcaaggaacggacagtggcccagataaaggccactgtgaaacgcaaggtatatgaagattctggcatcccccttccagctgagtcacccaagaaagggcccaagaaggtggcatctggtgtcttgtcacctcctccagctgcccctcctcccagcagctccagtgtccctgaggccgggggtccccccataaagaaacagaaggctgatgtgacactcagtgctctgaacgactccgatgccaacagtgacgtggtggatattgaagggctaggagaaactcctccagctaagaaactcaacttcgaccaggcctgaccctggattctggccttctcatgacctctgctgatcctcctctcctctcctgctgagccttccacctctgacctctcactgttcatgccggacctgtggatctcctgggactccgagcaaggcctgcacgagagagggctgaaaggctgctggggctgccacctcgctattcccgcataagcatctgcccccaacccctttgaccttcatctgatggacatttttatacagaaaacaataaagatttccctctca

SEQ ID NO: 118522 - DNA, 779 bp, Homo sapiens
  Payload ID: 3196
  Gene Symbol: C17orf49
  Gene Name: chromosome 17 open reading frame 49
  ENST ID: ENST00000552775
  CDS Start-End: 80-580
cgtgacgctgccccgcccccaggtcggagagatcttctcggcggccggcgccgccttcacgaagctcggggagctgacgatgcagctgcatcccgtggccgactcttctcctgcgggtgcgaagtggacggagacggaaatagagatgctgagggctgctgtgaagcgatttggggacgatcttaatcacatcagctgtgtcatcaaggaacggacagtggcccagataaaggccactgtgaaacgcaaggtatatgaagattctggcatcccccttccagctgagtcacccaagaaagggcccaagaaggtggcatctggtgtcttgtcacctcctccagctgcccctcctcccagcagctccagtgtccctgaggccgggggtccccccataaagaaacagaaggctgatgtgacactcagtgctctgaacgactccgatgccaacagtgacgtggtggatattgaagggctaggagaaactcctccagctaagaaactcaacttcgaccaggacagcctgaccctggattctggccttctcatgacctctgctgatcctcctctcctctcctgctgagccttccacctctgacctctcactgttcatgccggacctgtggatctcctgggactccgagcaaggcctgcacgagagagggctgaaaggctgctggggctgccacctcgctattcccgcataagcatctgcccccaacccctttgaccttcatctgatggacatttttatacagaaaacaataaagatttccctctca

SEQ ID NO: 118523 - DNA, 764 bp, Homo sapiens
  Payload ID: 3196
  Gene Symbol: C17orf49
  Gene Name: chromosome 17 open reading frame 49
  ENST ID: ENST00000546760
  CDS Start-End: 106-579
gacttcctgcgcgggggcccgagccgctcagtctccctgctctccgtggtcccggctcgcgtgtagcggcggcggcggcgtctccgtgaggaggcgcgcggggccatgacgtcagcgtccacaaaggtcggagagatcttctcggcggccggcgccgccttcacgaagctcggggagctgacgatgcagctgcatcccgtggccgactcttctcctgcgggtgcgaagtggacggagacggaaatagagatgctgagggctgctgtgaagcgatttggggacgatcttaatcacatcagctgtgtcatcaaggaacggacagtggcccagataaaggccactgtgaaacgcaaggtatatgaagattctggcatcccccttccagctgagtcacccaagaaagggcccaagaaggtggcatctggtgtcttgtcacctcctccagctgcccctcctcccagcagctccagtgtccctgaggccgggggtccccccataaagaaacagaaggctgacagcctgaccctggattctggccttctcatgacctctgctgatcctcctctcctctcctgctgagccttccacctctgacctctcactgttcatgccggacctgtggatctcctgggactccgagcaaggcctgcacgagagagggctgaaaggctgctggggctgccacctcgctattcccgcataagcatctgcccccaacccctttgaccttcatctgatggacatttttatacagaaaacaataa

SEQ ID NO: 118524 - DNA, 996 bp, Homo sapiens
  Payload ID: 3196
  Gene Symbol: C17orf49
  Gene Name: chromosome 17 open reading frame 49
  Uniprot ID: Q8IXM2
  ENST ID: ENST00000546495
  CDS Start-End: 364-942
gtgtcccgtatctcaataaagagaatctgctctcttcagccctgtgtctgtgcttgagtgggggcgagcacggggctgagactagaggtcggcctctgcctggaaagtcccgatgtctgagcggaagtggagcgaagtgtggcgcggaagtgaggcgaaggctttccccatcgactgggcgcgccgagcggtctaagcgactgcgtctgatggggcggggagccgccgggttgagcctatccgctgcggggagggcgggacttcctgcgcgggggcccgagccgctcagtctccctgctctccgtggtcccggctcgcgtgtagcggcggcggcggcgtctccgtgaggaggcgcgcggggccatgacgtcagcgtccacaaaggtcggagagatcttctcggcggccggcgccgccttcacgaagctcggggagctgacgatgcagctgcatcccgtggccgactcttctcctgcgggtgcgaagtggacggagacggaaatagagatgctgagggctgctgtgaagcgatttggggacgatcttaatcacatcagctgtgtcatcaaggaacggacagtggcccagataaaggccactgtgaaacgcaaggtatatgaagattctggcatcccccttccagctgagtcacccaagaaagggcccaagaaggtggcatctggtgtcttgtcacctcctccagctgcccctcctcccagcagctccagtgtccctgaggccgggggtccccccataaagaaacagaaggctgatgtgacactcagtgctctgaacgactccgatgccaacagtgacgtggtggatattgaagggctaggagaaactcctccagctaagaaactcaacttcgaccaggacagcctgaccctggattctggccttctcatgacctctgctgatcctcctctcctctcctgctgagccttccacctctgacctctcactgttcatgccggacctgtggatctcctggga

SEQ ID NO: 118525 - DNA, 760 bp, Homo sapiens
  Payload ID: 3196
  Gene Symbol: C17orf49
  Gene Name: chromosome 17 open reading frame 49
  Uniprot ID: Q8IXM2
  ENST ID: ENST00000552402
  CDS Start-End: 90-506
gcccgagccgctcagtctccctgctctccgtggtcccggctcgcgtgtagcggcggcggcggcgtctccgtgaggaggcgcgcggggccatgacgtcagcgtccacaaaggtcggagagatcttctcggcggccggcgccgccttcacgaagctcggggagctgacgatgcagctgcatcccgtggccgactcttctcctgcgggggcccagataaaggccactgtgaaacgcaaggtatatgaagattctggcatcccccttccagctgagtcacccaagaaagggcccaagaaggtggcatctggtgtcttgtcacctcctccagctgcccctcctcccagcagctccagtgtccctgaggccgggggtccccccataaagaaacagaaggctgatgtgacactcagtgctctgaacgactccgatgccaacagtgacgtggtggatattgaagggctaggagaaactcctccagctaagaaactcaacttcgaccaggcctgaccctggattctggccttctcatgacctctgctgatcctcctctcctctcctgctgagccttccacctctgacctctcactgttcatgccggacctgtggatctcctgggactccgagcaaggcctgcacgagagagggctgaaaggctgctggggctgccacctcgctattcccgcataagcatctgcccccaacccctttgaccttcatctgatggacatttttatacagaaaacaataaagatttccctctc

SEQ ID NO: 118526 - DNA, 430 bp, Homo sapiens
  Payload ID: 3196
  Gene Symbol: C17orf49
  Gene Name: chromosome 17 open reading frame 49
  ENST ID: ENST00000547747
  CDS Start-End: 1-70
tcacatcagctgtgtcatcaaggaacggacagtggcccagataaaggccactgtgaaacgcaagatgtgacactcagtgctctgaacgactccgatgccaacagtgacgtggtggatattgaagggctaggagaaactcctccagctaagaaactcaacttcgaccaggcctgaccctggattctggccttctcatgacctctgctgatcctcctctcctctcctgctgagccttccacctctgacctctcactgttcatgccggacctgtggatctcctgggactccgagcaaggcctgcacgagagagggctgaaaggctgctggggctgccacctcgctattcccgcataagcatctgcccccaacccctttgaccttcatctgatggacatttttatacagaaaacaataaagatttccctctcag

SEQ ID NO: 118527 - DNA, 569 bp, Homo sapiens
  Payload ID: 3197
  Gene Symbol: C17orf50
  Gene Name: chromosome 17 open reading frame 50
  ENST ID: ENST00000603305
  CDS Start-End: 44-565
gatcagggaaagcagggcacagccttgggaagaatggataagcatgcaggactgccctgacctcctcccggcccgcaggtgtgaagacccccttgtggaagaaggaaacggaagagctccgggccgaggacgcggagcaagaggaagggaaggaggggtcggaggacgaggacgaggacaaccagaggccgctggaggacagcgcgacggagggcgaggagccgccgcgggtagcggaggagggcgaaggccgcgagcggcgctcagtgtcctactgcccgctgcgccaggagtccagcacccagcaggtggcgctgctgcggcgcgcggacagcggcttctggggctggctcggccccttagcgctgctgggcggcctaacagctcccaccgacaggaagcggagcctcccggaggagccgtgcgtgctggagatccggcgacgaccgccgcgccgcgggggctgtgcttgctgcgagctcctcttctgcaagaaatgcaggagtctgcacagccacccagcctatgtggcgcactgcgttctggatcacccggatctgggtaaggcg

SEQ ID NO: 118528 - DNA, 477 bp, Homo sapiens
  Payload ID: 3197
  Gene Symbol: C17orf50
  Gene Name: chromosome 17 open reading frame 50
  ENST ID: ENST00000604830
  CDS Start-End: 46-456
atcccagtctctgatcagggaaagcagggcacagccttgggaagaatggataagcatggtgtgaagacccccttgtggaagaaggaaacggaagagctccgggccgaggacgcggagcaagaggaagggaaggaggggtcggaggacgaggacgaggacaaccagaggccgctggaggacagcgcgacggagggcgaggagccgccgcgggtagcggaggagggcgaaggccgcgagcggcgctcagtgtcctactgcccgctgcgccaggagtccagcacccagcaggaagcggagcctcccggaggagccgtgcgtgctggagatccggcgacgaccgccgcgccgcgggggctgtgcttgctgcgagctcctcttctgcaagaaatgcaggagtctgcacagccacccagcctatgtggcgcactgcgttctggatcacccggatctgggtaaggcgggggccgctgggaactc

SEQ ID NO: 118529 - DNA, 1018 bp, Homo sapiens
  Payload ID: 3197
  Gene Symbol: C17orf50
  Gene Name: chromosome 17 open reading frame 50
  Uniprot ID: Q8WW18
  ENST ID: ENST00000605587
  CDS Start-End: 33-557
atcagggaaagcagggcacagccttgggaagaatggataagcatggtgtgaagacccccttgtggaagaaggaaacggaagagctccgggccgaggacgcggagcaagaggaagggaaggaggggtcggaggacgaggacgaggacaaccagaggccgctggaggacagcgcgacggagggcgaggagccgccgcgggtagcggaggagggcgaaggccgcgagcggcgctcagtgtcctactgcccgctgcgccaggagtccagcacccagcaggtggcgctgctgcggcgcgcggacagcggcttctggggctggctcggccccttagcgctgctgggcggcctaacagctcccaccgacaggaagcggagcctcccggaggagccgtgcgtgctggagatccggcgacgaccgccgcgccgcgggggctgtgcttgctgcgagctcctcttctgcaagaaatgcaggagtctgcacagccacccagcctatgtggcgcactgcgttctggatcacccggatctgggtaaggcgggggccgctgggaactcctgagcgcccccgctcccagcctttgtgccctccatcatttcctggccccagaccccctaccgaccttctctcttggagcgcggagccctcttcgacgcattccgcaggaccgccccttctcagctgctgcccagagcgcccccatccgtcaagaaggcccactgttggtgcttggttcccatctgtcacctagcgcccccagtgcagagcccagcataacctagagcccgctgtcaacagcgcccaccgagggctccccgcccccacgcagcaccagcgccaccgcacacctgactctgtccgctcacacagcctcaccttcacctcttgggtatttcagatccgctctggcccagtgggcagaggcatcgcctagagaaaataacctcagggttccctcatccctctgacaaacctgcctctttccctgaaaccattcaataaaacctctgatcaaagtgtca

SEQ ID NO: 118530 - DNA, 7914 bp, Homo sapiens
  Payload ID: 3198
  Gene Symbol: C17orf51
  Gene Name: chromosome 17 open reading frame 51
  Uniprot ID: A8MQB3
  ENST ID: ENST00000391411
  CDS Start-End: 259-924
gcatgcgctgtgcgcccggccggcgtggctggctgtttgaggactgcgcgcggagctccgtggcgggtgtctgaagtcgtgagtttactgcttgtaaggaacatagcgatcactgggaacctggaagtagagactcctttctgccatccatccgtccctcgggctgctgcgaatccccccgccggcctccaggaccccgggctgactgaacgcccgcaccggtcccgccgccccagggcccgctacgcgcccggcataatgggagaaaaatcacgacggaaaggcccagcccctcgccatgcagacgggaagcttggccgcacgtgtgatcacccttacgccccttggagtttcaccccctcttcgcgggctccaacagcctgggtcaggcctccttgtcctgtgtgggcctctcggctgcaagaacacagtcccgagccccggcgagcccgcgcgcctcccacccgccgtgcacaggctgcactttacgccccagcactgcgcctgcgggaccatctggatcgcttttccattctgatgacgtcctgtacttcgtggctgcaggctcctcaagccccaggtctgtgcagagacgagcaaagcagcagaatatccgtgccacagctttctggagcacccattttactaccagatttggaaggaacgaagttaagtaatttccaagaatcatctcccctgccccacaaacatgaaagaaaagacaagagaagcaccccagaagaggaggggagaagtgccccagaaaaaatcatccagtctctgaagctttgcccaggtgggcacaggccagccagcctctcctctggttgcccagctggctgcaggctgtcatttaaccttccgcccagcatgcttttgagtgtgcagaagtgctgcatgccctcttctttgaaaacctgttgagcaaatgcctccgcattttatgcaccttcaacctccacagccaaaggcccccaagaccaaacatgctgtgcacacacagcagctctttgtgtcccactcctggccgatctcctgcatcatctcgttgagcttcattgaaccccgcagtctgcatgctctgtggaactcagggtcttcattttgcatgaaactcagggtcttcattttccgtggaactcaaagtcttcttgctctgtggaacttggagtctcagggcctttgtgctccatggaacttggggtctgtgtgattcatggaactcagaatccttgtgctctgtggtactcagggtgtgcgtgctctgtggaactcggggtctgcatgctccatggaaagcaccaggatgcacttgaccccccacacccatacatacatccttcattttattcctggccctcacctgtccactctgtgaggcttcttcacccccactctcctttgagctcatgccgggtctttcagactggcctgaagcatgggtgttcgtaggggggagtggctgatgtcacaccttcaggcaaattctgctagtgtcacacctgatggagctgcctagggaggatgtttccttggaggatgcgccctggcagccactggcttcttacggtgcctgcactgctgctgctgccatgggggtgccacagggccacactgggggctgttctggaattggtggttttcatttccaggttaggtagggactggcaggcaccttggctgtccttgtggcttctgtcttgaccctggtcctccccaggcagctgattttctgggctgctgctcttccaggaagaattaaaggtgggaatggctgaaacctcagctttggattcacagagaccctaggctgtgtcatgcagaaagggaaaggattgcagatggtggtgggatcagccgaaggcagggccttcactgtgatgctggagccctccatgctgggatgtttgcatacagcccaggttcagttcggtggtccatcagcgagtcctggatctggtctcactcacaagccatggacaacatgagctcagtttgccaggactcttggggttagggagagctcagcatccgggtggctctggttccttctcatgctgaaactctgctggtgttcctccatggggcaaatgtgggtttttctgaggtgcccctcttgctggagttgaggatgagaaatgttttcagtgggtttgcaccctccacacatatgtaagaggtgttgtgtttcattcctgtcaggatccattgctgcagcttcctgaagttgtgtccgttaaaaggcagggacccggtgtccaggctacagagggtgactccaggttccacaccaccactgtggaccagtgtgcctatggacttaggagagttcccagatcgcacaagggggctgccccagagggtgttcagcttgttgccaacagttgctgaagccaaagtctgcaaccttgatgttcaggtcaagtagccagaaacaggtgttctggctttaggtccctgtggacaatgccattctctccttcccaggctactgatgtcctgggttgctcctcttatggtagaagctcaagatggaatggctggagcttggctgcctccggttagagcctgggctctgtattgcagacatcacctggcagaattcctcatgggccccttttgtcgtgggtgcgactgctgggccagggttgtcgtgggtagtaaaggtatttaccaagacaaccgtgagtaaagaaaggcaaatttattacagaaactatgaaaatacattgcaagaatgcaacatgcagcacagcagagaaggggctgtctgcaaagataaagggctggagggaagttttctaaggttgtgctggacggcgctatgtgcaggtgagcttgtgctatatgctaagaatatgttggaataattttaactgccagacctttcctcttctggtgcccgagggaaacgccctgctgcttttagctgtcttgtaacccacacgccttttcacttctgaagttgcaagaataacggctgtggtttttcacacaaaagggttgcagactgggttaggtccctgttccgccaacctggctgtttcccagtttcagttaacttagtggtttactagagccccacacctttctctttcatatggccatgatccaggaggtaatccgtcacctcccctccactagagtgctccatggccagggataatccgtcacctcccctccaccagagtgctccatggccaggggtaatcctcacctctcctccgctagagtgttccatggccaggcagtgtttcctgggtccagagcacctcaaacaatttcagtgttgtggtgactcagggccttcaccatacagacttgacagcatagtctagaggctggaggggctctgtgactcccattaatgacagtcactgccacggtttccccaggcaggatgtgccaggagaactgctccatgttggctcagcagaatgttattataggtagctcaaaaagagagggaacagggcttctctagattatttcagggaacgagctattatttgaatgttaatttaagactattttatcaattaaaaatgtaaggcccaagaaacttcagtgaggaagaatgaacaaattgaataaatactgttaaactttatgcttctttcagcaaatattttctgctcgtctctatgagtcaggcactttgctagataacataacatagaaacatagcatcaatccaatatggtgtgggtactgtatgtcaaatttaaaaataaaagtgctatataagaaacctctcagtgccctggaggcagggtccagagacatatcctgtggatgactggggctgaggtttaagggatgagcctcggtgatgagacagacgggagagggcaccctaggaaaagcgtcttcaggcaatcgtggttcagtgagctgcagccgtcgcggcaggagattgaggagcgcggcctatctggtgatttgctgtggttatgttctgtaaactcgccttgggtcctgaagtattgcttctggggaaacacagggtaaggttcctgcaagcctctggttgcaatattttcaactgccaaggcaccattcatgttccatgggttcattttccaacatccctgtaaaacaaggcagtcccatcagtgttgaaaactgctctccacatacccttttcccgtagagtacttcctgatctacagagctgccactcctgaaaagctaacactttccatgccatgctgccttttgaaaggtgccagccaggcagcattagctaaggcctctttttggctctcctcacaacagtgctgcccgctgtgctttcattggtcatcatctcatgaagtcacaaatgtagctgcttttctatggtttccatggttttgccacactctaggggatattagttttgcactttcccaagcagcctcgtgtacaggttggtgaagctccccttcctctttctggatgcactgtagtgtttgtcattagcgttgaactcacagttcgcagcactagaacccacacctgaaccaagcttggctaacaagcgttttctctgtaaggcacattacagccttcttgctcataaggacactagacagcgcttcagcattatgcttggaggccgtttcaaacagtgaaatcaacaacaagaagctcaaaactgcaaaagaagtggtactatagagaccatgagaagactggtttgcaggttgagagtaggaacaagaaggcagcgtggggccctgcatggcctccgctgggaggccgatggctcaaattgttgccctactctgcacatgttttcctgtgactgtgaaagcaacacgagtattgattcgggggttaaaaatacattttaacaagcagaaaagttcacaaatatgaaatagtggctagtgaggaccacccccatgctggagctgcagacagaggcttttgtgagtgcgaggcttgctcctatcccgggagcttctggttgccaccagcaccttgtaagccagggagtggtgtcacctgtactgtagcaaaagcaccttttctaaatgtgaagtatggcttgaagagaggaagatggaagatggctgtgttagggatgaagcaaggatgggggtggattgaccaagctgggccagaggtgcgaggagctgatctgcgagccctgtgtgcctgtgagtcctggcggagtggccgtgcgtggtgacagggaggaggcatccaggacagcacccacgttcccgcctgaggcacatgagggtggatgacagggttcggggccctagccttcaagtcagacacacctgagttcaaatccagactccaccactgactggctatgtagccttagacatgttccttcacttccctaagcgtccattttctcatgtccaatacatagattactatgccataggaatattaaatcactcagtgattttgaggttaaaatgagtgctggtgctttttattgaaataaaatgggaaaagaagcagcatttgaggtgtgagggaggggaatctgggcatggggagttggatgtgcctgtggacacccatggacaaatgtccagcagccatccaatgtgctttcgggatgctggggccaggatgtggggcagcaacatacagacctggaagttacaagcaggcaggcagctgctgcagctgtgaagagcaggcagtgcaggatcagaggcccagggtaaagcctggggaatgccagcatttagaaagaggccgctggagatcagaaaagagcaacaggaaaagcaggagggtgtggagggatgggaggtgcaggaggagagtttccaagagggaggggcaggagtcggtgttctgcaggcatggactggaagtcgtagtacttttgaactgtagggacctaagacatcttttagtctaatccccttatctatccggaagaagaaatcatgattccaaggtgacatgagttgcttgctttaggtcacagtgatttcacattgggatacctcgatttctaatgagtaatagaatatttaataaatactctcgaatttggaattgctcctattccagtcacactggatattttcccaatttggtgaaactgatattttaacaactgttaaccattccatgtactaagatgcttatagtcaaactgtgcctcttaaacctatttttattgtgtatttaacaaattttgctataatgttaaaaacaacttataactcatcaaactgcattttaattttagtaaacacaaattacactgaaacgggagtgttccctggcccctctcacaggacgtgtgacaagggttcggctcgctgcctgttcaaaccccttacgggagggggatcacgcagagggacaggtgcaggagcccaagtgggtgtgtgctacagtgtgctcttttagccttggcatctgtggatggcttgagtgttaactagctcagtggaccctcagcctttctgcaaaggcagagggtcattgtgacagctttctgtatcccaagctcttgtccatgatcctggaagaatcaggtcacacacagacttgaaggataaatgcaggggtttcactgaggggtagaagtggctctcagtaggatgcatggggagctggaagtggggagggagtgcgaagacgatcttcccctggagtttggccactggacggccaaactcctctcttaccacccgcagctgaactcctctcagcgttcaggtgttcctcatcttctcactttctctgccatgccgttctgctgtttgactgcttttctcttcatctcttcatctgctcctggagcctggggtttggggtttatatgggtacaggatacgggggtgtggtgggccaaagggcaactttttgggtacgaaaacagaaatgcctgttcccagttagggccatgggtctccaggcttgagggtggggcctttgctggggagccgccctcttctatgcagtatttccctgtctcttttctatatcaatacctcaataaaatttagttttaaaaaatagcacatgtaaaaagtttggctatttaaactaaaaagtaattatgtcctaaattattttgtatacaaagacctgaggacttgaaatattgtaataattggagcttgtctctgctttaagggcaccactcgcccctgatccatcttggtttcccgcacaaggcagcaggattgcccatgaatgaacatgggtgaaatcgttggatacaggtagtaaatacattctatttcctgaaaaatattacctaactacatgtctagatatggaattgcattttcaagccaagctggaattacaaattgtagcccatttgaaaatgcatacaaatgtgtgacatatacacccagaggaaaagaagtcacagttatgaaagaacaaagtgggaaaatatctttttcatgtaagattgagcattttggttgatactgtgataaaaaatcttgtgactgattctcttttgcattggtttttagtgtcatgtgcactctgcccaactcagataaaattgtatatgatgtaaatagcaggaaactataaatggtgatattgtcctgaaaggaagccacttcatttttcaaagatttcttccgcggcagggatctaggagtgtgcagggatggagttttgcatttctagaggaaacagcaggcagggtgtgtgcagccggaaagggggcgtctaggttccaagggcaaatcccacccccttagaggggattggagagcctgggaaagaggctgggctgcctgtgatccccaccccacaccctgcctcctacaagcccctagaaggtccacactttgagttgtcagccagagacagtaactcaaaacctcggcttcgggcagccagaagcccagaaatgggggagagggcaggcctagacaccagggatgaaaataaagtgaatattaaaaatta

SEQ ID NO: 118531 - DNA, 877 bp, Homo sapiens
  Payload ID: 3198
  Gene Symbol: C17orf51
  Gene Name: chromosome 17 open reading frame 51
  ENST ID: ENST00000412778
  CDS Start-End: 259-807
gcatgcgctgtgcgcccggccggcgtggctggctgtttgaggactgcgcgcggagctccgtggcgggtgtctgaagtcgtgagtttactgcttgtaaggaacatagcgatcactgggaacctggaagtagagactcctttctgccatccatccgtccctcgggctgctgcgaatccccccgccggcctccaggaccccgggctgactgaacgcccgcaccggtcccgccgccccagggcccgctacgcgcccggcataatgggagaaaaatcacgacggaaaggcccagcccctcgccatgcagacgggaagcttggccgcacgtgtgatcacccttacgccccttggagtttcaccccctcttcgcgggctccaacagcctgggtcaggcctccttgtcctgtgtgggcctctcggctgcaagaacacagtcccgagccccggcgagcccgcgcgcctcccacccgccgtgcacaggctgcactttacgccccagcactgcgcctgcgggaccatctggatcgcttttccattctgatgacgtcctgtacttcgtggctgcaggctcctcaagccccaggtctgtgcagagacgagcaaagcagcagaatatccgtgccacagctttctggagcacccattttactaccagatttggaaggaacgaagttaagtaatttccaagagatggggtctcactctattgtccaggctggtcttgaactcctagcctcaaacaatcctcctgcctcagcctccccaagtgctggtattacaggaatcatctcccctgccccacaaacatgaaagaaaagacaagagaagcaccccagaagaggaggggagaagtgccccagaaaaaatcatccagtctctg

SEQ ID NO: 118532 - DNA, 2272 bp, Homo sapiens
  Payload ID: 3199
  Gene Symbol: C17orf53
  Gene Name: chromosome 17 open reading frame 53
  Uniprot ID: Q8N3J3
  ENST ID: ENST00000245382
  CDS Start-End: 122-1687
gcccggaagcactgtccctcggagtccgagacttccacctgggtcgtgtccaaggccccggcgactccccggactcggggtgccgggccaacctccccgccgaggcccacccgccgtcgctatggcgtgcagtttgcagaagctgtttgctgtggaagaggagtttgaagatgaggatttcttgtctgctgtggaggatgcagagaaccggtttactggctcactgcctgtgaatgctgggcgcctgagacctgtctcttctaggccacaggagactgtgcaggcacagtcctccaggctgctgctgttacaccccactgctccctcagaggctttgggcctgccagacttggacctctgcctccctgcctccagcacgcccagtgctgacagccgtccatcatgcataggagcagctcccctaaggcctgtctctacttccagcagctggattggcaatcagagaagagtgacagtgacagaagtgctcagagagacagcaagacctcagtcctcagccttacaccccctactcacctttgagagccaacagcagcaagttggtggctttgaggggcctgaacaagacgaatttgataaagtcctggcaagcatggagttggaggagcctggcatggagctggaatgtggagtcagcagtgaggccataccaatcctgcctgcccagcagcgggagggttcagtattggctaaaaaagcccgggtagttgatctgagtggatcttgccagaaggggcctgtgcctgccatccacaaagcgggtatcatgtccgcccaggatgagtctctagatcctgtcatccaatgtaggactccacgaccccccttgagacctggtgctgtgggtcaccttcctgttccaactgccttaacagttcccactcagcaactccactgggaagtctgtccgcaacgctcccctgttcaagcacttcagcctctccaagctgctagagggaccattcagagcagccctcaaaatcgtttcccttgtcagccattccagtctccaagttcctggttaagtggcaaagctcatttacccagacctcgaactcccaactcaagctgttctactccctcaaggactagctctggattatttcctcggatacccttacaaccgcaagctccagtgtcttccattgggtctcctgttggtaccccaaaaggtccccagggagctctgcagacacccatagtcaccaaccacctggtgcagctagtcactgctgccagccggacaccccagcagcccacccatccctccacccgagccaaaactcgccgtttccctggcccagctgggatcctgcctcaccaggcagccctgaagcagcttcctaggaacaaggtccccaacatggcggtgatgatcaagtccctgactcggagcacaatggacgccagtgtggttttcaaggaccccacgggagagatgcaggggacggtgcacaggttgctgctggagacgtgccagaatgagctgaagcctggctcagtgctgctgctgaagcagattggagtgttttctccttcacttcgaaatcactacctcaacgtgacacccaacaacctggtccatatttacagcccggattctggggatgggagcttcctcaagccatctcagcccttccccaagatgacctggatggactcctgagtgagcttcctgaagacttcttctgtgggaccagtagttgagactgccccaacgcaggacaacccaccatgagcaggcagctctgggcatgtgtctggtcacatccaagggggagaagaaggccagcatgattggagagtggacacagccggggggcttctgtggttgctcccaccctgggtgttttccctgagagccccctcatctctgcgctgccctcactttgggccttcctttgccgttggcaccagaatccggccggagactggctctccagccaacaagaaaggcctgtcaccctcgccttgggtgtccctctcctgcctcagcttaattttagaggatattgggcctggttttcttgtcccttcataccctagtccctggacagctgaggagatgaaaggagccacaccacaacaatggcggcctgcccctccacacaggggagaagcacgctcaggcttcctctgctttgtctcttcagacctgtggttgctctgctcatccatgcccaaggttcccaggtgcaggacagaggtgtggcctattgtaccttgttctgaaataaagcatctcctgctt

SEQ ID NO: 118533 - DNA, 2725 bp, Homo sapiens
  Payload ID: 3199
  Gene Symbol: C17orf53
  Gene Name: chromosome 17 open reading frame 53
  Uniprot ID: Q8N3J3
  ENST ID: ENST00000319977
  CDS Start-End: 238-2181
cctttaagaaggcggagacgccccagtggcggcgtcttcgaatgcggcctaaggcgcctgccgccagtctcctggcgactttccctatatcgcagagactcatccctctgaccccagcccggaagcactgtccctcggagtccgagacttccacctgggtcgtgtccaaggccccggcgactccccggactcggggtgccgggccaacctccccgccgaggcccacccgccgtcgctatggcgtgcagtttgcagaagctgtttgctgtggaagaggagtttgaagatgaggatttcttgtctgctgtggaggatgcagagaaccggtttactggctcactgcctgtgaatgctgggcgcctgagacctgtctcttctaggccacaggagactgtgcaggcacagtcctccaggctgctgctgttacaccccactgctccctcagaggctttgggcctgccagacttggacctctgcctccctgcctccagcacgcccagtgctgacagccgtccatcatgcataggagcagctcccctaaggcctgtctctacttccagcagctggattggcaatcagagaagagtgacagtgacagaagtgctcagagagacagcaagacctcagtcctcagccttacaccccctactcacctttgagagccaacagcagcaagttggtggctttgaggggcctgaacaagacgaatttgataaagtcctggcaagcatggagttggaggagcctggcatggagctggaatgtggagtcagcagtgaggccataccaatcctgcctgcccagcagcgggagggttcagtattggctaaaaaagcccgggtagttgatctgagtggatcttgccagaaggggcctgtgcctgccatccacaaagcgggtatcatgtccgcccaggatgagtctctagatcctgtcatccaatgtaggactccacgaccccccttgagacctggtgctgtgggtcaccttcctgttccaactgccttaacagttcccactcagcaactccactgggaagtctgtccgcaacgctcccctgttcaagcacttcagcctctccaagctgctagagggaccattcagagcagccctcaaaatcgtttcccttgtcagccattccagtctccaagttcctggttaagtggcaaagctcatttacccagacctcgaactcccaactcaagctgttctactccctcaaggactagctctggattatttcctcggatacccttacaaccgcaagctccagtgtcttccattgggtctcctgttggtaccccaaaaggtccccagggagctctgcagacacccatagtcaccaaccacctggtgcagctagtcactgctgccagccggacaccccagcagcccacccatccctccacccgagccaaaactcgccgtttccctggcccagctgggatcctgcctcaccagcagagtgggagaagtctggaggacatcatggtttccgcgccccaaactccaacccatggtgctctggctaaattccagacagagattgttgctagttcccaggcatctgtggaggaggattttgggcgagggccctggctgaccatgaaatccacgctaggcctggatgagagagaccctagctgcttcctctgtacctacagcattgtcatggtgctgcgcaagcaggcagccctgaagcagcttcctaggaacaaggtccccaacatggcggtgatgatcaagtccctgactcggagcacaatggacgccagtgtggttttcaaggaccccacgggagagatgcaggggacggtgcacaggttgctgctggagacgtgccagaatgagctgaagcctggctcagtgctgctgctgaagcagattggagtgttttctccttcacttcgaaatcactacctcaacgtgacacccaacaacctggtccatatttacagcccggattctggggatgggagcttcctcaagccatctcagcccttccccaaggattcagggagcttccagcatgatgtggctgcaaagcccgaggaaggcttcagaacagcacagaacctagaggcagaggcgtcccctgaggaagaactcccagaagcagatgacctggatggactcctgagtgagcttcctgaagacttcttctgtgggaccagtagttgagactgccccaacgcaggacaacccaccatgagcaggcagctctgggcatgtgtctggtcacatccaagggggagaagaaggccagcatgattggagagtggacacagccggggggcttctgtggttgctcccaccctgggtgttttccctgagagccccctcatctctgcgctgccctcactttgggccttcctttgccgttggcaccagaatccggccggagactggctctccagccaacaagaaaggcctgtcaccctcgccttgggtgtccctctcctgcctcagcttaattttagaggatattgggcctggttttcttgtcccttcataccctagtccctggacagctgaggagatgaaaggagccacaccacaacaatggcggcctgcccctccacacaggggagaagcacgctcaggcttcctctgctttgtctcttcagacctgtggttgctctgctcatccatgcccaaggttcccaggtgcaggacagaggtgtggcctattgtaccttgttctgaaataaagcatctcctgctt

SEQ ID NO: 118534 - DNA, 2529 bp, Homo sapiens
  Payload ID: 3199
  Gene Symbol: C17orf53
  Gene Name: chromosome 17 open reading frame 53
  Uniprot ID: Q8N3J3
  ENST ID: ENST00000585683
  CDS Start-End: 236-2176
tttaagaaggcggagacgccccagtggcggcgtcttcgaatgcggcctaaggcgcctgccgccagtctcctggcgactttccctatatcgcagagactcatccctctgaccccagcccggaagcactgtccctcggagtccgagacttccacctgggtcgtgtccaaggccccggcgactccccggactcggggtgccgggccaacctccccgccgaggcccacccgccgtcgctatggcgtgcagtttgcagaagctgtttgctgtggaagaggagtttgaagatgaggatttcttgtctgctgtggaggatgcagagaaccggtttactggctcactgcctgtgaatgctgggcgcctgagacctgtctcttctaggccacaggagactgtgcaggcacagtcctccaggctgctgctgttacaccccactgctccctcagaggctttgggcctgccagacttggacctctgcctccctgcctccagcacgcccagtgctgacagccgtccatcatgcataggagcagctcccctaaggcctgtctctacttccagcagctggattggcaatcagagaagagtgacagtgacagaagtgctcagagagacagcaagacctcagtcctcagccttacaccccctactcacctttgagagccaacagcagcaagttggtggctttgaggggcctgaacaagacgaatttgataaagtcctggcaagcatggagttggaggagcctggcatggagctggaatgtggagtcagcagtgaggccataccaatcctgcctgcccagcagcgggagggttcagtattggctaaaaaagcccgggtagttgatctgagtggatcttgccagaaggggcctgtgcctgccatccacaaagcgggtatcatgtccgcccaggatgagtctctagatcctgtcatccaatgtaggactccacgaccccccttgagacctggtgctgtgggtcaccttcctgttccaactgccttaacagttcccactcagcaactccactgggaagtctgtccgcaacgctcccctgttcaagcacttcagcctctccaagctgctagagggaccattcagagcagccctcaaaatcgtttcccttgtcagccattccagtctccaagttcctggttaagtggcaaagctcatttacccagacctcgaactcccaactcaagctgttctactccctcaaggactagctctggattatttcctcggatacccttacaaccgcaagctccagtgtcttccattgggtctcctgttggtaccccaaaaggtccccagggagctctgcagacacccatagtcaccaaccacctggtgcagctagtcactgctgccagccggacaccccagcagcccacccatccctccacccgagccaaaactcgccgtttccctggcccagctgggatcctgcctcaccagcagagtgggagaagtctggaggacatcatggtttccgcgccccaaactccaacccatggtgctctggctaaattccagacagagattgttgctagttcccaggcatctgtggaggaggattttgggcgagggccctggctgaccatgaaatccacgctaggcctggatgagagagaccctagctgcttcctctgtacctacagcattgtcatggtgctgcgcaaggcagccctgaagcagcttcctaggaacaaggtccccaacatggcggtgatgatcaagtccctgactcggagcacaatggacgccagtgtggttttcaaggaccccacgggagagatgcaggggacggtgcacaggttgctgctggagacgtgccagaatgagctgaagcctggctcagtgctgctgctgaagcagattggagtgttttctccttcacttcgaaatcactacctcaacgtgacacccaacaacctggtccatatttacagcccggattctggggatgggagcttcctcaagccatctcagcccttccccaaggattcagggagcttccagcatgatgtggctgcaaagcccgaggaaggcttcagaacagcacagaacctagaggcagaggcgtcccctgaggaagaactcccagaagcagatgacctggatggactcctgagtgagcttcctgaagacttcttctgtgggaccagtagttgagactgccccaacgcaggacaacccaccatgagcaggcagctctgggcatgtgtctggtcacatccaagggggagaagaaggccagcatgattggagagtggacacagccggggggcttctgtggttgctcccaccctgggtgttttccctgagagccccctcatctctgcgctgccctcactttgggccttcctttgccgttggcaccagaatccggccggagactggctctccagccaacaagaaaggcctgtcaccctcgccttgggtgtccctctcctgcctcagcttaattttagaggatattgggcctggttttcttgtcccttcataccctagtccctggacagctg

SEQ ID NO: 118535 - DNA, 1535 bp, Homo sapiens
  Payload ID: 3200
  Gene Symbol: C17orf58
  Gene Name: chromosome 17 open reading frame 58
  Uniprot ID: Q2M2W7
  ENST ID: ENST00000334461
  CDS Start-End: 316-543
cggccgcccgcgctcgccaccgagggctccgccggccacgcccaccccaaccggccgcgcgccgccgcgctggccccgggacccgcgcccgcgccgccgccgcgcttcagcctcagcttcggcctcagcccgccgcagagggacgcggagcccggcgctgagccctgcgcgcgcgcctgccggtccgatctggacgaacgcgaggcgttctgcgagagcgaattcgcggtgaacgggatcgtgcacgatgtggacgtgctgggcgcgggcatccggctggtgaccctgctggtggatcgggacgggctgtacaagatgaaccgcctgtacctcacccccgacggcttcttcttccgagtccacatgttagccctggactcctccagctgcaataagccgtgtccagagtttaaacctggtattgaaactgacctgaatgacgctgcatatgtactttataccaccgtttgtaacgtgggtgccacagcccgggctgtaggtcgcccagcctttttttgggagcgatgggaaacaatgacatgaatgggatttagacgacaggcagcaggtatattgtgatgggccacatctaccataagagacggcagctccctacagctctgctccaggtcctgagaggccgcctccgtccaggggatggactgctaaggagcagcagcagctatgtgaaaaggtttaatcgaaaaagggaagggcagattcaaggtgcaattcatacccaatgcatttgaaacaaccatcctggcatttctggaccgcaagagacttggacgtcggcaacaagacatgaaaggtctaccttcatgtaatgggtcctccttcagaagagagccctcagctactctgtgaatgacttgcatagctgcaactgtaatctcgaaggtgtcactttgttatttacaagatgcttcttaaatgggctgctcctgagctcagtgtcaaggtgattcaactgtagtgccagacaatgatttacacagctcagataattgacctgtccagttaacagatcattgcttcataagtttttaaattattttaatttaatattctttagtagaaatagtccacaaaaacattttcttgaatttaaatatacaacttttatatcatgtatcaaaccagattttatattcaaacgatcacattttaaattctgtacataacagtaagcgcactagtcaaaagacatttatgtttgaaatgtcatttagatcaaacacaagggtcaaagcccaggacaagtattaaagttttatacttaaagagtactaaagggccagtgtgcagatgggtggattaaaaaaataaataaaataaaaaatagtactaaagggcttacttcaggcaaaagtgttcctgacgtaccaaaaagtaagatatagtttattttcatgcctccctgctcctagtaatgtatgttttgtgctgaactggcagctatcccaatgtgaaatgtattttggatgtatctggtgtcatttttctattaagaccaagtataatgtttgttt

SEQ ID NO: 118536 - DNA, 1296 bp, Homo sapiens
  Payload ID: 3200
  Gene Symbol: C17orf58
  Gene Name: chromosome 17 open reading frame 58
  Uniprot ID: Q2M2W7
  ENST ID: ENST00000449250
  CDS Start-End: 191-484
cagcccgccgcagagggacgcggagcccggcgctgagccctgcgcgcgcgcctgccggtccgatctggacgaacgcgaggcgttctgcgagagcgaattcgcggtgaacgggatcgtgcacgatgtggacgtgctgggcgcgggcatccggctggtgaccctgctggtggatcgggacgggctgtacaagatgaaccgcctgtacctcacccccgacggcttcttcttccgagtccacatgttagccctggactcctccagctgcaataagccgtgtccagagtttaaacctggcagcaggtatattgtgatgggccacatctaccataagagacggcagctccctacagctctgctccaggtcctgagaggccgcctccgtccaggggatggactgctaaggagcagcagcagctatgtgaaaaggtttaatcgaaaaagggaagggcagattcaaggtgcaattcatacccaatgcatttgaaacaaccatcctggcatttctggaccgcaagagacttggacgtcggcaacaagacatgaaaggtctaccttcatgtaatgggtcctccttcagaagagagccctcagctactctgtgaatgacttgcatagctgcaactgtaatctcgaaggtgtcactttgttatttacaagatgcttcttaaatgggctgctcctgagctcagtgtcaaggtgattcaactgtagtgccagacaatgatttacacagctcagataattgacctgtccagttaacagatcattgcttcataagtttttaaattattttaatttaatattctttagtagaaatagtccacaaaaacattttcttgaatttaaatatacaacttttatatcatgtatcaaaccagattttatattcaaacgatcacattttaaattctgtacataacagtaagcgcactagtcaaaagacatttatgtttgaaatgtcatttagatcaaacacaagggtcaaagcccaggacaagtattaaagttttatacttaaagagtactaaagggccagtgtgcagatgggtggattaaaaaaataaataaaataaaaaatagtactaaagggcttacttcaggcaaaagtgttcctgacgtaccaaaaagtaagatatagtttattttcatgcctccctgctcctagtaatgtatgttttgtgctgaactggcagctatcccaatgtgaaatgtattttggatgtatctggtgtcatttttctattaagaccaagtataatgtttgtttgtaaagcaataaatcttgacttgaaatca

SEQ ID NO: 118537 - DNA, 1654 bp, Homo sapiens
  Payload ID: 3200
  Gene Symbol: C17orf58
  Gene Name: chromosome 17 open reading frame 58
  Uniprot ID: Q2M2W7
  ENST ID: ENST00000536693
  CDS Start-End: 407-634
cgccgcgcttcagcctcagcttcggcctcagcccgccgcagagggacgcggagcccggcgctgagccctgcgcgcgcgcctgccggtccgatctggacgaacgcgaggcgttctgcgagagcgaattcggtgagcccggccgccgcgccgccgccccgccgccccgcgagcctttccgagccccggagaatccgcccgcgagatcccagggcgcctgacccgtgcgggccgtttcgcggttgctaaaaaccacctcctgggggactgggagaggaactcggggtaatgctcttctccaaactgtttttcggaagcagcggtgaacgggatcgtgcacgatgtggacgtgctgggcgcgggcatccggctggtgaccctgctggtggatcgggacgggctgtacaagatgaaccgcctgtacctcacccccgacggcttcttcttccgagtccacatgttagccctggactcctccagctgcaataagccgtgtccagagtttaaacctggtattgaaactgacctgaatgacgctgcatatgtactttataccaccgtttgtaacgtgggtgccacagcccgggctgtaggtcgcccagcctttttttgggagcgatgggaaacaatgacatgaatgggatttagacgacaggcagcaggtatattgtgatgggccacatctaccataagagacggcagctccctacagctctgctccaggtcctgagaggccgcctccgtccaggggatggactgctaaggagcagcagcagctatgtgaaaaggtttaatcgaaaaagggaagggcagattcaaggtgcaattcatacccaatgcatttgaaacaaccatcctggcatttctggaccgcaagagacttggacgtcggcaacaagacatgaaaggtctaccttcatgtaatgggtcctccttcagaagagagccctcagctactctgtgaatgacttgcatagctgcaactgtaatctcgaaggtgtcactttgttatttacaagatgcttcttaaatgggctgctcctgagctcagtgtcaaggtgattcaactgtagtgccagacaatgatttacacagctcagataattgacctgtccagttaacagatcattgcttcataagtttttaaattattttaatttaatattctttagtagaaatagtccacaaaaacattttcttgaatttaaatatacaacttttatatcatgtatcaaaccagattttatattcaaacgatcacattttaaattctgtacataacagtaagcgcactagtcaaaagacatttatgtttgaaatgtcatttagatcaaacacaagggtcaaagcccaggacaagtattaaagttttatacttaaagagtactaaagggccagtgtgcagatgggtggattaaaaaaataaataaaataaaaaatagtactaaagggcttacttcaggcaaaagtgttcctgacgtaccaaaaagtaagatatagtttattttcatgcctccctgctcctagtaatgtatgttttgtgctgaactggcagctatcccaatgtgaaatgtattttggatgtatctggtgtcatttttctattaagaccaagtataatgtttgtttgtaaagcaataaatcttgacttgaaatc

SEQ ID NO: 118538 - DNA, 2093 bp, Homo sapiens
  Payload ID: 3201
  Gene Symbol: C17orf62
  Gene Name: chromosome 17 open reading frame 62
  Uniprot ID: Q9BQA9
  ENST ID: ENST00000306645
  CDS Start-End: 169-732
aatcccggaagcgcgcgcggccccgcccccgaaagtcggctcggctccgctccaatcccggaagtgcgcgcggccccgcccccgccggttcgcgtctctctgctgcggcgcggggaccgctgtgctctcgacccctcctcctgtagagagtggtgctgccctctcgggatgtacctgcaggtggagacccgcaccagctcccgcctccatctgaagagggctccaggcatccggtcctggtccctgctggttggaatcttgtcgattggcctggctgctgcctactacagcggagatagcctgggctggaagctcttctacgtcacaggctgcctgtttgtggctgtgcagaacttggaggactgggaggaagccatcttcgacaagagcacagggaaggttgttttgaagacgttcagcctctacaagaagctgctgactcttttcagagctggccacgaccaggtggtggtcctgctccatgatgtccgtgatgtgagcgtggaggaggagaaggtccggtacttcgggaaaggctacatggtggtgctccggcttgcgacgggcttctcccaccccctcacgcagagtgcagtcatgggccaccgcagtgatgtggaagccatcgccaagctcatcaccagcttcctggagctgcactgccttgagagccccacagagctgtctcagagcagcgacagtgaggccggtgaccctgcaagccagagctgacagccccactgtgcctgagcccgtgcaccgcccacaggacccatggcacattcccggtgtgcctgagcccgtgcaccgcccacaggacccgtggcacattcccggtgtgcctgagcccgtgcaccgcccacaggacccgtggcacattcccggtgtgcctgagcccgtgcaccgcccacaggacccgtggcacattcccggtgtgcctgagcccgtgcaccgcccacaggacccgtggccttggcttcagttggtgcctccagccgagttggcctattgcctgctcatgctgctgcttgcacactgcatgaaacagcaggccagaccaggacatccagactttctccatcgtgaggcctgggcctgcctttctgcagccggaggtctcgccagccctggactcctgctttgggccacagcaagacctcgggcgagtggagaggcggggccaggccgggcccttgtgggtgctgatgctgcatgttgtccccgacacagcgtcctctccctggtggacatccccagcggtcaggtgcttccccaagggcagtgaggggtgaacatccagggcctacctggctgtgcacgctgcagccacactgtggaagctgcccctccccgaggacccgcctcccttgctgatgccaggatctcggcgcatagaccactctgccccagcggtcgtcacagaaaggtctctctgttcctcacactcagcttcagcataagctgtgaggccagaaaaaaggtcagctcttctagtatcgtgcagtgcttaaaaaccgggagctccagccgggcgcagtggttcatgccagtaatcccagcactttcggaggccgaggtgggaggattgcttgaggccaggagttcaagaccagcctgggcaacacagcaagatcctgtctttgtaaaaaaactaaccaaacaggaaaaactgggagattttctgcagaaattgagttccagcctctctcgaacctgggaagacctggcaggagggggctgggctctcggctacagacttctccccaccccgtaggagctgaacgccaaccatcctgacccgccagtgctcttggtctcctgagtgtacccaggtcctcccaggtgcggtgtgcaccgagcgcgcctggcctgatgccctggcctgtgagctggggactcctgggccctgtgagcccctaggcggcaggcccaggaatggctgggtaggacagggaacacctttgccccacgtctggctgtgacctcggtgaaagccgacaggagagagatgggaccctcctcctcagtagtggctgccagtccctcgttgcaggacagggtcatcataaccataaataacccttcacgtgtca

SEQ ID NO: 118539 - DNA, 2217 bp, Homo sapiens
  Payload ID: 3201
  Gene Symbol: C17orf62
  Gene Name: chromosome 17 open reading frame 62
  ENST ID: ENST00000336995
  CDS Start-End: 727-1410
ggcgaccagagttgctgggcagtcttgggtttagtgccgcaatgctgcacttctgacaggctgcttcctggatccctgcagggacctggccagggcattggccccaggtcacctgtggctttggggagagcagttgcagggctggcctgggctgtgggaggcagctgtgccgttttctgacagccattgggaccgccccagtacccgaagaggtggctgccctgagttgccacgggaaactgcagggtggccctggctcagcagccaaccttggggagacctggaggaacagtgcagtgtaaagatggcctcgcgctgagcgggtccccgcagtcggcactcccaggagaaccagcgggctgtgcatgtgacccgccagcctgcaccgcgggcacgtccttcccacccagaggaccctgcactgccttcagggccacagcagtcctccggggcccagcctcaggcaggaaacagcaaatgcttttgctgccaaccaagtgtggctgtcgctttcgatgatgccagtggcgctggtgcgactgccgggcagcatgtgtgggcggggatggctcggccactgaccgtctccccgcagtggtggtcctgctccatgatgtccgtgatgtgagcgtggaggaggagaaggtccggtacttcgggaaaggctacatggtggtgctccggcttgcgacgggcttctcccaccccctcacgcagagtgcagtcatgggccaccgcagtgatgtggaagccatcgccagctcatcaccagcttcctggagctgcactgccttgagagccccacagagctgtctcagagcagcgacagtgaggccggtgaccctgcaagccagagctgacagccccactgtgcctgagcccgtgcaccgcccacaggacccatggcacattcccggtgtgcctgagcccgtgcaccgcccacaggacccgtggcacattcccggtgtgcctgagcccgtgcaccgcccacaggacccgtggcacattcccggtgtgcctgagcccgtgcaccgcccacaggacccgtggcacattcccggtgtgcctgagcccgtgcaccgcccacaggacccgtggccttggcttcagttggtgcctccagccgagttggcctattgcctgctcatgctgctgcttgcacactgcatgaaacagcaggccagaccaggacatccagactttctccatcgtgaggcctgggcctgcctttctgcagccggagtctcgccagccctggactcctgctttgggccacagcaagacctcgggcgagtggagaggcgggccaggccggcccttgtgggtgctgatgctgcatgttgtccccgacacagcgtcctctccctggtggacatccccagcggtcaggtgcttccccaagggcagtgaggggtgaacatccagggcctacctggctgtgcacgctgcagccacactgtggaagctgcccctccccgaggacccgcctcccttgctgatgccaggatctcggcgcatagaccactctgccccagcggtcgtcacagaaaggtctctctgttcctcacactcagcttcagcataagctgtgaggccagaaaaaaggtcagctcttctagtatcgtgcagtgcttaaaaaccgggagctccagccgggcgcagtggttcatgccagtaatcccagcactttcggaggccgaggtgggaggattgcttgaggccaggagttcaagaccagcctgggcaacacagcaagatcctgtctttgtaaaaaaactaaccaaacaggaaaaactgggagattttctgcagaaattgagttccagcctctctcgaacctgggaagacctggcaggagggggctgggctctcggctacagacttctccccaccccgtaggagctgaacgccaaccatcctgacccgccagtgctcttggtctcctgagtgtacccaggtcctcccaggtgcggtgtgcaccgagcgcgcctggcctgatgccctggcctgtgagctggggactcctgggccctgtgagcccctaggcggcaggcccaggaatggctgggtaggacagggaacacctttgccccacgtctggctgtgacctcggtgaaagccgacaggagagagatgggaccctcctcctcagtagtggctgccagtccctcgttgcaggacagggtcatcataaccataaataacccttcacgtgtc

SEQ ID NO: 118540 - DNA, 1849 bp, Homo sapiens
  Payload ID: 3201
  Gene Symbol: C17orf62
  Gene Name: chromosome 17 open reading frame 62
  ENST ID: ENST00000342572
  CDS Start-End: 243-434
ggaagtgcgcgcggccccgcccccgccggttcgcgtctctctgctgcggcgcggggaccgctgtgctctcggaagccatcttcgacaagagcacagggaaggttgttttgaagacgttcagcctctacaagaagctgctgactcttttcagagctggccacgaccaggtggtggtcctgctccatgatgtccgtgatgtgagcgtggaggaggagaaggtccggtacttcgggaaaggctacatggtggtgctccggcttgcgacgggcttctcccaccccctcacgcagagtgcagtcatgggccaccgcagtgatgtggaagccatcgccaagctcatcaccagcttcctggagctgcactgccttgagagccccacagagctgtctcagagcagcgacagtgaggccggtgaccctgcaagccagagctgacagccccactgtgcctgagcccgtgcaccgcccacaggacccatggcacattcccggtgtgcctgagcccgtgcaccgcccacaggacccgtggcacattcccggtgtgcctgagcccgtgcaccgcccacaggacccgtggcacattcccggtgtgcctgagcccgtgcaccgcccacaggacccgtggcacattcccggtgtgcctgagcccgtgcaccgcccacaggacccgtggccttggcttcagttggtgcctccagccgagttggcctattgcctgctcatgctgctgcttgcacactgcatgaaacagcaggccagaccaggacatccagactttctccatcgtgaggcctgggcctgcctttctgcagccggaggtctcgccagccctggactcctgctttgggccacagcaagacctcgggcgagtggagaggcggggccaggccgggcccttgtgggtgctgatgctgcatgttgtccccgacacagcgtcctctccctggtggacatccccagcggtcaggtgcttccccaagggcagtgaggggtgaacatccagggcctacctggctgtgcacgctgcagccacactgtggaagctgcccctccccgaggacccgcctcccttgctgatgccaggatctcggcgcatagaccactctgccccagcggtcgtcacagaaaggtctctctgttcctcacactcagcttcagcataagctgtgaggccagaaaaaaggtcagctcttctagtatcgtgcagtgcttaaaaaccgggagctccagccgggcgcagtggttcatgccagtaatcccagcactttcggaggccgaggtgggaggattgcttgaggccaggagttcaagaccagcctgggcaacacagcaagatcctgtctttgtaaaaaaactaaccaaacaggaaaaactgggagattttctgcagaaattgagttccagcctctctcgaacctgggaagacctggcaggagggggctgggctctcggctacagacttctccccaccccgtaggagctgaacgccaaccatcctgacccgccagtgctcttggtctcctgagtgtacccaggtcctcccaggtgcggtgtgcaccgagcgcgcctggcctgatgccctggcctgtgagctggggactcctgggccctgtgagcccctaggcggcaggcccaggaatggctgggtaggacagggaacacctttgccccacgtctggctgtgacctcggtgaaagccgacaggagagagatgggaccctcctcctcagtagtggctgccagtccctcgttgcaggacagggtcatcataaccataaataacccttcacgtgtcacctgcagcttccactctttatttccaaagaatcagtgtcacacatgcagatcac

SEQ ID NO: 118541 - DNA, 2242 bp, Homo sapiens
  Payload ID: 3201
  Gene Symbol: C17orf62
  Gene Name: chromosome 17 open reading frame 62
  Uniprot ID: Q9BQA9
  ENST ID: ENST00000437807
  CDS Start-End: 319-882
tgtgctctcggtaggcggctgggctgggtgggctccgcacttccttcccgctccgtgccgcgcgtcccggcacccttaggcccactccgggaggggtctgcgtcctgggcccgcctgccggctgttccgtgtcccgccgtgcccgtcgcgggcggcctcgcgcctgttccgctgcaggttggccccggcggcgggagcgcccccgatccggacaaagaaacgagcgctcggaaacggggtctctgggggatccagtgacgtgcccaaccacagagaccagacccctcctcctgtagagagtggtgctgccctctcgggatgtacctgcaggtggagacccgcaccagctcccgcctccatctgaagagggctccaggcatccggtcctggtccctgctggttggaatcttgtcgattggcctggctgctgcctactacagcggagatagcctgggctggaagctcttctacgtcacaggctgcctgtttgtggctgtgcagaacttggaggactgggaggaagccatcttcgacaagagcacagggaaggttgttttgaagacgttcagcctctacaagaagctgctgactcttttcagagctggccacgaccaggtggtggtcctgctccatgatgtccgtgatgtgagcgtggaggaggagaaggtccggtacttcgggaaaggctacatggtggtgctccggcttgcgacgggcttctcccaccccctcacgcagagtgcagtcatgggccaccgcagtgatgtggaagccatcgccaagctcatcaccagcttcctggagctgcactgccttgagagccccacagagctgtctcagagcagcgacagtgaggccggtgaccctgcaagccagagctgacagccccactgtgcctgagcccgtgcaccgcccacaggacccatggcacattcccggtgtgcctgagcccgtgcaccgcccacaggacccgtggcacattcccggtgtgcctgagcccgtgcaccgcccacaggacccgtggcacattcccggtgtgcctgagcccgtgcaccgcccacaggacccgtggcacattcccggtgtgcctgagcccgtgcaccgcccacaggacccgtggccttggcttcagttggtgcctccagccgagttggcctattgcctgctcatgctgctgcttgcacactgcatgaaacagcaggccagaccaggacatccagactttctccatcgtgaggcctgggcctgcctttctgcagccggaggtctcgccagccctggactcctgctttgggccacagcaagacctcgggcgagtggagaggcggggccaggccgggcccttgtgggtgctgatgctgcatgttgtccccgacacagcgtcctctccctggtggacatccccagcggtcaggtgcttccccaagggcagtgaggggtgaacatccagggcctacctggctgtgcacgctgcagccacactgtggaagctgcccctccccgaggacccgcctcccttgctgatgccaggatctcggcgcatagaccactctgccccagcggtcgtcacagaaaggtctctctgttcctcacactcagcttcagcataagctgtgaggccagaaaaaaggtcagctcttctagtatcgtgcagtgcttaaaaaccgggagctccagccgggcgcagtggttcatgccagtaatcccagcactttcggaggccgaggtgggaggattgcttgaggccaggagttcaagaccagcctgggcaacacagcaagatcctgtctttgtaaaaaaactaaccaaacaggaaaaactgggagattttctgcagaaattgagttccagcctctctcgaacctgggaagacctggcaggagggggctgggctctcggctacagacttctccccaccccgtaggagctgaacgccaaccatcctgacccgccagtgctcttggtctcctgagtgtacccaggtcctcccaggtgcggtgtgcaccgagcgcgcctggcctgatgccctggcctgtgagctggggactcctgggccctgtgagcccctaggcggcaggcccaggaatggctgggtaggacagggaacacctttgccccacgtctggctgtgacctcggtgaaagccgacaggagagagatgggaccctcctcctcagtagtggctgccagtccctcgttgcaggacagggtcatcataaccataaataacccttcacgtgtc

SEQ ID NO: 118542 - DNA, 2050 bp, Homo sapiens
  Payload ID: 3201
  Gene Symbol: C17orf62
  Gene Name: chromosome 17 open reading frame 62
  Uniprot ID: Q9BQA9
  ENST ID: ENST00000434650
  CDS Start-End: 169-690
aatcccggaagcgcgcgcggccccgcccccgaaagtcggctcggctccgctccaatcccggaagtgcgcgcggccccgcccccgccggttcgcgtctctctgctgcggcgcggggaccgctgtgctctcgacccctcctcctgtagagagtggtgctgccctctcgggatgtacctgcaggtggagacccgcaccagctcccgcctccatctgaagagggctccaggcatccggtcctggtccctgctggttgatagcctgggctggaagctcttctacgtcacaggctgcctgtttgtggctgtgcagaacttggaggactgggaggaagccatcttcgacaagagcacagggaaggttgttttgaagacgttcagcctctacaagaagctgctgactcttttcagagctggccacgaccaggtggtggtcctgctccatgatgtccgtgatgtgagcgtggaggaggagaaggtccggtacttcgggaaaggctacatggtggtgctccggcttgcgacgggcttctcccaccccctcacgcagagtgcagtcatgggccaccgcagtgatgtggaagccatcgccaagctcatcaccagcttcctggagctgcactgccttgagagccccacagagctgtctcagagcagcgacagtgaggccggtgaccctgcaagccagagctgacagccccactgtgcctgagcccgtgcaccgcccacaggacccatggcacattcccggtgtgcctgagcccgtgcaccgcccacaggacccgtggcacattcccggtgtgcctgagcccgtgcaccgcccacaggacccgtggcacattcccggtgtgcctgagcccgtgcaccgcccacaggacccgtggcacattcccggtgtgcctgagcccgtgcaccgcccacaggacccgtggccttggcttcagttggtgcctccagccgagttggcctattgcctgctcatgctgctgcttgcacactgcatgaaacagcaggccagaccaggacatccagactttctccatcgtgaggcctgggcctgcctttctgcagccggaggtctcgccagccctggactcctgctttgggccacagcaagacctcgggcgagtggagaggcggggccaggccgggcccttgtgggtgctgatgctgcatgttgtccccgacacagcgtcctctccctggtggacatccccagcggtcaggtgcttccccaagggcagtgaggggtgaacatccagggcctacctggctgtgcacgctgcagccacactgtggaagctgcccctccccgaggacccgcctcccttgctgatgccaggatctcggcgcatagaccactctgccccagcggtcgtcacagaaaggtctctctgttcctcacactcagcttcagcataagctgtgaggccagaaaaaaggtcagctcttctagtatcgtgcagtgcttaaaaaccgggagctccagccgggcgcagtggttcatgccagtaatcccagcactttcggaggccgaggtgggaggattgcttgaggccaggagttcaagaccagcctgggcaacacagcaagatcctgtctttgtaaaaaaactaaccaaacaggaaaaactgggagattttctgcagaaattgagttccagcctctctcgaacctgggaagacctggcaggagggggctgggctctcggctacagacttctccccaccccgtaggagctgaacgccaaccatcctgacccgccagtgctcttggtctcctgagtgtacccaggtcctcccaggtgcggtgtgcaccgagcgcgcctggcctgatgccctggcctgtgagctggggactcctgggccctgtgagcccctaggcggcaggcccaggaatggctgggtaggacagggaacacctttgccccacgtctggctgtgacctcggtgaaagccgacaggagagagatgggaccctcctcctcagtagtggctgccagtccctcgttgcaggacagggtcatcataaccataaataacccttcacgtgtc

SEQ ID NO: 118543 - DNA, 1965 bp, Homo sapiens
  Payload ID: 3201
  Gene Symbol: C17orf62
  Gene Name: chromosome 17 open reading frame 62
  ENST ID: ENST00000584024
  CDS Start-End: 116-358
aatcccggaagtgcgcgcggccccgcccccgccggttcgcgtctctctgctgcggcgcggggaccgctgtgctctcgacccctcctcctgtagagagtggtgctgccctctcgggatgtacctgcaggtggagacccgcaccagctcccgcctccatctgaagagggctccaggcatccggtcctggtccctgctggttggaatcttgtcgattggcctggctgctgcctactacagcggaggaagccatcttcgacaagagcacagggaaggttgttttgaagacgttcagcctctacaagaagctgctgactcttttcagagctggccacgaccaggtggtggtcctgctccatgatgtccgtgatgtgagcgtggaggaggagaaggtccggtacttcgggaaaggctacatggtggtgctccggcttgcgacgggcttctcccaccccctcacgcagagtgcagtcatgggccaccgcagtgatgtggaagccatcgccaagctcatcaccagcttcctggagctgcactgccttgagagccccacagagctgtctcagagcagcgacagtgaggccggtgaccctgcaagccagagctgacagccccactgtgcctgagcccgtgcaccgcccacaggacccatggcacattcccggtgtgcctgagcccgtgcaccgcccacaggacccgtggcacattcccggtgtgcctgagcccgtgcaccgcccacaggacccgtggcacattcccggtgtgcctgagcccgtgcaccgcccacaggacccgtggcacattcccggtgtgcctgagcccgtgcaccgcccacaggacccgtggccttggcttcagttggtgcctccagccgagttggcctattgcctgctcatgctgctgcttgcacactgcatgaaacagcaggccagaccaggacatccagactttctccatcgtgaggcctgggcctgcctttctgcagccggaggtctcgccagccctggactcctgctttgggccacagcaagacctcgggcgagtggagaggcggggccaggccgggcccttgtgggtgctgatgctgcatgttgtccccgacacagcgtcctctccctggtggacatccccagcggtcaggtgcttccccaagggcagtgaggggtgaacatccagggcctacctggctgtgcacgctgcagccacactgtggaagctgcccctccccgaggacccgcctcccttgctgatgccaggatctcggcgcatagaccactctgccccagcggtcgtcacagaaaggtctctctgttcctcacactcagcttcagcataagctgtgaggccagaaaaaaggtcagctcttctagtatcgtgcagtgcttaaaaaccgggagctccagccgggcgcagtggttcatgccagtaatcccagcactttcggaggccgaggtgggaggattgcttgaggccaggagttcaagaccagcctgggcaacacagcaagatcctgtctttgtaaaaaaactaaccaaacaggaaaaactgggagattttctgcagaaattgagttccagcctctctcgaacctgggaagacctggcaggagggggctgggctctcggctacagacttctccccaccccgtaggagctgaacgccaaccatcctgacccgccagtgctcttggtctcctgagtgtacccaggtcctcccaggtgcggtgtgcaccgagcgcgcctggcctgatgccctggcctgtgagctggggactcctgggccctgtgagcccctaggcggcaggcccaggaatggctgggtaggacagggaacacctttgccccacgtctggctgtgacctcggtgaaagccgacaggagagagatgggaccctcctcctcagtagtggctgccagtccctcgttgcaggacagggtcatcataaccataaataacccttcacgtgtc

SEQ ID NO: 118544 - DNA, 617 bp, Homo sapiens
  Payload ID: 3201
  Gene Symbol: C17orf62
  Gene Name: chromosome 17 open reading frame 62
  ENST ID: ENST00000577888
  CDS Start-End: 165-401
atcccggaagtgcgcgcggccccgcccccgccggttcgcgtctctctgctgcggcgcggggaccgctgtgctctcggaaacggggtctctgggggatccagtgacgtgcccaaccacagagaccagacccctcctcctgtagagagtggtgctgccctctcgggatgtacctgcaggtggagacccgcaccagctcccgcctccatctgaagagggctccaggcatccggtcctggtccctgctggttggaatcttgtcgattggcctggctgctgcctactacagcggagatagcctgggctggaagctcttctacgtcacaggctgcctgtttgtggctgtgcagaacttggaggactgggagagctggccacgaccaggtggtggtcctgctccatgatgtccgtgatgtgagcgtggaggaggagaaggtccggtacttcgggaaaggctacatggtggtgctccggcttgcgacgggcttctcccaccccctcacgcagagtgcagtcatgggccaccgcagtgatgtggaagccatcgccaagctcatcaccagcttcctggagctgcactgccttgagagccccacagagctgtctcagagcagcgacag

SEQ ID NO: 118545 - DNA, 866 bp, Homo sapiens
  Payload ID: 3201
  Gene Symbol: C17orf62
  Gene Name: chromosome 17 open reading frame 62
  ENST ID: ENST00000583617
  CDS Start-End: 57-629
gggaccgctgtgctctcgacccctcctcctgtagagagtggtgctgccctctcgggatgtacctgcaggtggagacccgcaccagctcccgcctccatctgaagagggctccaggcatccggtcctggtccctgctggttggaatcttgtcgattggcctggctgctgcctactacagcggagatagcctgggctggaagctcttctacgtcacaggctgcctgtttgtggctgtgcagaacttggaggactgggaggaagccatcttcgacaagagcacagggaaggttgttttgaagacgttcagcctctacaagaagctgctgactcttttcagagctggccacgaccaggtggtggtcctgctccatgatgtccgtgatgtgagcgtggaggaggagaaggtccggtacttcgggaaaggctacatggtggtgctccggcttgcgacgggcttctcccaccccctcacgcagagtgcagtcatgggccaccgcaggacccgtggcacattcccggtgtgcctgagcccgtgcaccgcccacaggacccgtggccttggcttcagttggtgcctccagccgagttggcctattgcctgctcatgctgctgcttgcacactgcatgaaacagcaggccagaccaggacatccagactttctccatcgtgaggcctgggcctgcctttctgcagccggaggtctcgccagccctggactcctgctttgggccacagcaagacctcgggcgagtggagaggcggggccaggccgggcccttgtgggtgctgatgctgcatgttgtccccgacacagcgtcctctccctggtggacatccccagcggtcaggtgcttccccaagggc

SEQ ID NO: 118546 - DNA, 741 bp, Homo sapiens
  Payload ID: 3201
  Gene Symbol: C17orf62
  Gene Name: chromosome 17 open reading frame 62
  Uniprot ID: Q9BQA9
  ENST ID: ENST00000585080
  CDS Start-End: 171-734
atcccggaagtgcgcgcggccccgcccccgccggttcgcgtctctctgctgcggcgcggggaccgctgtgctctcggctggagtccagtggcacgatttctgctcactgcagcctccacctcccggcctcagacccctcctcctgtagagagtggtgctgccctctcgggatgtacctgcaggtggagacccgcaccagctcccgcctccatctgaagagggctccaggcatccggtcctggtccctgctggttggaatcttgtcgattggcctggctgctgcctactacagcggagatagcctgggctggaagctcttctacgtcacaggctgcctgtttgtggctgtgcagaacttggaggactgggaggaagccatcttcgacaagagcacagggaaggttgttttgaagacgttcagcctctacaagaagctgctgactcttttcagagctggccacgaccaggtggtggtcctgctccatgatgtccgtgatgtgagcgtggaggaggagaaggtccggtacttcgggaaaggctacatggtggtgctccggcttgcgacgggcttctcccaccccctcacgcagagtgcagtcatgggccaccgcagtgatgtggaagccatcgccaagctcatcaccagcttcctggagctgcactgccttgagagccccacagagctgtctcagagcagcgacagtgaggccggtgaccctgcaagccagagctgacagcccc

SEQ ID NO: 118547 - DNA, 269 bp, Homo sapiens
  Payload ID: 3201
  Gene Symbol: C17orf62
  Gene Name: chromosome 17 open reading frame 62
  ENST ID: ENST00000579751
  CDS Start-End: 1-267
gttgttttgaagacgttcagcctctacaagaagctgctgactcttttcagagctggccacgaccaggtggtggtcctgctccatgatgtccgtgatgtgagcgtggaggaggagaaggtccggtacttcgggaaaggctacatggtggtgctccggcttgcgacgggcttctcccaccccctcacgcagagtgcagtcatgggccaccgcagcgtcctctccctggtggacatccccagcggtcaggtgcttccccaagggcagtgagg

SEQ ID NO: 118548 - DNA, 497 bp, Homo sapiens
  Payload ID: 3201
  Gene Symbol: C17orf62
  Gene Name: chromosome 17 open reading frame 62
  ENST ID: ENST00000584408
  CDS Start-End: 83-319
ggttcgcgtctctctgctgcggcgcggggaccgctgtgctctcgacccctcctcctgtagagagtggtgctgccctctcgggatgtacctgcaggtggagacccgcaccagctcccgcctccatctgaagagggctccaggcatccggtcctggtccctgctggaatcttgtcgattggcctggctgctgcctactacagcggagatagcctgggctggaagctcttctacgtcacaggctgcctgtttgtggctgtgcagaacttggaggactgggaggaagccatcttcgacaagagcacagggaaggttgttttgaagacgttcagcctctacaagaagctgctgactcttttcagagctggccacgaccaggtggtggtcctgctccatgatgtccgtgatgtgagcgtggaggaggagaaggtccggtacttcgggaaaggctacatggtggtgctccggcttgcgacgggcttctcccaccccctcacgca

SEQ ID NO: 118549 - DNA, 656 bp, Homo sapiens
  Payload ID: 3201
  Gene Symbol: C17orf62
  Gene Name: chromosome 17 open reading frame 62
  ENST ID: ENST00000577696
  CDS Start-End: 265-656
gtgctctcggtaggcggctgggctgggtgggctccgcacttccttcccgctccgtgccgcgcgtcccggcacccttaggcccactccgggaggggtctgcgtcctgggcccgcctgccggctgttccgtgtcccgccgtgcccgtcgcgggcggcctcgcgcctgttccgctgcaggaaacggggtctctgggggatccagtgacgtgcccaaccacagagaccagacccctcctcctgtagagagtggtgctgccctctcgggatgtacctgcaggtggagacccgcaccagctcccgcctccatctgaagagggctccaggcatccggtcctggtccctgctggttggaatcttgtcgattggcctggctgctgcctactacagcggagatagcctgggctggaagctcttctacgtcacaggctgcctgtttgtggctgtgcagaacttggaggactgggaggaagccatcttcgacaagagcacagggaaggttgttttgaagacgttcagcctctacaagaagctgctgactcttttcagagctggccacgaccaggtggtggtcctgctccatgatgtccgtgatgtgagcgtggaggaggagaaggtccggtacttcgggaaaggctacatggtggtgctccggcttgc

SEQ ID NO: 118550 - DNA, 1053 bp, Homo sapiens
  Payload ID: 3201
  Gene Symbol: C17orf62
  Gene Name: chromosome 17 open reading frame 62
  Uniprot ID: Q9BQA9
  ENST ID: ENST00000577732
  CDS Start-End: 335-898
gccagtacggccggaagccatgatgggactttcagttcctttcttggtggaggccagcacaggggagagggggtgcccacagatgctagaagcttaaaggctgctgggggctagcggcctcaggacataaggtttccagacaggacggggcaggtggtgatgcagctgtagctcgtgagtctgagcgggaaacagcccccgcgcagtcggtgtcgctgtgaacggaaaagggccttccttacacaggaaacggggtctctgggggatccagtgacgtgcccaaccacagagaccagacccctcctcctgtagagagtggtgctgccctctcgggatgtacctgcaggtggagacccgcaccagctcccgcctccatctgaagagggctccaggcatccggtcctggtccctgctggttggaatcttgtcgattggcctggctgctgcctactacagcggagatagcctgggctggaagctcttctacgtcacaggctgcctgtttgtggctgtgcagaacttggaggactgggaggaagccatcttcgacaagagcacagggaaggttgttttgaagacgttcagcctctacaagaagctgctgactcttttcagagctggccacgaccaggtggtggtcctgctccatgatgtccgtgatgtgagcgtggaggaggagaaggtccggtacttcgggaaaggctacatggtggtgctccggcttgcgacgggcttctcccaccccctcacgcagagtgcagtcatgggccaccgcagtgatgtggaagccatcgccaagctcatcaccagcttcctggagctgcactgccttgagagccccacagagctgtctcagagcagcgacagtgaggccggtgaccctgcaagccagagctgacagccccactgtgcctgagcccgtgcaccgcccacaggacccatggcacattcccggtgtgcctgagcccgtgcaccgcccacaggacccgtggcacattcccggtgtgcctgagcccgtgcaccgcccacaggacccgtggcacattcccggtg

SEQ ID NO: 118551 - DNA, 1127 bp, Homo sapiens
  Payload ID: 3201
  Gene Symbol: C17orf62
  Gene Name: chromosome 17 open reading frame 62
  ENST ID: ENST00000582725
  CDS Start-End: 67-222
gggctcagctgcctctgtctgttcccagacccctcctcctgtagagagtggtgctgccctctcgggatgtacctgcaggtggagacccgcaccagctcccgcctccatctgaagagggctccaggcatccggtcctggtccctgctggttggcaggcagtcactttctcttcataggaatcttgtcgattggcctggctgctgcctactacagcggagatagcctgggctggaagctcttctacgtcacaggctgcctgtttgtggctgtgcagaacttggaggactgggaggaagccatcttcgacaagagcacagggaaggttgttttgaagacgttcagcctctacaagaagctgctgactcttttcagagctggccacgaccaggtggtggtcctgctccatgatgtccgtgatgtgagcgtggaggaggagaaggtccggtacttcgggaaaggctacatggtggtgctccggcttgcgacgggcttctcccaccccctcacgcagagtgcagtcatgggccaccgcagtgatgtggaagccatcgccaagctcatcaccagcttcctggagctgcactgccttgagagccccacagagctgtctcagagcagcgacagtgaggccggtgaccctgcaagccagagctgacagccccactgtgcctgagcccgtgcaccgcccacaggacccatggcacattcccggtgtgcctgagcccgtgcaccgcccacaggacccgtggcacattcccggtgtgcctgagcccgtgcaccgcccacaggacccgtggcacattcccggtgtgcctgagcccgtgcaccgcccacaggacccgtggcacattcccggtgtgcctgagcccgtgcaccgcccacaggacccgtggccttggcttcagttggtgcctccagccgagttggcctattgcctgctcatgctgctgcttgcacactgcatgaaacagcaggccagaccaggacatccagactttctccatcgtgaggcctgggcctgcctttctgcagccggaggtctcgccagccctggactcctgctttgggccacagcaagacctcgggcgagtggagaggcggggccaggccgggcccttgtgggtgct

SEQ ID NO: 118552 - DNA, 573 bp, Homo sapiens
  Payload ID: 3201
  Gene Symbol: C17orf62
  Gene Name: chromosome 17 open reading frame 62
  ENST ID: ENST00000577471
  CDS Start-End: 215-573
gtgctctcggtaggcggctgggctgggtgggctccgcacttccttcccgctccgtgccgcgcgtcccggcacccttaggcccactccgggaggggtctgcgtcctgggcccgcctgccggctgttccgtgtcccgccgtgcccgtcgcgggcggcctcgcgcctgttccgctgcagacccctcctcctgtagagagtggtgctgccctctcgggatgtacctgcaggtggagacccgcaccagctcccgcctccatctgaagagggctccaggcatccggtcctggtccctgctggttggaatcttgtcgattggcctggctgctgcctactacagcggagatagcctgggctggaagctcttctacgtcacaggctgcctgtttgtggctgtgcagaacttggaggactgggaggaagccatcttcgacaagagcacagggaaggttgttttgaagacgttcagcctctacaagaagctgctgactcttttcagagctggccacgaccaggtggtggtcctgctccatgatgtccgtgatgtgagcgtggaggaggagaaggtccggtactt

SEQ ID NO: 118553 - DNA, 809 bp, Homo sapiens
  Payload ID: 3201
  Gene Symbol: C17orf62
  Gene Name: chromosome 17 open reading frame 62
  ENST ID: ENST00000582438
  CDS Start-End: 1-179
ggaaaggctacatggtggtgctccggcttgcgacgggcttctcccaccccctcacgcagagtgcagtcatgggccaccgcagccggaggtctcgccagccctggactcctgctttgggccacagcaagacctcgggcgagtggagaggcggggccaggccgggcccttgtgggtgctgatgctgcatgttgtccccgacacagcgtcctctccctggtggacatccccagcggtcaggtgcttccccaagggcagtgaggggtgaacatccagggcctacctggctgtgcacgctgcagccacactgtggaagctgcccctccccgaggacccgcctcccttgctgatgccaggatctcggcgcatagaccactctgccccagcggtcgtcacagaaaggtctctctgttcctcacactcagcttcagcataagctgtgaggccagaaaaaaggtcagctcttctagtatcgtgcagtgcttaaaaaccgggagctccagccgggcgcagtggttcatgccagtaatcccagcactttcggaggccgaggtgggaggattgcttgaggccaggagttcaagaccagcctgggcaacacagcaagatcctgtctttgtaaaaaaactaaccaaacaggaaaaactgggagattttctgcagaaattgagttccagcctctctcgaacctgggaagacctggcaggagggggctgggctctcggctacagacttctccccaccccgtaggagctgaacgccaaccatcctgacccgccagtgctcttggtctcctgagtgtacccaggtcc

SEQ ID NO: 118554 - DNA, 1074 bp, Homo sapiens
  Payload ID: 3201
  Gene Symbol: C17orf62
  Gene Name: chromosome 17 open reading frame 62
  Uniprot ID: Q9BQA9
  ENST ID: ENST00000585064
  CDS Start-End: 330-893
ggaagtgcgcgcggccccgcccccgccggttcgcgtctctctgctgcggcgcggggaccgctgtgctctcggtaggcggctgggctgggtgggctccgcacttccttcccgctccgtgccgcgcgtcccggcacccttaggcccactccgggaggggtctgcgtcctgggcccgcctgccggctgttccgtgtcccgccgtgcccgtcgcgggcggcctcgcgcctgttccgctgcaggttggccccggcggcgggagcgcccccgatccggacaaagaaacgagcgctcgacccctcctcctgtagagagtggtgctgccctctcgggatgtacctgcaggtggagacccgcaccagctcccgcctccatctgaagagggctccaggcatccggtcctggtccctgctggttggaatcttgtcgattggcctggctgctgcctactacagcggagatagcctgggctggaagctcttctacgtcacaggctgcctgtttgtggctgtgcagaacttggaggactgggaggaagccatcttcgacaagagcacagggaaggttgttttgaagacgttcagcctctacaagaagctgctgactcttttcagagctggccacgaccaggtggtggtcctgctccatgatgtccgtgatgtgagcgtggaggaggagaaggtccggtacttcgggaaaggctacatggtggtgctccggcttgcgacgggcttctcccaccccctcacgcagagtgcagtcatgggccaccgcagtgatgtggaagccatcgccaagctcatcaccagcttcctggagctgcactgccttgagagccccacagagctgtctcagagcagcgacagtgaggccggtgaccctgcaagccagagctgacagccccactgtgcctgagcccgtgcaccgcccacaggacccatggcacattcccggtgtgcctgagcccgtgcaccgcccacaggacccgtggcacattcccggtgtgcctgagcccgtgcaccgcccacaggacccgtggcacattcccggtgtgcctgagcccgtgcaccgcccacag

SEQ ID NO: 118555 - DNA, 841 bp, Homo sapiens
  Payload ID: 3201
  Gene Symbol: C17orf62
  Gene Name: chromosome 17 open reading frame 62
  Uniprot ID: Q9BQA9
  ENST ID: ENST00000578919
  CDS Start-End: 166-729
aatcccggaagtgcgcgcggccccgcccccgccggttcgcgtctctctgctgcggcgcggggaccgctgtgctctcggaaacggggtctctgggggatccagtgacgtgcccaaccacagagaccagacccctcctcctgtagagagtggtgctgccctctcgggatgtacctgcaggtggagacccgcaccagctcccgcctccatctgaagagggctccaggcatccggtcctggtccctgctggttggaatcttgtcgattggcctggctgctgcctactacagcggagatagcctgggctggaagctcttctacgtcacaggctgcctgtttgtggctgtgcagaacttggaggactgggaggaagccatcttcgacaagagcacagggaaggttgttttgaagacgttcagcctctacaagaagctgctgactcttttcagagctggccacgaccaggtggtggtcctgctccatgatgtccgtgatgtgagcgtggaggaggagaaggtccggtacttcgggaaaggctacatggtggtgctccggcttgcgacgggcttctcccaccccctcacgcagagtgcagtcatgggccaccgcagtgatgtggaagccatcgccaagctcatcaccagcttcctggagctgcactgccttgagagccccacagagctgtctcagagcagcgacagtgaggccggtgaccctgcaagccagagctgacagccccactgtgcctgagcccgtgcaccgcccacaggacccatggcacattcccggtgtgcctgagcccgtgcaccgcccacaggacccgtggcacattcccggtgtgcct

SEQ ID NO: 118556 - DNA, 563 bp, Homo sapiens
  Payload ID: 3201
  Gene Symbol: C17orf62
  Gene Name: chromosome 17 open reading frame 62
  ENST ID: ENST00000578913
  CDS Start-End: 63-509
ggcgcggggaccgctgtgctctcgacccctcctcctgtagagagtggtgctgccctctcgggatgtacctgcaggtggagacccgcaccagctcccgcctccatctgaagagggctccaggcatccggtcctggtccctgctggttggaatcttgtcgattggcctggctgctgcctactacagcggagatagcctgggctggaagctcttctacgtcacaggctgcctgtttgtggctgtgcagaacttggaggactgggaggaagccatcttcgacaagagcacagggaaggttgttttgaagacgttcagcctctacaagaagctgctgactcttttcagagctggccacgaccaggtggtggtcctgctccatgatgtccgtgatgtgagcgtggaggaggagaaggtccggtacttcgggaaaggctacatggtggtgctccggcttgcgacgggcttctcccaccccctcacgcagagtgcagtcatgggccaccgcaggtaaggctgtgggactttgatctggccggagctgcagccgtagcaggtcactcccgtt

SEQ ID NO: 118557 - DNA, 540 bp, Homo sapiens
  Payload ID: 3201
  Gene Symbol: C17orf62
  Gene Name: chromosome 17 open reading frame 62
  ENST ID: ENST00000577834
  CDS Start-End: 188-540
gttcgcgtctctctgctgcggcgcggggaccgctgtgctctcggctggagtccagtggcacgatttctgctcactgcagcctccacctcccggcctcaggaaacggggtctctgggggatccagtgacgtgcccaaccacagagaccagacccctcctcctgtagagagtggtgctgccctctcgggatgtacctgcaggtggagacccgcaccagctcccgcctccatctgaagagggctccaggcatccggtcctggtccctgctggttggaatcttgtcgattggcctggctgctgcctactacagcggagatagcctgggctggaagctcttctacgtcacaggctgcctgtttgtggctgtgcagaacttggaggactgggaggaagccatcttcgacaagagcacagggaaggttgttttgaagacgttcagcctctacaagaagctgctgactcttttcagagctggccacgaccaggtggtggtcctgctccatgatgtccgtgatgtgagcgtggaggaggagaaggtccg

SEQ ID NO: 118558 - DNA, 470 bp, Homo sapiens
  Payload ID: 3201
  Gene Symbol: C17orf62
  Gene Name: chromosome 17 open reading frame 62
  ENST ID: ENST00000582545
  CDS Start-End: 215-470
gtgctctcggtaggcggctgggctgggtgggctccgcacttccttcccgctccgtgccgcgcgtcccggcacccttaggcccactccgggaggggtctgcgtcctgggcccgcctgccggctgttccgtgtcccgccgtgcccgtcgcgggcggcctcgcgcctgttccgctgcagacccctcctcctgtagagagtggtgctgccctctcgggatgtacctgcaggtggagacccgcaccagctcccgcctccatctgaagagggctccaggcatccggtcctggtccctgctggttgatagcctgggctggaagctcttctacgtcacaggctgcctgtttgtggctgtgcagaacttggaggactgggaggaagccatcttcgacaagagcacagggaaggttgttttgaagacgttcagcctctacaagaagctgctgactcttttcagagctggccacgaccagg

SEQ ID NO: 118559 - DNA, 1079 bp, Homo sapiens
  Payload ID: 3201
  Gene Symbol: C17orf62
  Gene Name: chromosome 17 open reading frame 62
  Uniprot ID: Q9BQA9
  ENST ID: ENST00000577436
  CDS Start-End: 214-735
aggacataaggtttccagacaggacggggcaggtggtgatgcagctgtagctcgtgagtctgagcgggaaacagcccccgcgcagtcggtgtcgctgtgaacggaaaagggccttccttacacaggaaacggggtctctgggggatccagtgacgtgcccaaccacagagaccagacccctcctcctgtagagagtggtgctgccctctcgggatgtacctgcaggtggagacccgcaccagctcccgcctccatctgaagagggctccaggcatccggtcctggtccctgctggttgatagcctgggctggaagctcttctacgtcacaggctgcctgtttgtggctgtgcagaacttggaggactgggaggaagccatcttcgacaagagcacagggaaggttgttttgaagacgttcagcctctacaagaagctgctgactcttttcagagctggccacgaccaggtggtggtcctgctccatgatgtccgtgatgtgagcgtggaggaggagaaggtccggtacttcgggaaaggctacatggtggtgctccggcttgcgacgggcttctcccaccccctcacgcagagtgcagtcatgggccaccgcagtgatgtggaagccatcgccaagctcatcaccagcttcctggagctgcactgccttgagagccccacagagctgtctcagagcagcgacagtgaggccggtgaccctgcaagccagagctgacagccccactgtgcctgagcccgtgcaccgcccacaggacccatggcacattcccggtgtgcctgagcccgtgcaccgcccacaggacccgtggcacattcccggtgtgcctgagcccgtgcaccgcccacaggacccgtggcacattcccggtgtgcctgagcccgtgcaccgcccacaggacccgtggcacattcccggtgtgcctgagcccgtgcaccgcccacaggacccgtggccttggcttcagttggtgcctccagccgagttggcctattgcctgctcatgctgctgcttgcacactgcatgaaacagcaggccagaccaggacatccagactttc

SEQ ID NO: 118560 - DNA, 584 bp, Homo sapiens
  Payload ID: 3201
  Gene Symbol: C17orf62
  Gene Name: chromosome 17 open reading frame 62
  ENST ID: ENST00000584503
  CDS Start-End: 326-517
cgtctctctgctgcggcgcggggaccgctgtgctctcggaatcttgtcgattggcctggctgctgcctactacagcggagatagcctgggctggaagctcttctacgtcacaggctgcctgtttgtggctgtgcagaacttggaggactgggaggaagccatcttcgacaagagcacagggaaggttgttttgaagacgttcagcctctacaagaagctgctgactcttttcagagctggccacgaccaggtggtggtcctgctccatgatgtccgtgatgtgagcgtggaggaggagaaggtccggtacttcgggaaaggctacatggtggtgctccggcttgcgacgggcttctcccaccccctcacgcagagtgcagtcatgggccaccgcagtgatgtggaagccatcgccaagctcatcaccagcttcctggagctgcactgccttgagagccccacagagctgtctcagagcagcgacagtgaggccggtgaccctgcaagccagagctgacagccccactgtgcctgagcccgtgcaccgcccacaggacccatggcacattcccggtgtgcctgag

SEQ ID NO: 118561 - DNA, 668 bp, Homo sapiens
  Payload ID: 3201
  Gene Symbol: C17orf62
  Gene Name: chromosome 17 open reading frame 62
  ENST ID: ENST00000581196
  CDS Start-End: 376-567
aatcccggaagcgcgcgcggccccgcccccgaaagtcggctcggctccgctccaatcccggaagtgcgcgcggccccgcccccgccggttcgcgtctctctgctgcggcgcggggaccgctgtgctctcgatagcctgggctggaagctcttctacgtcacaggctgcctgtttgtggctgtgcagaacttggaggactgggaggaagccatcttcgacaagagcacagggaaggttgttttgaagacgttcagcctctacaagaagctgctgactcttttcagagctggccacgaccaggtggtggtcctgctccatgatgtccgtgatgtgagcgtggaggaggagaaggtccggtacttcgggaaaggctacatggtggtgctccggcttgcgacgggcttctcccaccccctcacgcagagtgcagtcatgggccaccgcagtgatgtggaagccatcgccaagctcatcaccagcttcctggagctgcactgccttgagagccccacagagctgtctcagagcagcgacagtgaggccggtgaccctgcaagccagagctgacagccccactgtgcctgagcccgtgcaccgcccacaggacccatggcacattcccggtgtgcctgagcccgtgcaccgcccacaggacccgtggcacattc

SEQ ID NO: 118562 - DNA, 468 bp, Homo sapiens
  Payload ID: 3201
  Gene Symbol: C17orf62
  Gene Name: chromosome 17 open reading frame 62
  ENST ID: ENST00000584891
  CDS Start-End: 416-468
ccccgccggttcgcgtctctctgctgcggcgcggggaccgctgtgctctcgtaatgaggtctcgttatgttgcccaggctggtctcaaactcctgagctcaagcgctcttccttcctcggcctcccaggaatcttgtcgattggcctggctgctgcctactacagcggagatagcctgggctggaagctcttctacgtcacaggctgcctgtttgtggctgtgcagaacttggaggactgggaggaagccatcttcgacaagagcacagggaaggttgttttgaagacgttcagcctctacaagaagctgctgactcttttcagagctggccacgaccaggtggtggtcctgctccatgatgtccgtgatgtgagcgtggaggaggagaaggtccggtacttcgggaaaggctacatggtggtgctccggcttgcgacgggcttctcccaccccctcacgcagagtgc

SEQ ID NO: 118563 - DNA, 564 bp, Homo sapiens
  Payload ID: 3201
  Gene Symbol: C17orf62
  Gene Name: chromosome 17 open reading frame 62
  ENST ID: ENST00000580560
  CDS Start-End: 271-462
gctgcggcgcggggaccgctgtgctctcgcctgggctggaagctcttctacgtcacaggctgcctgtttgtggctgtgcagaacttggaggactgggaggaagccatcttcgacaagagcacagggaaggttgttttgaagacgttcagcctctacaagaagctgctgactcttttcagagctggccacgaccaggtggtggtcctgctccatgatgtccgtgatgtgagcgtggaggaggagaaggtccggtacttcgggaaaggctacatggtggtgctccggcttgcgacgggcttctcccaccccctcacgcagagtgcagtcatgggccaccgcagtgatgtggaagccatcgccaagctcatcaccagcttcctggagctgcactgccttgagagccccacagagctgtctcagagcagcgacagtgaggccggtgaccctgcaagccagagctgacagccccactgtgcctgagcccgtgcaccgcccacaggacccatggcacattcccggtgtgcctgagcccgtgcaccgcccacaggacccgtggcacattcc

SEQ ID NO: 118564 - DNA, 950 bp, Homo sapiens
  Payload ID: 3202
  Gene Symbol: C17orf64
  Gene Name: chromosome 17 open reading frame 64
  Uniprot ID: Q86WR6
  ENST ID: ENST00000269127
  CDS Start-End: 85-795
cggctaggtcacagaagcagtgggtcagaagccagaggggacgtggggagtgccaccctggagcctaccggcacacctgctgagatggaggcctcagatgggcaagggggtgaaggggacaagccactagagcaggtgacaaatgtgtcatgcctggagacaagctccagcgccagccctgctagagactcgctcatgcgccatgccaagggcctggatcaggacaccttcaaaacttgtaaagaatacctaagaccgctgaagaagttcctgcgaaagttgcacctgcccagggaccttccccagaagaagaagctgaagtacatgaagcagagccttgtggtcctaggggaccacatcaacacctttctgcagcattactgccaagcctgggaaatcaaacactggagaaagatgctctggcggttcatctccctcttctcggagctggaagcaaagcagcttcgccgactttacaagtacaccaagagcagccagccggccaagttcctggtgacattctgcgcctcggatgcgccggagaggtccttgctggccgaccgggaagacagtctgcccaagctctgccatgcatgggggctgcacagcaacatcagcggcatgaaggagcggctgtccaacatgcagaccccaggtcaagggagccccctgcctgggcagccaagatcccaggaccatgtcaagaaagattctttaagggagctttctcaaaaaccaaaactcaagaggaagaggataaaggaagccccagaaactccagagactgaaccgtaagaagaccaactgggacaaagggcccgcttgtcctggctctcagagcacggggaatggagaccaaaaagggaaaagaattgtccttatcaaaaagattctcaggtcttaattaggaataaatgaggtgggaaataaacattcttatgacagttcta

SEQ ID NO: 118565 - DNA, 403 bp, Homo sapiens
  Payload ID: 3202
  Gene Symbol: C17orf64
  Gene Name: chromosome 17 open reading frame 64
  ENST ID: ENST00000474834
  CDS Start-End: 109-403
gcccaccgcgtttccgccctcggcctcgggtccctggagggctcgcgggtgacaaatgtgtcatgcctggagacaagctccagcgccagccctgctagagactcgctcatgcgccatgccaagggcctggatcaggacaccttcaaaacttgtaaagaatacctaagaccgctgaagaagttcctgcgaaagttgcacctgcccagggaccttccccagaagaagaagctgaagtacatgaagcagagccttgtggtcctaggggaccacatcaacacctttctgcagcattactgccaagcctgggaaatcaaacactggagaaagatgctctggcggttcatctccctcttctcggagctggaagcaaagcagcttcgccgactttacaagtacaccaaga

SEQ ID NO: 118566 - DNA, 203 bp, Homo sapiens
  Payload ID: 3202
  Gene Symbol: C17orf64
  Gene Name: chromosome 17 open reading frame 64
  ENST ID: ENST00000461535
  CDS Start-End: 175-203
ggcgcctccgctggcgacggggggtggtgacttccggggcgcttgaggacgaccccccccgcccccgcgcccacatgttctggcgttcggcgggtggggtccgagcagctgacggtgacaaatgtgtcatgcctggagacaagctccagcgccagccctgctagagactcgctcatgcgccatgccaagggcctggatcagga

SEQ ID NO: 118567 - DNA, 2013 bp, Homo sapiens
  Payload ID: 3203
  Gene Symbol: C17orf67
  Gene Name: chromosome 17 open reading frame 67
  Uniprot ID: Q0P5P2
  ENST ID: ENST00000397861
  CDS Start-End: 1281-1553
ggatggagggttgaatgccaaaacttcgtaatcgtagaaaattctggaaagccgccggcggggcaaggccacgaggatcctcctcgcagcaccgcgccgcgcggggcccaggggccgcgctcacgcccgccgctcggcgcagacacgagtgcccccgacttgagccgaacctctagccgatgccggcgccgccgccgccggggatgcgtaagccgactgggaagcgagggggggaggcggcctgcgcggcaccgcccgacctggccgcggcgggctgagccccaggttccggaggaatgctcgctccccgctggagtcctaccagcccaacacggacctgagccgcgaccacgcgggctgcagcctgcagcacatcagctacccggagaacgcggacgcggaagcaccgctgctcagcacccccgaagaaacacggaatccagagaggcacaggcaccgccccggcgcgcacagctgcactcagcggcttccttcctactacatacatacataggagtgggagccgaggaccacttgttgcttgcggacttcctctagcataaaagatggaaagaaaacacacaccgaagcaagggaccaaaggaacagaaaagaaacgcagagatcataggaaaactgcaaagaaatacttgataatatcttccaaacgattagagaagacataacattcattaagaatacacatatagatgtatatatacgtatgaagaaaacctgcttgatatcacacagtcaggagtcaactgagttggggctttgaacttaggtttatctgatgccaaagtttgtgatgctcttcaaccatttagggtaccgcagagtgtggattttgaatcacctgcatcagcatcattttaaaatatagattctgtggtcctgaccaggtctctgaagtcagaatatgaagtggagctaggaatctaacttcttaacaagttccctagatgcctaagggtatccctgaatgatacagttttgtttgaaagactgaaaagcccaaagctggcccttttgggaaatagcagtaaatcattgatatgtgaaggttcccagcaggaggatgaaaatttacaggaattcggaggaaaatatttcagtggtcattactaaaacgctcagagtcagatacattcagcatcataccgtaagtcccgttagtcaaagcataaacaagcgcagggcctggcatggcttccttcaagttggctgactcagtctgggaggattcactcagcaagaggcagaggaaccaaggcaggatgaagacattgcctgtgctcgtgctgtctcttaccttactgactgtcttctcagagacctccccgattttgacagagaagcaggccaaacagctcctaagatctcggcgacaggatagaccaagcaaacccggattccccgatgagccaatgcgggaatacatgcaccacctgctcgccctggagcatcgcgctgaggagcagttcctggagcactggctgaaccctcactgcaaaccccactgtgacaggaacaggattcatcctgtgtaaggggatcaggaccagcctcgcaagcattttaatagacaacaagctggataatgtcgaagcaagacaaggctgcttctttcacttgtttttaaattgcagaaatggatgtcttcagacctcgtgaactgtgggcatatcaaagattgccttggaaatggcaaatatatatactgcttcattttactaacctgcatagatcactaaaaccaatagcttaaagcatagacacctcccaaaggtcttcccatcagtttgcaagagtgggaacaaccagaatcttacctggggttgatggagctggaactcccagaccaggagttggggcaggctgcctgccctaaggaatttggggaatccttgttcagagtagtgaagcataccacttggggttgctgagttgttttgtcctctatttttttcctcttcttttctgccctaataaacattggtattaaattta

SEQ ID NO: 118568 - DNA, 1651 bp, Homo sapiens
  Payload ID: 3204
  Gene Symbol: C17orf74
  Gene Name: chromosome 17 open reading frame 74
  Uniprot ID: Q0P670
  ENST ID: ENST00000333870
  CDS Start-End: 75-1580
gagtgcagtgtgggttggggccgggggtggggggcagaggggggtggcccaggtggccctaggaccccccctccatggaaaaccagctatggcataacaccgtgagatgttgcaatcaataccaagaaagcccccacgatgccgaggacatcttactcctgctgctgggcctcatcgttcttgtcaacattggcatcaacgtggcaactatgatgtggcatggactccagaacgccttagacaagatgattgattgggctactcagaaaaatgaaattcaggccagtgaaagtcccccaagtggtcccccagacaaggctcaggatgtccacatccactgcatcctggaccctgtgcaggtgaagatgtcccgacccacgcagtactcctctttctcctgccaccatttctccaaccatcacagtagcagtcttcttcgctgtgttcgtcgccgccgccgccgccaccgccgttgtcgccgtcgctgctgcaaccaccagcagcggccgcagaactacagacaaatcccccatagccactcagtcttccgtaacccacatcgcagccaaaagatgtcacaactacaccgagtgcctttctttgatcaggaggacccggattcctacctggaggaggaggacaacctgcccttcccgtatcccaagtacccacgtcgcggctggggcgggttttatcagagagcgggcctgccctccaatgtggggctgtggggccaccagggtggtatcctggccagtctgccaccaccctctctctacctgtcacctgagctgcgctgcatgcccaagcgtgtagaggccaggtctgagctgaggctgcagtcctatgggcgccacggttcccaatcccgactgtggggcaatgtggaggctgagcagtgggcctcgtctccaccacctccccaccggctgccccctaacccctcttgggtccccgtggggcacagcccttacccctcagtgggctggatgctgtatgactcctgggatcagcggcgtcgtggcacggagggctttgagcgcccccctgcctcggtgtcccggaacgcccggcctgaggcccagggctgccgggagcaccactccccacagtcccaccagcagagcctgcttggtcacgcctatggccagtcccaccgcagtccccacccatccacggaacccttgggctacagctcccaggacccccgtgaggtgcggcgtcgggcagctgactgggctgaggctctgcccgcctggcgtcctctgactacctctgcctccctcacggtgttggacgaggcctcccatcaacggaccccagctccaagctcagtgctggtcccccattcctcccagccctggcccaaagtccaggctgcggaccctgcccctcccccgaccatgtttgtcccactcagccggaatccagggggcaatgccaactaccaggtgtacgacagcctggagctgaagcggcaggtgcagaagagcagagccaggtccagctcactgccaccggcttccacctccaccttgaggccctctctgcacaggagccagaccgagaaactcaactgaccagcaggcggatgtggggtgtggggcagggcatggagggagaggaataaagagaaacagagtccaggaaa

SEQ ID NO: 118569 - DNA, 1287 bp, Homo sapiens
  Payload ID: 3204
  Gene Symbol: C17orf74
  Gene Name: chromosome 17 open reading frame 74
  ENST ID: ENST00000574034
  CDS Start-End: 49-426
gtggggggcagaggggggtggcccaggtggccctaggaccccccctccatggaaaaccagctatggcataacaccgtgagatgttgcaatcaataccaagaaagcccccacgatgccgaggacatcttactcctgctgctgggcctcatcgttcttgtcaacattggcatcaacgtggcaactatgatgtggcatggactccagaacgccttagacaagatgattgattgggctactcagaaaagaggacccggattcctacctggaggaggaggacaacctgcccttcccgtatcccaagtacccacgtcgcggctggggcgggttttatcagagagcgggcctgccctccaatgtggggctgtggggccaccagggtggtatcctggccagtctgccaccaccctctctctacctgtcacctgagctgcgctgcatgcccaagcgtgtagaggccaggtctgagctgaggctgcagtcctatgggcgccacggttcccaatcccgactgtggggcaatgtggaggctgagcagtgggcctcgtctccaccacctccccaccggctgccccctaacccctcttgggtccccgtggggcacagcccttacccctcagtgggctggatgctgtatgactcctgggatcagcggcgtcgtggcacggagggctttgagcgcccccctgcctcggtgtcccggaacgcccggcctgaggcccagggctgccgggagcaccactccccacagtcccaccagcagagcctgcttggtcacgcctatggccagtcccaccgcagtccccacccatccacggaacccttgggctacagctcccaggacccccgtgaggtgcggcgtcgggcagctgactgggctgaggctctgcccgcctggcgtcctctgactacctctgcctccctcacggtgttggacgaggcctcccatcaacggaccccagctccaagctcagtgctggtcccccattcctcccagccctggcccaaagtccaggctgcggaccctgcccctcccccgaccatgtttgtcccactcagccggaatccagggggcaatgccaactaccaggtgtacgacagcctggagctgaagcggcaggtgcagaagagcagagccaggtccagctcactgccaccggcttccacctccaccttgaggccctctctgcacaggagccagaccgagaaactcaactgaccagcaggcggatgtggggtgtggggcagggcatggagggagaggaataaagagaaacagagtccaggaaa

SEQ ID NO: 118570 - DNA, 4581 bp, Homo sapiens
  Payload ID: 3205
  Gene Symbol: C17orf75
  Gene Name: chromosome 17 open reading frame 75
  ENST ID: ENST00000225805
  CDS Start-End: 71-1261
gataccgacggctgcacgggagcaggggagcggtttggcggagacacagggccgctcagaggccgccgcaatgctcccctctttgcaggagtcgatggatggagatgaaaaggaactagagagcagcgaagagggaggctcagccgaggagcggagactcgagccgccgtccagcagccactactgtctttacagctatcgcggaagcagattggcacagcaacgaggggacagtgaggacggaagcccaagtggcacaaatgcagaaactccctctggtgatgatttcagcctctccttggcagatactaatctaccatccgaagtggagccagagctgcgcagtttcattgctaagcgtctttcaagaggtgcagtctttgaagggctgggtaatgttgcatctgtggagctaaaaattccaggttaccgagttggttgttattactgccttttccaaaatgaaaaactgcttcctgaaacagtaacgatagactctgaacgtaacccttcagaatatgtggtctgttttttaggagggtctgaaaaaggacttgagactttcaggcttgaattggacaagtacattcaagggctgaaaaataacatgaattgtgaggcaaggggcctggagagtcacataaaatcctatctgagcagctggtttgaggatgttgtatgcccaatccaaagggttgttcttctctttcaggaaaagcttacctttctgctacatgctgctttgagttacactcctgttgaagttaaagaatcagatgaaaaaacaaagagagacattaacaggtttctgagtgtggccagtcttcaaggacttattcatgaaggcaccatgacttctttgtgcatggccatgacagaggagcagcataagtctgtggtcatcgattgcagcagctcccagcctcagttctgcaatgcaggaagtaaccggttttgtgaggattggatgcaagcttttttaaatggtgccaaaggaggtaacccttttcttttccgacaagtactggagaactttaaactaaaggccatacaagacacaaacaatttgaagagatttatccgacaggcagaaatgaatcattatgctttgtttaaatgttacatgttcctaaagaactgtggtagtggagatatacttttgaagattgttaaagtggaacatgaagaaatgcctgaagccaaaaatgtgatagctgtccttgaagaattcatgaaagaagctcttgaccaaagtttttgatcatatgttttgagataattgtatgatcaagttgtatatttaagtcttagtgtttgaaattgcagttataattgttcataggattgctatttaagatgatttgaaactcaatccagattttctttttgtattttaccaatttaacttaaataaaaatctgaagaacatcttcactgagtcctagatagataatgtatgtgagagttgtgaaattttagtgtctcactggccccataaattccacgcttcaggaagttgttgcttaaaaaatttcagagatgattttgtttgtggcttttctcaggaaaagcctgagtttgctgcagtatttagcaacttttcttctcagaaaaaccataatacttccttttcagtggactgtagcttcttaaaaaaaaaaatgtaattctagtcttagaacagattaataccactacaccagttcagagatagatctgtgcatcctgtgggtgcttgatacatttttttgtctagttgataacggcatggatgataaagtcagattttaagtcaatatgcaaatcctgagtatgtagaaaattaaatgagctttacaaatcgatgcactagcttcaagataaaatattatctttgagctgggcgcagtggctcaagcctgtaatcccagcactttgggaggctgaggcgggcagatcatgaggtcaggagatcgagaccatcctggctaacacagtgaaagcccgtctctactaaaatacaaaaaattagccgggcatggtggcgggcgcctgtagtcccagctactctggaggctgaggcaggagagtggcgtgaacccaggaggtggagcttgcagtgagccgagatcgcgccactgcactccagcctgggcgacagagcgagactctgtctcaaaaaaaaaaataattatctctgagagaaagctactgcagaaatcgccttcagtcaccatttcatttatttgttcacaggtatttatgaagagcctgtgttttcttttaggtgaaaatgctggagttttaaaacagtgttgagaaaagaaacaaagtacatacagtttacaagcaaactgtaacataaggaatgcaaacagtttcttcctattagagttactcattgattttagttttttgtacatttgttacaagcctcagattgttttactctgaatcaattgaaagtgccctcagctagccatttacaattcccatggaagcctatgtagctacatacatacaattgcaatttgctcgggatagctctttaataaattcatttgataatgatttttgcttagaagaacagaagtcttgtgttctcacttccctgaggatgctcagaggagcacaaacccataaaactgaggaatcctctcttaaatggatctaaattcacattaagtgctgagttttaactttcaaaatgactgacaatggccttctgctttctcctctacataagcctcgggacatgactcacatttcttttcttttaatgagaaatacaattcagaatcttcataaatgctttcatacggttttaaactttaataacttggaatgtaggcagtatagaaaaaaatctaagtagcatttttcatagtattaaagtgagagtggctgggcacgatggctcatgcctgtaatcccagcactttgagaggccgaggcaggtggatcacctgaggtcaggagttccagaccagcctgaccaatatggtgaaaccctgtctctactaaaattacaaaaattagctgggaactgtggcatgtgcctgtagtcccagctacttgggaggctgaggcaggagaatcgcttgaacccgggaggcagagattgcggtgagccgagatcgcgccactgcattccaacctgagtgacagagcgagactctgtctcaaaaaaataaagtcagggtgactaaggaaaaccagcaattttatgacactgtccttgaatctgactgtcttttcccaatgtagttggttccccacttggaaatcattttttaaagtaagctacattagcacatcaacgttttaagtctgaaaaaatacttcattttcaaattcatgtcattcaagagtctatgttgtaaatggcatttaaaagcaaatgtgttacctgcttcaaatcatttatggatataggcaaggtgtaattacatattctctgtgtggttgtatatatttttgtaatgtaggctcactacattacacagctctatatgatagtcttattttatctttttttttttttaatgaaatggggtctcactatgttgctcagactggtcttaaactcttggactcaagcaatcctcccaccttggcctcccaaactgagccactgcacccggcctctggtagtcttattttaaaaaaagtaagtctgggctgggtgtggtggctcatgcctgtaatcccagcactttgggaggcctaggcgggcagatcatgaggtcaggagatcgagaccatcctggctaacacggtgaaaccccgtctctactaaaagtacaaaaaattagccgggcgtggtggcaggcgtctgtagttccagctactcgggaggctgaggcaggagaatggcgtgaacccgggaggcggagcttgcagtgagtcgagatcacaccactgcactcaagcctgggcgacagagcgagactccgtctcaaaaaaaaaaaaaaagtctgacaaactctgtatcactactgtagacaaggaaaatggtgtcatggaactgaatatcttggtcatgagaagaaaccacagagttcatgactagaaacatgtactgtattcaaattttaataagctactatcttggcttttaaagttgtttttttttttgtttttgttttattttttaagacagaatctcgctctgtcacccaggctggagtgtggtggtgcaatcttggctcactgcaacctctgcctcccaggttcaagtgattctccttcctcagcctccccagtagctgggactacaggcatgtgccaccatgcatggctaattttttgtatttttagtagagacggggtttcaccgtgttagccaggatggtctcgatcttctcaccttgtgatccacccgccttggcctcccaaagtgccgggattacaggcgtgagccactgtgcccagccagcttttaaagttttaaaaaggatttgttcagacatggaatatatttgtgtatattacttgtgtgctgtacacacagaggaaatgtatgtttgtcatgtatgaagaatggcttcagtttctctgtaattaatttgtaattataataataaaacttagcttctcatc

SEQ ID NO: 118571 - DNA, 913 bp, Homo sapiens
  Payload ID: 3205
  Gene Symbol: C17orf75
  Gene Name: chromosome 17 open reading frame 75
  ENST ID: ENST00000583774
  CDS Start-End: 89-913
gtccgtttcagagtttttcgctttcgctggctgtgcttgcggagcactttgggtttcatttgtaaaggagccggagccccaggagtcgatggatggagatgaaaaggaactagagagcagcgaagagggaggctcagccgaggagcggagactcgagccgccgtccagcagccactactgtctttacagctatcgcggaagcagattggcacagcaacgaggggacagtgaggacggaagcccaagtggcacaaatgcagaaactccctctggtgatgatttcagcctctccttggcagatactaatctaccatccgaagtggagccagagctgcgcagtttcattgctaagcgtctttcaagaggtgcagtctttgaagggctgggtaatgttgcatctgtggagctaaaaattccaggttaccgagttggttgttattactgccttttccaaaatgaaaaactgcttcctgaaacagtaacgatagactctgaacgtaacccttcagaatatgtggtctgttttttaggagggtctgaaaaaggacttgagcttttcaggcttgaattggacaagtacattcaagggctgaaaaataacatgaattgtgaggcaaggggcctggagagtcacataaaatcctatctgagcagctggtttgaggatgttgtatgcccaatccaaagggttgttcttctctttcaggaaaagcttacctttctgctacatgctgctttgagttacactcctgttgaagttaaagaatcagatgaaaaaacaaagagagacattaacaggtttctgagtgtggccagtcttcaaggacttattcatgaaggcaccatgacttctttgtgcatggccatgacagaggagcagcataagtctgtggtcatcgattgcagcagctcc

SEQ ID NO: 118572 - DNA, 452 bp, Homo sapiens
  Payload ID: 3205
  Gene Symbol: C17orf75
  Gene Name: chromosome 17 open reading frame 75
  ENST ID: ENST00000583104
  CDS Start-End: 1-292
tcttctctttcaggaaaagcttacctttctgctacatgctgctttgagttacactcctgttgaagttaaagaatcagatgaaaaaacaaagagagacattaacaggtttctgagtgtggccagtcttcaaggacttattcatgaaggcaccatgacttctttgtgcatggccatgacagaggagcagcataagtctgtggtcatcgattgcagcagctcccagcctcagttctgcaatgcagaaatcctggatccaccaccgctgctgttcaccctctcccacccatcctgacccagacccagatgaaacaggccctaatgccagcccttcaggtcacttcctgaataaccaatggcttggaaaaagaaaaaaaatatttaatggaatctgtgctcaaataatatgttacaacaaaaatatacagaatgtacacaatacaaaaatacttaga

SEQ ID NO: 118573 - DNA, 776 bp, Homo sapiens
  Payload ID: 3205
  Gene Symbol: C17orf75
  Gene Name: chromosome 17 open reading frame 75
  ENST ID: ENST00000583221
  CDS Start-End: 71-298
gataccgacggctgcacgggagcaggggagcggtttggcggagacacagggccgctcagaggccgccgcaatgctcccctctttgcaggagtcgatggatggagatgaaaaggaactagagagcagcgaagagggaggctcagccgaggagcggagactcgagccgccgtccagcagccactactgtctttacagctatcgcggaagcagattggcacagcaacgaggggacagtgaggacggaagcccaagtggcacaaatgcagaaactccctctggtgatgatttcagatactaatctaccatccgaagtggagccagagctgcgcagtttcattgctaagcgtctttcaagaggtgcagtctttgaagggctgggtaatgttgcatctgtggagctaaaaattccaggttaccgagttggttgttattactgccttttccaaaatgaaaaactgcttcctgaaacagtaacgatagactctgaacgtaacccttcagaatatgtggtctgttttttaggagggtctgaaaaaggacttgagcttttcaggcttgaattggacaagtacattcaagggctgaaaaataacatgaattgtgaggcaaggggcctggagagtcacataaaatcctatctgagcagctggtttgaggatgttgtatgcccaatccaaagggttgttcttctctttcaggaaaagcttacctttctgctacatgctgctttgagttacactcctgttgaagttaaagaatcagatgaaaaaacaaag

SEQ ID NO: 118574 - DNA, 1642 bp, Homo sapiens
  Payload ID: 3205
  Gene Symbol: C17orf75
  Gene Name: chromosome 17 open reading frame 75
  Uniprot ID: Q9HAS0
  ENST ID: ENST00000577809
  CDS Start-End: 51-1241
agcaggggagcggtttggcggagacacagggccgctcagaggccgccgcaatgctcccctctttgcaggagtcgatggatggagatgaaaaggaactagagagcagcgaagagggaggctcagccgaggagcggagactcgagccgccgtccagcagccactactgtctttacagctatcgcggaagcagattggcacagcaacgaggggacagtgaggacggaagcccaagtggcacaaatgcagaaactccctctggtgatgatttcagcctctccttggcagatactaatctaccatccgaagtggagccagagctgcgcagtttcattgctaagcgtctttcaagaggtgcagtctttgaagggctgggtaatgttgcatctgtggagctaaaaattccaggttaccgagttggttgttattactgccttttccaaaatgaaaaactgcttcctgaaacagtaacgatagactctgaacgtaacccttcagaatatgtggtctgttttttaggagggtctgaaaaaggacttgagcttttcaggcttgaattggacaagtacattcaagggctgaaaaataacatgaattgtgaggcaaggggcctggagagtcacataaaatcctatctgagcagctggtttgaggatgttgtatgcccaatccaaagggttgttcttctctttcaggaaaagcttacctttctgctacatgctgctttgagttacactcctgttgaagttaaagaatcagatgaaaaaacaaagagagacattaacaggtttctgagtgtggccagtcttcaaggacttattcatgaaggcaccatgacttctttgtgcatggccatgacagaggagcagcataagtctgtggtcatcgattgcagcagctcccagcctcagttctgcaatgcaggaagtaaccggttttgtgaggattggatgcaagcttttttaaatggtgccaaaggaggtaacccttttcttttccgacaagtactggagaactttaaactaaaggccatacaagacacaaacaatttgaagagatttatccgacaggcagaaatgaatcattatgctttgtttaaatgttacatgttcctaaagaactgtggtagtggagatatacttttgaagattgttaaagtggaacatgaagaaatgcctgaagccaaaaatgtgatagctgtccttgaagaattcatgaaagaagctcttgaccaaagtttttgatcatatgttttgagataattgtatgatcaagttgtatatttaagtcttagtgtttgaaattgcagttataattgttcataggattgctatttaagatgatttgaaactcaatccagattttctttttgtattttaccaatttaacttaaataaaaatctgaagaacatcttcactgagtcctagatagataatgtatgtgagagttgtgaaattttagtgtctcactggccccataaattccacgcttcaggaagttgttgcttaaaaaatttcagagatgattttgtttgtggcttttctcaggaaaagcctgagtttgctgcagtatttagcaacttttcttctcagaaaaaccataatacttccttttcagtggactgtagcttcttaaaaaaaaaaa

SEQ ID NO: 118575 - DNA, 458 bp, Homo sapiens
  Payload ID: 3205
  Gene Symbol: C17orf75
  Gene Name: chromosome 17 open reading frame 75
  ENST ID: ENST00000582961
  CDS Start-End: 1-146
tggccatgacagaggagcagcataagtctgtggtcatcgattgcagcagctcccagcctcagttctgcaatgcaggccatacaagacacaaacaatttgaagagatttatccgacaggcagaaatgaatcattatgctttgtttaaatgttacatgttcctaaagaactgtggtagtggagatatacttttgaagattgttaaagtggaacatgaagaaatgcctgaagccaaaaatgtgatagctgtccttgaagaattcatgaaagaagctcttgaccaaagtttttgatcatatgttttgagataattgtatgatcaagttgtatatttaagtcttagtgtttgaaattgcagttataattgttcataggattgctatttaagatgatttgaaactcaatccagattttctttttgtattttaccaatttaacttaaataaaaatctgaagaaca

SEQ ID NO: 118576 - DNA, 884 bp, Homo sapiens
  Payload ID: 3205
  Gene Symbol: C17orf75
  Gene Name: chromosome 17 open reading frame 75
  ENST ID: ENST00000580558
  CDS Start-End: 488-884
cgcccccggcccgccgcccggccttgcaccccacccccggcccagcggcccggccgctcctaaaagccatcttctcctctcccagccaagattggcacagcaacgaggggacagtgaggacggaagcccaagtggcacaaatgcagaaactccctctggtgatgatttcagcctctccttggcagatactaatctaccatccgaagtggagccagagctgcgcagtttcattgctaagcgtctttcaagaggtgcagtctttgaagggctgggtaatgttgcatctgtggagctaaaaattccaggttaccgagttggttgttattactgccttttccaaaatgaaaaactgcttcctgaaacagtaacgatagactctgaacgtaacccttcagaatatgtggtctgttttttaggagggtctgaaaaaggacttgagcttttcaggcttgaattggacaagtacattcaagggctgaaaaataacatgaattgtgaggcaaggggcctggagagtcacataaaatcctatctgagcagctggtttgaggatgttgtatgcccaatccaaagggttgttcttctctttcaggaaaagcttacctttctgctacatgctgctttgagttacactcctgttgaagttaaagaatcagatgaaaaaacaaagagagacattaacaggtttctgagtgtggccagtcttcaaggacttattcatgaaggcaccatgacttctttgtgcatggccatgacagaggagcagcataagtctgtggtcatcgattgcagcagctcccagcctcagttctgcaatgcaggaagtaaccggttttgtgaggattggatgcaagcttttttaaatggtgccaaaggaggtaacc

SEQ ID NO: 118577 - DNA, 733 bp, Homo sapiens
  Payload ID: 3205
  Gene Symbol: C17orf75
  Gene Name: chromosome 17 open reading frame 75
  ENST ID: ENST00000581747
  CDS Start-End: 469-733
ccagccaaggtctctggcctgaagggcgctcctcgcctcccgctgctcttcctggcccccgtcgtggacttattggcacagcaacgaggggacagtgaggacggaagcccaagtggcacaaatgcagaaactccctctggtgatgatttcagcctctccttggcagatactaatctaccatccgaagtggagccagagctgcgcagtttcattgctaagcgtctttcaagaggtgcagtctttgaagggctgggtaatgttgcatctgtggagctaaaaattccaggttaccgagttggttgttattactgccttttccaaaatgaaaaactgcttcctgaaacagtaacgatagactctgaacgtaacccttcagaatatgtggtctgttttttaggagggtctgaaaaaggacttgagcttttcaggcttgaattggacaagtacattcaagggctgaaaaataacatgaattgtgaggcaaggggcctggagagtcacataaaatcctatctgagcagctggtttgaggatgttgtatgcccaatccaaagggttgttcttctctttcaggaaaagcttacctttctgctacatgctgctttgagttacactcctgttgaagttaaagaatcagatgaaaaaacaaagagagacattaacaggtttctgagtgtggccagtcttcaaggacttattcatgaaggcaccatgacttctttgtgcatggcca

SEQ ID NO: 118578 - DNA, 573 bp, Homo sapiens
  Payload ID: 3205
  Gene Symbol: C17orf75
  Gene Name: chromosome 17 open reading frame 75
  ENST ID: ENST00000583334
  CDS Start-End: 461-573
ggccgctcctaaaagccatcttctcctctcccagccaagattggcacagcaacgaggggacagtgaggacggaagcccaagtggcacaaatgcagaaactccctctggtgatgatttcagaatgtgtgtctttcatttgtcaagcctctccttggcagatactaatctaccatccgaagtggagccagagctgcgcagtttcattgctaagcgtctttcaagaggtgcagtctttgaagggctgggtaatgttgcatctgtggagctaaaaattccaggttaccgagttggttgttattactgccttttccaaaatgaaaaactgcttcctgaaacagtaacgatagactctgaacgtaacccttcagaatatgtggtctgttttttaggagggtctgaaaaaggacttgagcttttcaggcttgaattggacaagtacattcaagggctgaaaaataacatgaattgtgaggcaaggggcctggagagtcacataaaatcctatctgagcagctggtttgaggatgttgtatgcccaatccaaagggttgttcttctctttcaggaaaagct

SEQ ID NO: 118579 - DNA, 1675 bp, Homo sapiens
  Payload ID: 3206
  Gene Symbol: C17orf78
  Gene Name: chromosome 17 open reading frame 78
  Uniprot ID: Q8N4C9
  ENST ID: ENST00000611038
  CDS Start-End: 108-587
aaacttggttccagctgcgtgtggtgaaagcaactagaggcagagctatcaagggctgtgacagatgagcagtggtctgtctgcaatgagcatgtgctcaagctaacatggataccatcttggtcttcagcctaatcattgcatcctatgatgccaacaagaaagacctcagagatagcagttgccgactggaacagctgcctgggatcttcccaaaagacgtgagaagcatcagagaattgcaaatgcaagaaactcacacagaaaccaaaaggacaacattcattcaaaaccggactatagctaccctgcagtgccttggctctgacagcaaagtaaaagtcaaccttgtatatttggagagaaggccaaaggtcaagcatattttgaagaacctgagaatcattgctgctccccgcagaaacagctctgcctcctcaagctgtcacctaatccccacatccaagtttcagactggatctcttctaaaaggcaaagtatcaatgcctaggagccaggaagctgtgccaatgccagtggttgtggagatggcaaaagaagggaggccagccacctgggacagctgaatccaagcctgactctcagccccagaaggttggacaagatgctgccaattcatcaaacccaaagaaagctgcagagatcactgttatccaccagacatacttctgaaaagttctgctctatctcaaagactgaatgatactacacagtcctctccctattaatatgggcacattcttgccaatttcacacttgtatcttcagcagggacattacaatcaaacaccaattcctggttaatgaagggagagtgtgggcttagcagagttaccctcatgcccctatctgagccacaaccttctgtaattcacttcatacatccatctaaatggatacctttccatcccctcaaacgagaacaaaaagtattccctgcaagcactatgaatggaccttactactctctttgacagaagactcaaacacagcctctaagaaacaaggcagctgttagtgtgacatagcttccagctcctctgttatcttcacagctgacttcacactcactggccctcaatagcttagagtgggactcctgatctccctggttgacgtttataaggttttgtaatttagcttctggtactacatgtatctatccacacactgctgaagggaacttgaccctacgcattccaaaagccttcctcataagttatccccaaggggttcagggactacagaccattagtacccaagtgaagtcttctgacgatccagaattcctaaggtggctctgatattatatcatactttaatagagagttgcataccttttggacaaagattccagagcaaaataattatgataatgctgtttctcacaggagaatagctatgagtcaaatctaacctgcttaaataagagtttggtgagaaagtgaaaccacctgatcttgaatcaatgttgaggtgaaaaaggaaatgtcaggagggataagacagggtgaggccctgcttcttttcctaagagtctgaaaccattccatttcattttggtgaaatgtgtctgtttctaagaaattctgttttcttagttctctggttaaaaaaaaaaatacataaactgtatccttctttctttcacttc

SEQ ID NO: 118580 - DNA, 1862 bp, Homo sapiens
  Payload ID: 3206
  Gene Symbol: C17orf78
  Gene Name: chromosome 17 open reading frame 78
  Uniprot ID: Q8N4C9
  ENST ID: ENST00000615133
  CDS Start-End: 51-878
gtgacagatgagcagtggtctgtctgcaatgagcatgtgctcaagctaacatggataccatcttggtcttcagcctaatcattgcatcctatgatgccaacaagaaagacctcagagatagcagttgccgactggaacagctgcctgggatcttcccaaaagacgtgagaagcatcagagaattgcaaatgcaagaaactcacacagaaaccaaaaggacaacattcattcaaaaccggactatagctaccctgcagtgccttggctctgacagcaaagtaaaagtcaaccttgtatatttggagagaaggccaaaggtcaagcatattttgaagaacctgagaatcattgctgctccccgcagaaacagctctgcctcctcaagctgtcacctaatccccacatccaagtttcagactggatctcttctaaaaggcaaagcttttttaccagggatctcacaatgtaaagtcctgggggcttcatcagagacttttcccaccactgccccttctataactcctgggaataaagaaggagagaaaactacaagtaccgacacagatgagaacctagagaagagacagaaatggagtattgtggtcaaaattctgattgctgtcaccctgttgctcagtggagttgccattatagtatttgtaatttttgaagtcccatgtccttatcaatgcctaggagccaggaagctgtgccaatgccagtggttgtggagatggcaaaagaagggaggccagccacctgggacagctgaatccaagcctgactctcagccccagaaggttggacaagatgctgccaattcatcaaacccaaagaaagctgcagagatcactgttatccaccagacatacttctgaaaagttctgctctatctcaaagactgaatgatactacacagtcctctccctattaatatgggcacattcttgccaatttcacacttgtatcttcagcagggacattacaatcaaacaccaattcctggttaatgaagggagagtgtgggcttagcagagttaccctcatgcccctatctgagccacaaccttctgtaattcacttcatacatccatctaaatggatacctttccatcccctcaaacgagaacaaaaagtattccctgcaagcactatgaatggaccttactactctctttgacagaagactcaaacacagcctctaagaaacaaggcagctgttagtgtgacatagcttccagctcctctgttatcttcacagctgacttcacactcactggccctcaatagcttagagtgggactcctgatctccctggttgacgtttataaggttttgtaatttagcttctggtactacatgtatctatccacacactgctgaagggaacttgaccctacgcattccaaaagccttcctcataagttatccccaaggggttcagggactacagaccattagtacccaagtgaagtcttctgacgatccagaattcctaaggtggctctgatattatatcatactttaatagagagttgcataccttttggacaaagattccagagcaaaataattatgataatgctgtttctcacaggagaatagctatgagtcaaatctaacctgcttaaataagagtttggtgagaaagtgaaaccacctgatcttgaatcaatgttgaggtgaaaaaggaaatgtcaggagggataagacagggtgaggccctgcttcttttcctaagagtctgaaaccattccatttcattttggtgaaatgtgtctgtttctaagaaattctgttttcttagttctctggttaaaaaaaaaaatacataaactgtatccttctttctttcacttcaa

SEQ ID NO: 118581 - DNA, 1862 bp, Homo sapiens; identical to SEQ ID NO: 118580
  Payload ID: 3206
  Gene Symbol: C17orf78
  Gene Name: chromosome 17 open reading frame 78
  Uniprot ID: Q8N4C9
  ENST ID: ENST00000616425
  CDS Start-End: 51-878

SEQ ID NO: 118582 - DNA, 1675 bp, Homo sapiens; identical to SEQ ID NO: 118579
  Payload ID: 3206
  Gene Symbol: C17orf78
  Gene Name: chromosome 17 open reading frame 78
  Uniprot ID: Q8N4C9
  ENST ID: ENST00000631822
  CDS Start-End: 108-587

SEQ ID NO: 118583 - DNA, 2163 bp, Homo sapiens
  Payload ID: 3207
  Gene Symbol: C17orf80
  Gene Name: chromosome 17 open reading frame 80
  ENST ID: ENST00000255557
  CDS Start-End: 371-2014
gcagccggtggcgagtacccctcagtcggacccgtaccaccactacttccggcgtctgctccgcgcccccccatgtcgctgccgccgtggtaccgccctctcgcggctgcgcagtggcaccatcccaaccgcaccgactggtaaccccgcccacgggaagaggcgggctcggagcgggaggagcgactaggagcttctgggagaaaggacctcccctggggtggcagaagcgctcgcctgttcacagccaacggagggctgacattcacgtttcattctgccacactcgggaacggtgatcggggaagcatggggatccgggagaagcacccacaaaactagcatcctcctggaggagctcgggaataggatgagtgataatccacccagaatggaagtgtgtccttactgtaagaagccatttaaacgattaaaatcccacttgccatactgtaagatgataggaccaaccatacctactgatcaaaaagtttatcagtccaagccagctacactcccacgtgctaaaaagatgaaaggaccaatcaaagatttaattaaagctaaagggaaagagttagagacagagaatgaagaaagaaattctaagttggtggtggacaaaccagaacagacagtgaagacctttccactgccagctgttggtttggaaagagcagctactacaaaggcagataaagacatcaagaatccaatccaaccatccttcaaaatgttaaaaaatactaaaccaatgactactttccaagaagaaaccaaggctcagttttacgcatcagagaaaacctctcctaaaagagaacttgccaaagatttgcctaaatcaggagaaagtcgatgtaatccttcagaagctggagcgtctttactggttggctcaatagaaccttctttgtcaaatcaagatagaaaatattcctcaactctacctaatgatgtacaaactacctctggtgatctcaaattggacaaaattgatccccaaagacaggaacttctagtaaaattactagatgtgcctactggtgattgtcatatttctccaaagaatgtcagtgatggggttaaaagggtaagaacattattaagcaatgagagagattccaaaggcagggatcacctctcaggagtccctactgatgttacagttactgagactccagaaaagaacacagaatccctcattttaagccttaaaatgagctcattaggtaaaatccaagtcatggagaaacaagagaaaggacttaccctgggagtagagacgtgtgggagcaaaggaaatgcagagaaaagtatgtctgcaacagaaaagcaggaacggactgtcatgagccatggctgtgagaacttcaacaccagggattcagtcacaggaaaggagtctcaaggggaaagaccacatttaagtttgttcattccgagggagacgacttaccagtttcattctgtatcgcagtcaagtagtcaaagtcttgcctctctagctacaacatttcttcaagaaaagaaagcagaagcccagaatcatcattgtgtccctgatgtaaaggcattaatggagagtcccgagggacagttatctctggagcccaaatctgatagtcagttccaagcatcacacactgggtgccagagccctttatgttcagcccagcgtcacactcctcagagccccttcaccaatcatgctgcagctgctggcaggaagactcttcgcagctgcatggggctggagtggtttccagagctctatcctggttaccttggactaggggtgttgccagggaagcctcagtgttggaatgcaatgacccagaagccacaacttatcagtccccagggggaaagactctcacaaggctggatcaggtgcaacaccaccataaggaagagtggattcggtggcatcacgatgctcttcacaggatacttcgtcctgtgttgtagctggagtttcagacgtctgaagctgcagcggtggcgtaagtagtgttgacctggacatcacttaaagctctggaacagcaaagggcgtacagtggagacgactgcaatacatacttaacagtttaaaaatgtataatatttgggacagggagaggggagtgaaaaaaataaagaataaaattattggaatct

SEQ ID NO: 118584 - DNA, 3449 bp, Homo sapiens
  Payload ID: 3207
  Gene Symbol: C17orf80
  Gene Name: chromosome 17 open reading frame 80
  Uniprot ID: Q9BSJ5
  ENST ID: ENST00000268942
  CDS Start-End: 195-1916
ggccgggggttgggcaggggcctggggggcttccctggggggcttgtcgccggggccgcctgggctttcaggtcttccgaggctgacattcacgtttcattctgccacactcgggaacggtgatcggggaagcatggggatccgggagaagcacccacaaaactagcatcctcctggaggagctcgggaataggatgagtgataatccacccagaatggaagtgtgtccttactgtaagaagccatttaaacgattaaaatcccacttgccatactgtaagatgataggaccaaccatacctactgatcaaaaagtttatcagtccaagccagctacactcccacgtgctaaaaagatgaaaggaccaatcaaagatttaattaaagctaaagggaaagagttagagacagagaatgaagaaagaaattctaagttggtggtggacaaaccagaacagacagtgaagacctttccactgccagctgttggtttggaaagagcagctactacaaaggcagataaagacatcaagaatccaatccaaccatccttcaaaatgttaaaaaatactaaaccaatgactactttccaagaagaaaccaaggctcagttttacgcatcagagaaaacctctcctaaaagagaacttgccaaagatttgcctaaatcaggagaaagtcgatgtaatccttcagaagctggagcgtctttactggttggctcaatagaaccttctttgtcaaatcaagatagaaaatattcctcaactctacctaatgatgtacaaactacctctggtgatctcaaattggacaaaattgatccccaaagacaggaacttctagtaaaattactagatgtgcctactggtgattgtcatatttctccaaagaatgtcagtgatggggttaaaagggtaagaacattattaagcaatgagagagattccaaaggcagggatcacctctcaggagtccctactgatgttacagttactgagactccagaaaagaacacagaatccctcattttaagccttaaaatgagctcattaggtaaaatccaagtcatggagaaacaagagaaaggacttaccctgggagtagagacgtgtgggagcaaaggaaatgcagagaaaagtatgtctgcaacagaaaagcaggaacggactgtcatgagccatggctgtgagaacttcaacaccagggattcagtcacaggaaaggagtctcaaggggaaagaccacatttaagtttgttcattccgagggagacgacttaccagtttcattctgtatcgcagtcaagtagtcaaagtcttgcctctctagctacaacatttcttcaagaaaagaaagcagaagcccagaatcatcattgtgtccctgatgtaaaggcattaatggagagtcccgagggacagttatctctggagcccaaatctgatagtcagttccaagcatcacacactgggtgccagagccctttatgttcagcccagcgtcacactcctcagagccccttcaccaatcatgctgcagctgctggcaggaagactcttcgcagctgcatggggctggagtggtttccagagctctatcctggttaccttggactaggggtgttgccagggaagcctcagtgttggaatgcaatgacccagaagccacaacttatcagtccccagggggaaagactctcacaaggctggatcaggtgcaacaccaccataaggaagagtggattcggtggcatcacgatgctcttcacaggatacttcgtcctgtgttgtagctggagtttcagacgtctgaaaaaattgtgccgacccctgccctggaagagcacagtacctccatgcattggtgtggcgaagacgactggggattgccgctctaaaacatgtttggattaggaagcacgtttaagtaggagaagccttcgtgacttctctctagtgccttcgtgccctgtgttgcccactgaattgccctgtaacacctaagtgtagtggtagcattaagggatagcttttcagccctcaaggttatcaggagcatttgtatcactgctataaataaagtagtatcacttgtcataatcagggtgctgaaacataatgaaaaggtttaacttagtcacagtaaatattttatatccctgaaaataagttatttaatgagaatagaactatttaatgatccatgagtcctaaaaggatatctgccttgtattgccaagtttaaggcaaaggtgagatcctgtattaataagaagacagcttttttgtttgacattggtaagtaccaagaattctaactcacatatagtaggaaacaacaaaaagtctccactgacttctttgaattagatactgagaatccacaatacagtagtgtggataactttcaagaagccattggaaacatctccacattctgggatgacttgtaaatgtctacagagtaatggaaggaaaggcttccttgtctgctcattgctgccacctgggttgggaaaataattgaagatgttttctcaagtccttcaagaatctcttcttaatgttcagaatagtttaagagcgttgttgaggtaaactgatagctgattattttctgagatttagatctaaacaaactcagcatgacgaggaagcacacttcacagctccagggtgcaatactgatgtaaagttgcctcgtgaggatacatttttcgctcatgtatgcaaaattcctatcagttcatttgcacagccagttccaatcatgtatgtgatcaccagattaaaagcttcatccagaaagacaagactcctcagaacgaatagtagacaagtaagactgctacccacagaagccagtacgcttcaggtgtgaggcggggtaactactcatctcttcacagagccaaggaaagaaaaagaacgtctctaacatgatttaccattttaaacagccttataagttttgtctcttaaaatcatgctgcagaaggagggggtaaaagtcgtgttctgccctgtctgtggcattggagtgccccgctaggtaagaagcaacgcttagatcttgcttccaggcagcagcttgaattcccgaatcttcctgcaaggtgcatacaaatgcagcgtgagaatccatacacgtaatccatattcaccttcccatccatcccgcagaagaggcatggtgacacccaggctactgtccatgcttgagaggacgtatttgaaggttctgttactacaagttgggaatattcacggacatgcctgaataccccggctgtaactcacacgtggtctgtgtaagtggattaacctcggggcggccttgtttaatcctgaataatatctgaaagactgagtttacttgggaatgtgtagtttttctaatgcacattaaaatttattttagctgttaaaaataaaatcattttatta

SEQ ID NO: 118585 - DNA, 3645 bp, Homo sapiens
  Payload ID: 3207
  Gene Symbol: C17orf80
  Gene Name: chromosome 17 open reading frame 80
  Uniprot ID: Q9BSJ5
  ENST ID: ENST00000359042
  CDS Start-End: 210-2039
ctgacgaggttccttggccgggggttgggcaggggcctggggggcttccctggggggcttgtcgccggggccgcctgggctttcaggtcttccgaggctgacattcacgtttcattctgccacactcgggaacggtgatcggggaagcatggggatccgggagaagcacccacaaaactagcatcctcctggaggagctcgggaataggatgagtgataatccacccagaatggaagtgtgtccttactgtaagaagccatttaaacgattaaaatcccacttgccatactgtaagatgataggaccaaccatacctactgatcaaaaagtttatcagtccaagccagctacactcccacgtgctaaaaagatgaaaggaccaatcaaagatttaattaaagctaaagggaaagagttagagacagagaatgaagaaagaaattctaagttggtggtggacaaaccagaacagacagtgaagacctttccactgccagctgttggtttggaaagagcagctactacaaaggcagataaagacatcaagaatccaatccaaccatccttcaaaatgttaaaaaatactaaaccaatgactactttccaagaagaaaccaaggctcagttttacgcatcagagaaaacctctcctaaaagagaacttgccaaagatttgcctaaatcaggagaaagtcgatgtaatccttcagaagctggagcgtctttactggttggctcaatagaaccttctttgtcaaatcaagatagaaaatattcctcaactctacctaatgatgtacaaactacctctggtgatctcaaattggacaaaattgatccccaaagacaggaacttctagtaaaattactagatgtgcctactggtgattgtcatatttctccaaagaatgtcagtgatggggttaaaagggtaagaacattattaagcaatgagagagattccaaaggcagggatcacctctcaggagtccctactgatgttacagttactgagactccagaaaagaacacagaatccctcattttaagccttaaaatgagctcattaggtaaaatccaagtcatggagaaacaagagaaaggacttaccctgggagtagagacgtgtgggagcaaaggaaatgcagagaaaagtatgtctgcaacagaaaagcaggaacggactgtcatgagccatggctgtgagaacttcaacaccagggattcagtcacaggaaaggagtctcaaggggaaagaccacatttaagtttgttcattccgagggagacgacttaccagtttcattctgtatcgcagtcaagtagtcaaagtcttgcctctctagctacaacatttcttcaagaaaagaaagcagaagcccagaatcatcattgtgtccctgatgtaaaggcattaatggagagtcccgagggacagttatctctggagcccaaatctgatagtcagttccaagcatcacacactgggtgccagagccctttatgttcagcccagcgtcacactcctcagagccccttcaccaatcatgctgcagctgctggcaggaagactcttcgcagctgcatggggctggagtggtttccagagctctatcctggttaccttggactaggggtgttgccagggaagcctcagtgttggaatgcaatgacccagaagccacaacttatcagtccccagggggaaagactctcacaagtttctttgttggaacgaagctcaactcatataaggagtttggaaccccctgccggacttacaacctccaacttctctctaatgaggctcttgggagctgtacaaaaaggctggatcaggtgcaacaccaccataaggaagagtggattcggtggcatcacgatgctcttcacaggatacttcgtcctgtgttgtagctggagtttcagacgtctgaaaaaattgtgccgacccctgccctggaagagcacagtacctccatgcattggtgtggcgaagacgactggggattgccgctctaaaacatgtttggattaggaagcacgtttaagtaggagaagccttcgtgacttctctctagtgccttcgtgccctgtgttgcccactgaattgccctgtaacacctaagtgtagtggtagcattaagggatagcttttcagccctcaaggttatcaggagcatttgtatcactgctataaataaagtagtatcacttgtcataatcagggtgctgaaacataatgaaaaggtttaacttagtcacagtaaatattttatatccctgaaaataagttatttaatgagaatagaactatttaatgatccatgagtcctaaaaggatatctgccttgtattgccaagtttaaggcaaaggtgagatcctgtattaataagaagacagcttttttgtttgacattggtaagtaccaagaattctaactcacatatagtaggaaacaacaaaaagtctccactgacttctttgaattagatactgagaatccacaatacagtagtgtggataactttcaagaagccattggaaacatctccacattctgggatgacttgtaaatgtctacagagtaatggaaggaaaggcttccttgtctgctcattgctgccacctgggttgggaaaataattgaagatgttttctcaagtccttcaagaatctcttcttaatgttcagaatagtttaagagcgttgttgaggtaaactgatagctgattattttctgagatttagatctaaacaaactcagcatgacgaggaagcacacttcacagctccagggtgcaatactgatgtaaagttgcctcgtgaggatacatttttcgctcatgtatgcaaaattcctatcagttcatttgcacagccagttccaatcatgtatgtgatcaccagattaaaagcttcatccagaaagacaagactcctcagaacgaatagtagacaagtaagactgctacccacagaagccagtacgcttcaggtgtgaggcggggtaactactcatctcttcacagagccaaggaaagaaaaagaacgtctctaacatgatttaccattttaaacagccttataagttttgtctcttaaaatcatgctgcagaaggagggggtaaaagtcgtgttctgccctgtctgtggcattggagtgccccgctaggtaagaagcaacgcttagatcttgcttccaggcagcagcttgaattcccgaatcttcctgcaaggtgcatacaaatgcagcgtgagaatccatacacgtaatccatattcaccttcccatccatcccgcagaagaggcatggtgacacccaggctactgtccatgcttgagaggacgtatttgaaggttctgttactacaagttgggaatattcacggacatgcctgaataccccggctgtaactcacacgtggtctgtgtaagtggattaacctcggggcggccttgtttaatcctgaataatatctgaaagactgagtttacttgggaatgtgtagtttttctaatgcacattaaaatttattttagctgttaaaaataaaatcattttattatcagcagactcttttatactttatggggcatctacatactacttccgccactcttcataataaaattatttgt

SEQ ID NO: 118586 - DNA, 2075 bp, Homo sapiens
  Payload ID: 3207
  Gene Symbol: C17orf80
  Gene Name: chromosome 17 open reading frame 80
  Uniprot ID: Q9BSJ5
  ENST ID: ENST00000426147
  CDS Start-End: 170-1921
ggggcttccctggggggcttgtcgccggggccgcctgggctttcaggtcttccgaggctgacattcacgtttcattctgccacactcgggaacggtgatcggggaagcatggggatccgggagaagcacccacaaaactagcatcctcctggaggagctcgggaataggatgagtgataatccacccagaatggaagtgtgtccttactgtaagaagccatttaaacgattaaaatcccacttgccatactgtaagatgataggaccaaccatacctactgatcaaaaagtttatcagtccaagccagctacactcccacgtgctaaaaagatgaaaggaccaatcaaagatttaattaaagctaaagggaaagagttagagacagagaatgaagaaagaaattctaagttggtggtggacaaaccagaacagacagtgaagacctttccactgccagctgttggtttggaaagagcagctactacaaaggcagataaagacatcaagaatccaatccaaccatccttcaaaatgttaaaaaatactaaaccaatgactactttccaagaagaaaccaaggctcagttttacgcatcagagaaaacctctcctaaaagagaacttgccaaagatttgcctaaatcaggagaaagtcgatgtaatccttcagaagctggagcgtctttactggttggctcaatagaaccttctttgtcaaatcaagatagaaaatattcctcaactctacctaatgatgtacaaactacctctggtgatctcaaattggacaaaattgatccccaaagacaggaacttctagtaaaattactagatgtgcctactggtgattgtcatatttctccaaagaatgtcagtgatggggttaaaagggtaagaacattattaagcaatgagagagattccaaaggcagggatcacctctcaggagtccctactgatgttacagttactgagactccagaaaagaacacagaatccctcattttaagccttaaaatgagctcattaggtaaaatccaagtcatggagaaacaagagaaaggacttaccctgggagtagagacgtgtgggagcaaaggaaatgcagagaaaagtatgtctgcaacagaaaagcaggaacggactgtcatgagccatggctgtgagaacttcaacaccagggattcagtcacaggaaaggagtctcaaggggaaagaccacatttaagtttgttcattccgagggagacgacttaccagtttcattctgtatcgcagtcaagtagtcaaagtcttgcctctctagctacaacatttcttcaagaaaagaaagcagaagcccagaatcatcattgtgtccctgatgtaaaggcattaatggagagtcccgagggacagttatctctggagcccaaatctgatagtcagttccaagcatcacacactgggtgccagagccctttatgttcagcccagcgtcacactcctcagagccccttcaccaatcatgctgcagctgctggcaggaagactcttcgcagctgcatggggctggagtggtttccagagctctatcctggttaccttggactaggggtgttgccagggaagcctcagtgttggaatgcaatgacccagaagccacaacttatcagtccccagggggaaagactctcacaagtttctttgttggaacgaagctcaactcatataaggagtttggaaccccctgccggacttacaacctccaacttctctctaatgaggctcttgggagctgtacaaaaaggctggatcaggtgcaacaccaccataaggaagagtggattcggtggcatcacgatgctcttcacaggatacttcgtcctgtgttgtagctggagtttcagacgtctgaagctgcagcggtggcgtaagtagtgttgacctggacatcacttaaagctctggaacagcaaagggcgtacagtggagacgactgcaatacatacttaacagtttaaaaatgtataatatttgggacagggagaggggagtgaaaaaaataaagaataaaattattggaatctaaaat

SEQ ID NO: 118587 - DNA, 2129 bp, Homo sapiens
  Payload ID: 3207
  Gene Symbol: C17orf80
  Gene Name: chromosome 17 open reading frame 80
  Uniprot ID: Q9BSJ5
  ENST ID: ENST00000535032
  CDS Start-End: 114-1943
gctgacattcacgtttcattctgccacactcgggaacggtgatcggggaagcatggggatccgggagaagcacccacaaaactagcatcctcctggaggagctcgggaataggatgagtgataatccacccagaatggaagtgtgtccttactgtaagaagccatttaaacgattaaaatcccacttgccatactgtaagatgataggaccaaccatacctactgatcaaaaagtttatcagtccaagccagctacactcccacgtgctaaaaagatgaaaggaccaatcaaagatttaattaaagctaaagggaaagagttagagacagagaatgaagaaagaaattctaagttggtggtggacaaaccagaacagacagtgaagacctttccactgccagctgttggtttggaaagagcagctactacaaaggcagataaagacatcaagaatccaatccaaccatccttcaaaatgttaaaaaatactaaaccaatgactactttccaagaagaaaccaaggctcagttttacgcatcagagaaaacctctcctaaaagagaacttgccaaagatttgcctaaatcaggagaaagtcgatgtaatccttcagaagctggagcgtctttactggttggctcaatagaaccttctttgtcaaatcaagatagaaaatattcctcaactctacctaatgatgtacaaactacctctggtgatctcaaattggacaaaattgatccccaaagacaggaacttctagtaaaattactagatgtgcctactggtgattgtcatatttctccaaagaatgtcagtgatggggttaaaagggtaagaacattattaagcaatgagagagattccaaaggcagggatcacctctcaggagtccctactgatgttacagttactgagactccagaaaagaacacagaatccctcattttaagccttaaaatgagctcattaggtaaaatccaagtcatggagaaacaagagaaaggacttaccctgggagtagagacgtgtgggagcaaaggaaatgcagagaaaagtatgtctgcaacagaaaagcaggaacggactgtcatgagccatggctgtgagaacttcaacaccagggattcagtcacaggaaaggagtctcaaggggaaagaccacatttaagtttgttcattccgagggagacgacttaccagtttcattctgtatcgcagtcaagtagtcaaagtcttgcctctctagctacaacatttcttcaagaaaagaaagcagaagcccagaatcatcattgtgtccctgatgtaaaggcattaatggagagtcccgagggacagttatctctggagcccaaatctgatagtcagttccaagcatcacacactgggtgccagagccctttatgttcagcccagcgtcacactcctcagagccccttcaccaatcatgctgcagctgctggcaggaagactcttcgcagctgcatggggctggagtggtttccagagctctatcctggttaccttggactaggggtgttgccagggaagcctcagtgttggaatgcaatgacccagaagccacaacttatcagtccccagggggaaagactctcacaagtttctttgttggaacgaagctcaactcatataaggagtttggaaccccctgccggacttacaacctccaacttctctctaatgaggctcttgggagctgtacaaaaaggctggatcaggtgcaacaccaccataaggaagagtggattcggtggcatcacgatgctcttcacaggatacttcgtcctgtgttgtagctggagtttcagacgtctgaaaaaattgtgccgacccctgccctggaagagcacagtacctccatgcattggtgtggcgaagacgactggggattgccgctctaaaacatgtttggattaggaagcacgtttaagtaggagaagccttcgtgacttctctctagtgccttcgtgccctgtgttgcccactgaattgccctgtaacacctaagtgtagtggtagcattaagggatagcttttcagccctcaaggttatcaggagcatttgtatcactgctataaataaagtagtatcacttgtcataa

SEQ ID NO: 118588 - DNA, 542 bp, Homo sapiens
  Payload ID: 3207
  Gene Symbol: C17orf80
  Gene Name: chromosome 17 open reading frame 80
  ENST ID: ENST00000585109
  CDS Start-End: 215-542
attatgtcataataatatcatacaagtatttgagttgaatccgtgtaacatattttaaaacaggcggacctatccggcagtggtgcagacggcctgacgaggctgacattcacgtttcattctgccacactcgggaacggtgatcggggaagcatggggatccgggagaagcacccacaaaactagcatcctcctggaggagctcgggaataggatgagtgataatccacccagaatggaagtgtgtccttactgtaagaagccatttaaacgattaaaatcccacttgccatactgtaagatgataggaccaaccatacctactgatcaaaaagtttatcagtccaagccagctacactcccacgtgctaaaaagatgaaaggaccaatcaaagatttaattaaagctaaagggaaagagttagagacagagaatgaagaaagaaattctaagttggtggtggacaaaccagaacagacagtgaagacctttccactgccagctgttggtttggaaagagcagctactacaaaggcagata

SEQ ID NO: 118589 - DNA, 1144 bp, Homo sapiens
  Payload ID: 3207
  Gene Symbol: C17orf80
  Gene Name: chromosome 17 open reading frame 80
  ENST ID: ENST00000582391
  CDS Start-End: 605-1144
gctctgtggggagcttgcaagggcgggtttgttttccgcggcccacgttctaagtctgggggagactctcctgagcggagagggtagggaatcgggtgccggggccggcggagggtcttcctggaaccgcaggaggaaatcctcggtggggctgcgggaacggctgtccctgacccaggagctgccgggccgaccccatccactccgcagaatcagaacagctggcagaatcagaacagctttcagggaaaggaagggtgcggggaggtgggcaggctggtaacgcagcgggaggagggaaaggcggctggagagcgccggaggtgagggtgaggattagtggaactattgaggtcctccttgagcccggaggctggggaggtcttaactctctgctttccggaacctgtgtttctatttggttcagtatcgtgccgcgtttactcactgtgcatgctgccaagtcacctgtctgatcgtgtcctacacaggctgacattcacgtttcattctgccacactcgggaacggtgatcggggaagcatggggatccgggagaagcacccacaaaactagcatcctcctggaggagctcgggaataggatgagtgataatccacccagaatggaagtgtgtccttactgtaagaagccatttaaacgattaaaatcccacttgccatactgtaagatgataggaccaaccatacctactgatcaaaaagtttatcagtccaagccagctacactcccacgtgctaaaaagatgaaaggaccaatcaaagatttaattaaagctaaagggaaagagttagagacagagaatgaagaaagaaattctaagttggtggtggacaaaccagaacagacagtgaagacctttccactgccagctgttggtttggaaagagcagctactacaaaggcagataaagacatcaagaatccaatccaaccatccttcaaaatgttaaaaaatactaaaccaatgactactttccaagaagaaaccaaggctcagttttacgcatcagagaaaacctctcctaaaagagaacttgccaaagatttgcctaaatcaggagaaagtcgatgtaatccttcagaagctggagcgtctttactggttggctcaatagaacct

SEQ ID NO: 118590 - DNA, 531 bp, Homo sapiens
  Payload ID: 3207
  Gene Symbol: C17orf80
  Gene Name: chromosome 17 open reading frame 80
  ENST ID: ENST00000582793
  CDS Start-End: 181-417
attcacgtttcattctgccacactcgggaacggtgatcggggaagcatggggatccgggagaagcacccacaaaactagcatcctcctggaggagctcggtttctttgttggaacgaagctcaactcatataaggagtttggaaccccctgccggacttacaacctccaacttctctctaatgaggctcttgggagctgtacaaaaaggctggatcaggtgcaacaccaccataaggaagagtggattcggtggcatcacgatgctcttcacaggatacttcgtcctgtgttgtagctggagtttcagacgtctgaaaaaattgtgccgacccctgccctggaagagcacagtacctccatgcattggtgtggcgaagacgactggggattgccgctctaaaacatgtttggattaggaagcacgtttaagtaggagaagccttcgtgacttctctctagtgccttcgtgccctgtgttgcccactgaattgccctgtaacacctaagtgtagtggtagcattaagggata

SEQ ID NO: 118591 - DNA, 2049 bp, Homo sapiens
  Payload ID: 3207
  Gene Symbol: C17orf80
  Gene Name: chromosome 17 open reading frame 80
  Uniprot ID: Q9BSJ5
  ENST ID: ENST00000577615
  CDS Start-End: 139-1860
ctcgcctgttcacagccaacggagggctgacattcacgtttcattctgccacactcgggaacggtgatcggggaagcatggggatccgggagaagcacccacaaaactagcatcctcctggaggagctcgggaataggatgagtgataatccacccagaatggaagtgtgtccttactgtaagaagccatttaaacgattaaaatcccacttgccatactgtaagatgataggaccaaccatacctactgatcaaaaagtttatcagtccaagccagctacactcccacgtgctaaaaagatgaaaggaccaatcaaagatttaattaaagctaaagggaaagagttagagacagagaatgaagaaagaaattctaagttggtggtggacaaaccagaacagacagtgaagacctttccactgccagctgttggtttggaaagagcagctactacaaaggcagataaagacatcaagaatccaatccaaccatccttcaaaatgttaaaaaatactaaaccaatgactactttccaagaagaaaccaaggctcagttttacgcatcagagaaaacctctcctaaaagagaacttgccaaagatttgcctaaatcaggagaaagtcgatgtaatccttcagaagctggagcgtctttactggttggctcaatagaaccttctttgtcaaatcaagatagaaaatattcctcaactctacctaatgatgtacaaactacctctggtgatctcaaattggacaaaattgatccccaaagacaggaacttctagtaaaattactagatgtgcctactggtgattgtcatatttctccaaagaatgtcagtgatggggttaaaagggtaagaacattattaagcaatgagagagattccaaaggcagggatcacctctcaggagtccctactgatgttacagttactgagactccagaaaagaacacagaatccctcattttaagccttaaaatgagctcattaggtaaaatccaagtcatggagaaacaagagaaaggacttaccctgggagtagagacgtgtgggagcaaaggaaatgcagagaaaagtatgtctgcaacagaaaagcaggaacggactgtcatgagccatggctgtgagaacttcaacaccagggattcagtcacaggaaaggagtctcaaggggaaagaccacatttaagtttgttcattccgagggagacgacttaccagtttcattctgtatcgcagtcaagtagtcaaagtcttgcctctctagctacaacatttcttcaagaaaagaaagcagaagcccagaatcatcattgtgtccctgatgtaaaggcattaatggagagtcccgagggacagttatctctggagcccaaatctgatagtcagttccaagcatcacacactgggtgccagagccctttatgttcagcccagcgtcacactcctcagagccccttcaccaatcatgctgcagctgctggcaggaagactcttcgcagctgcatggggctggagtggtttccagagctctatcctggttaccttggactaggggtgttgccagggaagcctcagtgttggaatgcaatgacccagaagccacaacttatcagtccccagggggaaagactctcacaaggctggatcaggtgcaacaccaccataaggaagagtggattcggtggcatcacgatgctcttcacaggatacttcgtcctgtgttgtagctggagtttcagacgtctgaaaaaattgtgccgacccctgccctggaagagcacagtacctccatgcattggtgtggcgaagacgactggggattgccgctctaaaacatgtttggattaggaagcacgtttaagtaggagaagccttcgtgacttctctctagtgccttcgtgccctgtgttgcccactgaattgccctgtaacacctaagtgtagtggtagcattaagggatagcttttcagccctcaaggttatcaggagcatttgtatcactgctataaataaagtagtatcacttgtcataatca

SEQ ID NO: 118592 - DNA, 615 bp, Homo sapiens
  Payload ID: 3208
  Gene Symbol: C17orf89
  Gene Name: chromosome 17 open reading frame 89
  Uniprot ID: A1L188
  ENST ID: ENST00000431388
  CDS Start-End: 126-350
aaagcctggccaattaagaagttcaggaaaggttatgggcggaagcgccgacctatcaagctgtttgacaccggaagaggacggacctaagatggcggcctccagggggctgggaatagccgctcatgtcggctaacggagcggtgtggggccgcgtgcgaagccgcctccgcgccttccccgagcggctggccgcctgcggggccgaggccgcggcgtacggcaggtgcgtgcaggcctccacggccccgggcggccgcctgagtaaggacttctgcgcgcgggagttcgaggccctgcggagctgcttcgccgctgcggccaagaagacgctggagggaggctgttaggagggactctgagcttcacacctgtctgctgccatgggtgcagagccctagtcctgatggcccctggtggcacatatcgaatgcctagggcagaaaggaagtgggaatggcgaagatgtgacattcctcggtgttagatcctgttttttcttaacaagttgaggcgtgggtagagcaggaattggttttccagcattgtgtccgtaaacctgagttagaataagatgtaacggaagccacgataaagactcggtcaaatcctgca

SEQ ID NO: 118593 - DNA, 365 bp, Homo sapiens
  Payload ID: 3208
  Gene Symbol: C17orf89
  Gene Name: chromosome 17 open reading frame 89
  ENST ID: ENST00000576002
  CDS Start-End: 1-239
gcggccgcctgagtaaggacttctgcgcgcgggagttcgaggccctgcggagctgcttcgccgctgcggtaggccaagaagacgctggagggaggctgttaggagggactctgagcttcacacctgtctgctgccatgggtgcagagccctagtcctgatggcccctggtggcacatatcgaatgcctagggcagaaaggaagtgggaatggcgaagatgtgacattcctcggtgttagatcctgttttttcttaacaagttgaggcgtgggtagagcaggaattggttttccagcattgtgtccgtaaacctgagttagaataagatgtaacggaagccacgataaagactcggtcaaatcctg

SEQ ID NO: 118594 - DNA, 3719 bp, Homo sapiens
  Payload ID: 3209
  Gene Symbol: C17orf96
  Gene Name: chromosome 17 open reading frame 96
  Uniprot ID: A6NHQ4
  ENST ID: ENST00000613024
  CDS Start-End: 927-2066
taggggccattcacggcccgctagaatccctgctgtgcaaagcttgtaaacaaccattgcctcatttcatctttcccctaaacattatttctgagattcatctacgttgattcacatagctcttttagtcccaagagggcagatatgaaccgtcccattttacagatgcaaaaccgtgactgctcgggaaaaaacgagtggctttgcgacgacgaaatcccaggacgccaccgggccacgtgcggcggcgcatctggccgctcgcgatcccacccgcgcacgctccctcccgcgctccctcccagccgccgccgcgccgggtccacgtgtgtgtgtctgtgtgcggaatggggacgggggcggtgccgccggaggggtggggtccgggctaacgtcacgggcggtgcggcccaatcagcggcgggctcgcggccccggcgctggtattggggcagcgagggggcagttctctataacgcggtctccgggagccagcggggaagaaagaaaccgagcgggcggaaggcgccctccccgccgcctgggcccgggcaccgggtgccgggcccggggtccttcccgcctcccgcggccgccggccgctttgtttcccctgcctctgcgcttcgggcgactcgagagggtctcccgccggggttgcgaaggggacgcggcggcagaagggcggccgaccccgccgggactcacagggacccaggagtccggccgccgggagggccgcgtgaggagagcgaagagggagcccgagctctgcggccccgggtggcgggccgggggcgcccgtgagcagagacctccccgtcgacggggggcgatgttcccctcacccgtgggctcttcgggcagccagggcatcccgccgctgggacctggacccgctcagtgggcacccctcaggctgctccatggagaccctgtgccctgcgccccgcctggcagtgccggcgtccccgcgagggtcgccctgctcccccacgccccggaagccgtgtcgggggacccaggaattctctccgctgtgcctgcgtgccctcgccttctgcgcccttgccaagccccgggcgtcctctctgggcccggggcctggggagctggcggcgcggtccccagtgctgcggggccctcaggcccccctgcgccctggcggctgggccccggatggcctgaagcacctctgggcaccgaccgggcggcccggcgttcctaacaccgccgccggcgaggatgcggacgtcgcagcgtgcccccgccgcggagaggaggaagagggcggaggcggtttcccgcacttcggcgttcgctcctgtgcacctccgggccgctgccctgcgcccccgcaccctcgggaatctacgaccagcttcgcctcggccccgcctcgcccggccccgggtctcgagcctcagcgtggcccagccgccagcccgcctcaggaacccagttcccggcctccgtcgccacctgcgggcctctccaccgagcccgcgggtcccgggacggcgccgcggccgttcctgcccggccagcctgccgaagtcgatggaaaccccccgccggccgcccccgaggctccagcggccagcccctcgacggccagcccggctccggccgcacccggagatctccgccaggaacatttcgatcgtctgatccgccggtcgaaactttggtgttacgcgaagggcttcgccttggacactccgagtttgcgccgggggccagagcggccgcctgcgaaagggccggctcggggagccgccaagaaacgccggctgccggcgccccctccgcgcaccgcgcagccccgccgccctgcaccgacgctccccaccacgagcaccttcagcctcctcaactgcttcccctgccccccggccctggtggtgggggaagacggagacctaaagccggcatcctcgcttcgcctccagggagactctaagcccccgcccgcccacccgctgtggaggtggcagatggggggtcccgctgtccctgagccccctggcctcaaattctgggggatcaacatggatgaaagctgaccgtgggacttctgccaaaggggaaaagttgggaccatggccaaaccgcgggcttgaggagggagccccgtttctcacatttgtccccttcctttacattttaggagctgtgggcagagggacctaaataacagtgatcttcattcaagcacctaagttttcggggtgacagtccctccccctcatcctttgcagaggaacccagggctggagtcgggagaaggctgatgacatagattccaatccctgcctccttccatctcggaccgttggaggcagggcctgcaccccagtgggagcaaaggaggccaccgctcaaagacacccccccacccaaaaaaaaggggagaagagagagacctcggtgatggacaaaccggttgttactgtgtctgtgggcgagcctggggtgcggggctgtggtgggggtggggagatgattggcagctccctgggggcatcccccacccccactgtccaggcctttaaccctttgctcccctcaggccttccctaacgctccaagcaccgctggagcctttaatgggtgagggaacttgggtaagaggaagatcacccccttcctgtcccctttctaggccccctcaagtgcaggtgacccttaattggtgagatcttcagcctcagccgccgacctttcccttttgtccagttttggagttcccgttttttccttgtttgctttccgagtgtaaggtctggccggtgagaaagatttcccccaaccttgattaatcagccccctcccccaacttacttcccttaggacgggtagggctgagggacctcctctcctggaaagtgcttactttgcctggggaaggggctagacactgtcccagggaaagtaatagaaggtggaagaaatcaataaaatcagaccaaacaagtcgcctttcgagggcctccaccgatttatggatgagagggggtggaggtggaaggcaggcccaagtccattctttggacacccaaactcagcccccttaaagagtggaaacaaaacaagctgcactttgcagaggtggtaaatgaaaggactcttggcctaacttcaagagtcccctggggtttgaaggggcaaagtttgagtctggatggaacctgggctgaggtaccttaagcttccccccgcaacaccccagcctcagggattgcgggagttgtcagagatctgatggatccgaaaggggcagggccaggggattaggtttggggtcagaggttctgttttccaggggaggggtgagataggcctggatcatgccctctgccatgccctccagctaggaggatcttgagtcagagaggattggaagtgctttctcctccacccaggtgaggtcaggggagcttaggtcttagggagatggcaagttgaggtatgaagggaagctggggcttttggagctgccgaacaactgagggacccagtgcgccttccatcccgcactagtgaatagcgccccctcttcccccgaaaacgaggtgcgagaggaacaattcccacgctggggaaggacttgtctccttttctgtgaaaatgctttgtaaaaagttgttattgtttgcatagagcagattcttgagaaaaactgttttggaccataaaagttttgtttgttttaaaaa

SEQ ID NO: 118595 - DNA, 3719 bp, Homo sapiens; identical to SEQ ID NO: 118594
  Payload ID: 3209
  Gene Symbol: C17orf96
  Gene Name: chromosome 17 open reading frame 96
  Uniprot ID: A6NHQ4
  ENST ID: ENST00000621654
  CDS Start-End: 927-2066

SEQ ID NO: 118596 - DNA, 1839 bp, Homo sapiens
  Payload ID: 3210
  Gene Symbol: C17orf97
  Gene Name: chromosome 17 open reading frame 97
  Uniprot ID: Q6ZQX7
  ENST ID: ENST00000360127
  CDS Start-End: 17-1288
agcaggggtggtcgccatggagacgcgtggccctggcctggcggtccgcgctgagagtcgccgattagtcggcatcgggcctcgggcgcccccggggcgggttgggttgcagcccagcgggcggctggaccgccgcggtggggcggggacaatggggtacaaggacaacgacggcgaggaggaggagcgggagggcggcgccgcgggcccgcgggggtctagactgccccccatcacaggcggcgcctccgagctggccaaacggaaggtgaagaagaaaaaaaggaagaagaagaccaaggggtctggcaagggggacgataaacatcagagtcagagcctgaagagccagccgctttcttcctcctttcatgacatcttaagtccttgcaaagagcgtggcccgaaaccagagcacagacagagcaaagtggaaaagaagcacctcccttctgactcctccaccgtcagcctccccgactttgccgaaatagagaaccttgcgaatcggatcaacgaaagtctgcgttgggatggaattcttgctgacccggaggcagagaaggaaaggattcgcatctataaactgaatcggagaaaacggtaccggtgcttggccctcaagggcttccaccccgaccccgaggccctcaagggcttccaccccgaccccgacgccctcaagggcttccaccccgaccccgaggccctcaagggcttccaccccgaccccgaggccctcaagggcatccaccccgaccccgaggctctcaagggcttccaccccgaccccgaggccctcaagggcttccaccccgaccctgaggccctcaagggtttccacactgaccccgaggccctcaagggtttccacattgaccccgaggccctcaagggcttccaccccgaccccaaggccctcaagggcttccaccccgaccccaaggccctcaagggtttccacactgaccccgaggccctcaagggcttccaccccgaccccaaggccctcaagggcttccaccccgaccccgaggccctcaagggcttccaccccgaccccgaggccctcaagggcttccaccccgaccccgaggccctcaagggcttccacactgaccccaatgccgaggaggcccctgagaacttaccctacctctcggacaaagatggcagctccagccacaggcagcccacgtcgaaagccgagtgccccaatctctgttttgaaggaaaccttaccccaaagcttctacactctgacttagctcctactctgctggagtgaaaatctacccacgacgctcacaaacttataattcctcctcaccacaagtttatgtgttaaaaaccatcatcataaaaggaaatgagacccgtatctgaaggaaacagatgttcggtacacggacgacgccgactctcccatcaccaagctgccctcggttgcccaggagagccacagtgccttgagaacataagcaatttagtgaacagagttcttttcagaatttcctttttcttaagtaagcatctctgttacttaatttctcaccacagctagatgtctataatctgccccaaaaagaaaagaaagcgtgtagatgatttacctcttaagtctcaatctcatggtgaaactcctcacacggtacctgcttctgttggccggaggacgatgccctgaacctcttggagcctttttctgttttaattaaatgcatggcctgcctttatatggcctcaaataagtgggttccagaactccatccctgggaagttaccatgggaagtcccaagaggaatactgcttctttcataaacatggtcctctcctaa

SEQ ID NO: 118597 - DNA, 878 bp, Homo sapiens
  Payload ID: 3210
  Gene Symbol: C17orf97
  Gene Name: chromosome 17 open reading frame 97
  ENST ID: ENST00000491373
  CDS Start-End: 1-630
ggcctggcggtccgcgctgagagtcgccgattagtcggcatcgggcctcgggcgcccccggggcgggttgggttgcagcccagcgggcggctggaccgccgcggtggggcggggacaatggggtacaaggacaacgacggcgaggaggaggagcgggagggcggcgccgcgggcccgcgggggtctagactgccccccatcacaggcggcgcctccgagctggccaaacggaaggtgaagaagaaaaaaaggaagaagaagaccaaggggtctggcaagggggacgataaacatcagagtcagagcctgaagagccagccgctttcttcctcctttcatgacatcttaagtccttgcaaagagcgtggcccgaaaccagagcacagacagagcaaagtggaaaagaagcacctcccttctgactcctccaccgtcagcctccccgactttgccgaaatagagaaccttgcgaatcggatcaacgaaagtctgcgttgggatggaattcttgctgacccggaggcagagaaggaaaggattcgcatctataaactgaatcggagaaaacgatggcagctccagccacaggcagcccacgtcgaaagccgagtgccccaatctctgttttgaaggaaaccttaccccaaagcttctacactctgacttagctcctactctgctggagtgaaaatctacccacgacgctcacaaacttataattcctcctcaccacaagtttatgtgttaaaaaccatcatcataaaaggaaatgagacccgtatctgaaggaaacagatgttcggtacacggacgacgccgactctcccatcaccaagctgccctcggttgcccaggagagccacagtgccttgagaaca

SEQ ID NO: 118598 - DNA, 736 bp, Homo sapiens
  Payload ID: 3210
  Gene Symbol: C17orf97
  Gene Name: chromosome 17 open reading frame 97
  ENST ID: ENST00000571106
  CDS Start-End: 7-468
gtcgccatggagacgcgtggccctggcctggcggtccgcgctgagagtcgccgattagtcggcatcgggcctcgggcgcccccggggcgggttgggttgcagcccagcgggcggctggaccgccgcggtggggcggggacaatggggtacaaggacaacgacggcgaggaggaggagcgggagggcggcgccgcgggcccgcgggggtctagactgccccccatcacaggcggcgcctccgagctggccaaacggaaggtgaagaagaaaaaaaggaagaagaagaccaaggggtctggcaagggggacgggatcttgctctggggaaagccagctgcagtgttgtgtgggctgcctgaggaaaggtgccctccggaaagaaatgatgtctccgcccaacagcatggtggacctgagtcctgctaccagccacatgagtgtgcttggaagcaggtggagcccagttgagccttgaggtgcctccctctgtgagagaccccaagccggagacatccggccaagaggcacccagattcctgccccacagaaactgatacaataacgttgtttaaagccactacatttggaggtaatcttgttacacagcaataactgactaatacagtcggcctcttccatcagtcacgattctcagtgagttgtctcgcccttaatctgagggctggaaagcccgaaacccaacattgtcgtaagaaactgcgttacccaagacacc

SEQ ID NO: 118599 - DNA, 499 bp, Homo sapiens
  Payload ID: 3210
  Gene Symbol: C17orf97
  Gene Name: chromosome 17 open reading frame 97
  ENST ID: ENST00000575151
  CDS Start-End: 1-21
gctcctactctgctggagtgaaaatctacccacgacgctcacaaacttataattcctcctcaccacaagtttatgtgttaaaaaccatcatcataaaaggaaatgagacccgtatctgaaggaaacagatgttcggtacacggacgacgccgactctcccatcaccaagctgccctcggttgcccaggagagccacagtgccttgagaacataagcaatttagtgaacagagttcttttcagaatttcctttttcttaagatgaatagccttggaagatagagatcgtgtctccctccagagcaaagggcagattagcttcaatgatgacagaagatctcggttcccgggctcagagctccgctgctgtaacgtaagcccttctgtcctcatgtcacctagagcctcttcctgtcaccctgtgggaagtgattctgaggaaaccaggacaattgcaaacactctggctactgctttgctgtgactaataaacatccttt

SEQ ID NO: 118600 - DNA, 632 bp, Homo sapiens
  Payload ID: 3211
  Gene Symbol: C17orf98
  Gene Name: chromosome 17 open reading frame 98
  Uniprot ID: A8MV24
  ENST ID: ENST00000614158
  CDS Start-End: 67-531
aggggtgtccccatctagggtcctcatcccccaccagaaaggccctccgaggctacggtggttgggatggcgtacctgagcgagtgtcgcctgcgactggagaaaggctttatcttggacggggtggctgtgagcaccgctgcccgcgcttatgggcgctctaggcccaagctgtggtcggcgattccgccctacaacgcgcagcaggactaccacgcccgcagctacttccagagtcacgtggttccgccccttttgcggaaaactgatcaggatcatggcggtacaggaagggatggctggatagtagactacatccacatcttcgggcaaggacaaagatacctcaacaggagaaattgggcagggacagggcattctctccagcaggtgactgggcatgaccactacaatgctgatctgaaaccgatcgatgggttcaatggaaggtttggctaccgcaggaacactccagccctccgtcagagcacgtccgtcttcggagaggtcacccacttccctctgttctaacagcatcttttcccttcatagccatcgacctgaatttctaagacaaatgtttagatgaactcttagtgttattttacgttaaaaaaattaatttgtgtctc

SEQ ID NO: 118601 - DNA, 632 bp, Homo sapiens; identical to SEQ ID NO: 118600
  Payload ID: 3211
  Gene Symbol: C17orf98
  Gene Name: chromosome 17 open reading frame 98
  Uniprot ID: A8MV24
  ENST ID: ENST00000619585
  CDS Start-End: 67-531

SEQ ID NO: 118602 - DNA, 984 bp, Homo sapiens
  Payload ID: 3212
  Gene Symbol: C17orf99
  Gene Name: chromosome 17 open reading frame 99
  Uniprot ID: Q6UX52
  ENST ID: ENST00000340363
  CDS Start-End: 56-853
gccaggaactaggaggttctcactgcccgagcagaggccctacacccaccgaggcatggggctccctgggctgttctgcttggccgtgctggctgccagcagcttctccaaggcacgggaggaagaaattacccctgtggtctccattgcctacaaagtcctggaagttttccccaaaggccgctgggtgctcataacctgctgtgcaccccagccaccaccgcccatcacctattccctctgtggaaccaagaacatcaaggtggccaagaaggtggtgaagacccacgagccggcctccttcaacctcaacgtcacactcaagtccagtccagacctgctcacctacttctgctgggcgtcctccacctcaggtgcccatgtggacagtgccaggctacagatgcactgggagctgtggtccaagccagtgtctgagctgcgggccaacttcactctgcaggacagaggggcaggccccagggtggagatgatctgccaggcgtcctcgggcagcccacctatcaccaacagcctgatcgggaaggatgggcaggtccacctgcagcagagaccatgccacaggcagcctgccaacttctccttcctgccgagccagacatcggactggttctggtgccaggctgcaaacaacgccaatgtccagcacagcgccctcacagtggtgcccccaggtggtgaccagaagatggaggactggcagggtcccctggagagccccatccttgccttgccgctctacaggagcacccgccgtctgagtgaagaggagtttggggggttcaggatagggaatggggaggtcagaggacgcaaagcagcagccatgtagaatgaaccgtccagagagccaagcacggcagaggactgcaggccatcagcgtgcactgttcgtatttggagttcatgcaaaatgagtgtgttttagctgctcttgccacaaaaaaaaaaaaaaaaaaaaaa

SEQ ID NO: 118603 - DNA, 568 bp, Homo sapiens
  Payload ID: 3212
  Gene Symbol: C17orf99
  Gene Name: chromosome 17 open reading frame 99
  ENST ID: ENST00000591995
  CDS Start-End: 1-568
cttatcgcccttacctctcttacagctgccagcagcttctccaaggcacgggaggaagaaattacccctgtggtctccattgcctacaaagtcctggaagttttccccaaaggccgctgggtgctcataacctgctgtgcaccccagccaccaccgcccatcacctattccctctgtggaaccaagaacatcaaggtggccaagaaggtggtgaagacccacgagccggcctccttcaacctcaacgtcacactcaagtccagtccagacctgctcacctacttctgctgggcgtcctccacctcaggtgcccatgtggacagtgccaggctacagatgcactgggagctgtggtccaagccagtgtctgagctgcgggccaacttcactctgcaggacagaggggcaggccccagggtggagatgatctgccaggcgtcctcgggcagcccacctatcaccaacagcctgatcgggaaggatgggcaggtccacctgcagcagagaccatgccacaggcagcctgccaacttctccttcctgccgagccagacatcggactggttct

SEQ ID NO: 118604 - DNA, 694 bp, Homo sapiens
  Payload ID: 3212
  Gene Symbol: C17orf99
  Gene Name: chromosome 17 open reading frame 99
  ENST ID: ENST00000586029
  CDS Start-End: 1-454
ccagccaccaccgcccatcacctattccctctgtggaaccaagaacatcaaggtggccaagaaggtggtgaagacccacgagccggcctccttcaacctcaacgtcacactcaagtccagtccagacctgctcacctacttctgctgggcgtcctccacctcaggtgcccatgtggacagtgccaggctacagatgcactgggagctgtggtccagacagaggggcaggccccagggtggagatgatctgccaggcgtcctcgggcagcccacctatcaccaacagcctgatcgggaaggatgggcaggtccacctgcagcagagaccatgccacaggcagcctgccaacttctccttcctgccgagccagacatcggactggttctggtgccaggctgcaaacaacgccaatgtccagcacagcgccctcacagtggtgcccccaggtggtgaccagaagatggaggactggcagggtcccctggagagccccatccttgccttgccgctctacaggagcacccgccgtctgagtgaagaggagtttggggggttcaggatagggaatggggaggtcagaggacgcaaagcagcagccatgtagaatgaaccgtccagagagccaagcacggcagaggactgcaggccatcagcgtgcactgttcgtatttggagttcatgcaaaatgagtgt

SEQ ID NO: 118605 - DNA, 703 bp, Homo sapiens
  Payload ID: 3213
  Gene Symbol: C18orf21
  Gene Name: chromosome 18 open reading frame 21
  ENST ID: ENST00000269194
  CDS Start-End: 372-703
ccggacaccaacgacggggacgctgggaagccgacttccggcgccctattttctcacctggttcccgcggcgagccagcggcagcggcggcggcgatgagacagaagcactaccttgaggctgcagcgcggggactgcacgacagctgcccgggccaagcccgctacctcctgtaagaggactggaggggaagcgggaggcgagcggatgataagagcacttttgaagaaacgtgtccatactgtttccagctgttggttctggataactctcgagtgcgtctcaaacccaaagccaggttgacacccaaaatacagaaacttcttaatcgagaagcgagaaactatacactcagttttaaagaagcaaaaatggtgaaaaagttcaaagactccaaaagtgtattgttgatcacttgtaaaacatgcaacagaacagtgaaacatcatggtaaaagtagaagctttgtgtcaacattgaagagcaatcctgccactcctacaagtaaactcagcctgaagacaccagagagaaggactgcaaacccaaatcatgacatgtctggctcgaaaggcaagagcccagcatcggttttcagaacacctacatctggacagtcagtatctacttgctcctcaaagaacaccagcaaaacaaagaaacacttctctcaactaaaaatgttacttagtcagaatgaatc

SEQ ID NO: 118606 - DNA, 958 bp, Homo sapiens
  Payload ID: 3213
  Gene Symbol: C18orf21
  Gene Name: chromosome 18 open reading frame 21
  Uniprot ID: Q32NC0
  ENST ID: ENST00000333234
  CDS Start-End: 288-686
gggccaagcccgctacctcctgtaagaggactggaggggaagcgggaggcgagcgggtaggtgttcctttgctcctcacaagtctctttctcttttacagctgggcctacacttcgtcgcacgatgataagagcacttttgaagaaacgtgtccatactgtttccagctgttggttctggataactctcgagtgcgtctcaaacccaaagccaggttgacacccaaaatacagaaacttcttaatcgagaagcgagaaactatacactcagttttaaagaagcaaaaatggtgaaaaagttcaaagactccaaaagtgtattgttgatcacttgtaaaacatgcaacagaacagtgaaacatcatggtaaaagtagaagctttgtgtcaacattgaagagcaatcctgccactcctacaagtaaactcagcctgaagacaccagagagaaggactgcaaacccaaatcatgacatgtctggctcgaaaggcaagagcccagcatcggttttcagaacacctacatctggacagtcagtatctacttgctcctcaaagaacaccagcaaaacaaagaaacacttctctcaactaaaaatgttacttagtcagaatgaatcccaaaagattccaaaggtggacttcagaaatttcttatcttctctgaagggtggacttttaaaataagaaatgcctgatgtcaattctgaaactaaagttggtaaaacaactttttaaactcttattcattttttgaatacatggaaactagatctgaatgcaaacttttcttggcatccttcagtgtttatggggaaaatacctcattagtgtgaatacctgaaacctgcctacctcataggacagctgtgaggatcaaaaaatatatgaaagttccttgtagatacatatctatagatatatatgtgtatgtatataaagatagatatatacattga

SEQ ID NO: 118607 - DNA, 1581 bp, Homo sapiens
  Payload ID: 3213
  Gene Symbol: C18orf21
  Gene Name: chromosome 18 open reading frame 21
  Uniprot ID: Q32NC0
  ENST ID: ENST00000592875
  CDS Start-End: 647-1309
tggtgcttgcacaacattgtaaatttactaaacgccactgaattgttcaccttaaaatggtcaatattacgttatgtgaatttcactttaattacaaaaagagaaacgctagcgtttacgcaggcggagggcaggctggactggggacgctcctcccggccgcctcgttgctggcagcgcttccgcccgccggcgcaccagtcagtaccgcgcccggcgaatgtggagggcgaagctgcggcagggcaatcacaaaagggctgtcagagaggaggcgaggcgggaggaagatggagaggcgggtgggagcctcacctttggactctatcgccacagcccggtctagccgctacgcccgagctcaagtctgactcgaaactccgctgggtgcctgagaggacccggcaggccaaggggtggaactgagggggcggggacgcggcgggcgggtggggccgcctcccggctgggcacgcctccaagccagactggacgcgaaggaaaccggaacctgtctgcctacggtgcctgtttccggaagcagcttgagtccggacaccaacgacggggacgctgggaagccgacttccggcgccctattttctcacctggttcccgcggcgagccagcggcagcggcggcggcgatgagacagaagcactaccttgaggctgcagcgcggggactgcacgacagctgcccgggccaagcccgctacctcctctgggcctacacttcgtcgcacgatgataagagcacttttgaagaaacgtgtccatactgtttccagctgttggttctggataactctcgagtgcgtctcaaacccaaagccaggttgacacccaaaatacagaaacttcttaatcgagaagcgagaaactatacactcagttttaaagaagcaaaaatggtgaaaaagttcaaagactccaaaagtgtattgttgatcacttgtaaaacatgcaacagaacagtgaaacatcatggtaaaagtagaagctttgtgtcaacattgaagagcaatcctgccactcctacaagtaaactcagcctgaagacaccagagagaaggactgcaaacccaaatcatgacatgtctggctcgaaaggcaagagcccagcatcggttttcagaacacctacatctggacagtcagtatctacttgctcctcaaagaacaccagcaaaacaaagaaacacttctctcaactaaaaatgttacttagtcagaatgaatcccaaaagattccaaaggtggacttcagaaatttcttatcttctctgaagggtggacttttaaaataagaaatgcctgatgtcaattctgaaactaaagttggtaaaacaactttttaaactcttattcattttttgaatacatggaaactagatctgaatgcaaacttttcttggcatccttcagtgtttatggggaaaatacctcattagtgtgaatacctgaaacctgcctacctcataggacagctgtgaggatcaaaaaatatatgaaagttccttgtagatacatatctatagatatatatgtgtatgtatataaagatagatatatacattga

SEQ ID NO: 118608 - DNA, 656 bp, Homo sapiens
  Payload ID: 3213
  Gene Symbol: C18orf21
  Gene Name: chromosome 18 open reading frame 21
  ENST ID: ENST00000587873
  CDS Start-End: 391-656
ttttctcacctggttcccgcggcgagccagcggcagcggcggcggcgatgagacagaagcactaccttgaggctgcagcgcggggactgcacgacagctgcccgggccaagcccgctacctcctgtaagaggactggaggggaagcgggaggcgagcgggtaggtgttcctttgctcctcacaagtctctttctcttttacagctgggcctacacttcgtcgcacgatgataagagcacttttgaagaaacgtgtccatactgtttccagctgttggttctggataactctcgagtgcgtctcaaacccaaagccaggttgacacccaaaatacagaaacttcttaatcgagaagcgagaaactatacactcagttttaaagaagcaaaaatggtgaaaaagttcaaagactccaaaagtgtattgttgatcacttgtaaaacatgcaacagaacagtgaaacatcatggtaaaagtagaagctttgtgtcaacattgaagagcaatcctgccactcctacaagtaaactcagcctgaagacaccagagagaaggactgcaaacccaaatcatgacatgtctggctcgaaaggcaagagcccagcatcggttttcagaacacctacatctggacagtcagtatctacttgctcctc

SEQ ID NO: 118609 - DNA, 1059 bp, Homo sapiens
  Payload ID: 3213
  Gene Symbol: C18orf21
  Gene Name: chromosome 18 open reading frame 21
  Uniprot ID: Q32NC0
  ENST ID: ENST00000610527
  CDS Start-End: 381-779
agcttgagtccggacaccaacgacggggacgctgggaagccgacttccggcgccctattttctcacctggttcccgcggcgagccagcggcagcggcggcggcgatgagacagaagcactaccttgaggctgcagcgcggggactgcacgacagctgcccgggccaagcccgctacctcctgtaagaggactggaggggaagcgggaggcgagcggatgataagagcacttttgaagaaacgtgtccatactgtttccagctgttggttctggataactctcgagtgcgtctcaaacccaaagccaggttgacacccaaaatacagaaacttcttaatcgagaagcgagaaactatacactcagttttaaagaagcaaaaatggtgaaaaagttcaaagactccaaaagtgtattgttgatcacttgtaaaacatgcaacagaacagtgaaacatcatggtaaaagtagaagctttgtgtcaacattgaagagcaatcctgccactcctacaagtaaactcagcctgaagacaccagagagaaggactgcaaacccaaatcatgacatgtctggctcgaaaggcaagagcccagcatcggttttcagaacacctacatctggacagtcagtatctacttgctcctcaaagaacaccagcaaaacaaagaaacacttctctcaactaaaaatgttacttagtcagaatgaatcccaaaagattccaaaggtggacttcagaaatttcttatcttctctgaagggtggacttttaaaataagaaatgcctgatgtcaattctgaaactaaagttggtaaaacaactttttaaactcttattcattttttgaatacatggaaactagatctgaatgcaaacttttcttggcatccttcagtgtttatggggaaaatacctcattagtgtgaatacctgaaacctgcctacctcataggacagctgtgaggatcaaaaaatatatgaaagttccttgtagatacatatctatagatatatatgtgtatgtatataaagatagatatatacattgagtagtggc

SEQ ID NO: 118610 - DNA, 856 bp, Homo sapiens
  Payload ID: 3213
  Gene Symbol: C18orf21
  Gene Name: chromosome 18 open reading frame 21
  ENST ID: ENST00000618334
  CDS Start-End: 105-497
agcttgagtccggacaccaacgacggggacgctgggaagccgacttccggcgccctattttctcacctggttcccgcggcgagccagcggcagcggcggcggcgatgagacagaagcactaccttgaggctgcagcgcggggactgcacgacagctgcccgggccaagcccgctacctcctctgggcctacacttcgtcgcacgatgataagagcacttttgaagaaacgtgtccatactgtttccagctgttggttctggataactctcgagtgcgtctcaaacccaaagccaggttgacacccaaaatacagaaacttcttaatcgagaagcgagaaactatacactcagttttaaagaagcaaaaatggtgaaaaagttcaaagactccaaaagtgtattgaacacctacatctggacagtcagtatctacttgctcctcaaagaacaccagcaaaacaaagaaacacttctctcaactaaaaatgttacttagtcagaatgaatcccaaaagattccaaaggtggacttcagaaatttcttatcttctctgaagggtggacttttaaaataagaaatgcctgatgtcaattctgaaactaaagttggtaaaacaactttttaaactcttattcattttttgaatacatggaaactagatctgaatgcaaacttttcttggcatccttcagtgtttatggggaaaatacctcattagtgtgaatacctgaaacctgcctacctcataggacagctgtgaggatcaaaaaatatatgaaagttccttgtagatacatatctatagatatatatgtgtatgtatataaagatagatatatacattgagtagtggc

SEQ ID NO: 118611 - DNA, 668 bp, Homo sapiens
  Payload ID: 3214
  Gene Symbol: C18orf25
  Gene Name: chromosome 18 open reading frame 25
  ENST ID: ENST00000587591
  CDS Start-End: 231-668
agatattggtgccgctgcccgagaagagctcagccgagtctccccgagcccagctatcggcatccgcgaaaaagcggggagagaagggcacgggctctccgctggagcgactctgggattcagacaccgcaagctgctttcggaagggcttcaggagggggttgctttcctgttgcatctttgatatcatttcctagactctactccatgatttaacttgaaattctgaaatgaagatggaggaggcagtgggaaaagttgaagaactcattgagtccgaagccccaccaaaagcatctgaacaagagacagccaaggaggaagatggatctgtagaactggaatctcaagttcagaaagatggtgtagcggattctacagttatttcttcaatgccctgcttgttgatggaactgagaagggactcttctgagtctcagttagcatccacagagagtgacaagcctacaactggccgagtttatgagagtgactcctctaatcactgcatgctttccccttcctctagtggtcacctggctgattcagatacgttgtcttccgcagaagagaatgaaccctctcaggcagaaacggcggtagaaggagacccttcaggagtgtctggtgccacagttgggcgcaagtctaggcggtcccgatctgaa

SEQ ID NO: 118612 - DNA, 586 bp, Homo sapiens
  Payload ID: 3214
  Gene Symbol: C18orf25
  Gene Name: chromosome 18 open reading frame 25
  ENST ID: ENST00000588730
  CDS Start-End: 277-586
agatattggtgccgctgcccgagaagagctcagccgagtctccccgagcccagctatcggcatccgcgaaaaagcggggagagaagggcacgggctctccgctggagcgactctgggattcagacaccgcaagctgctttcggaagggcttcaggaggggaagagaatgaaccctctcaggcagaaacggcggtagaaggagacccttcaggagtgtctggtgccacagttgggcgcaagtctaggcggtcccgatctgaaagtgaaacttccactatggctgccaagaaaaaccggcaatccagtgataaacagaatggccgagtcgccaaggttaaaggtcatcggagccaaaagcacaaggagaggatcaggctactgaggcagaaacgggaggctgctgcaaggaagaaatataacctgctgcaggacagtagtaccagtgatagtgacctgacttgtgactcaagcacgagctcatcagatgatgatgaagaggtttcagggagcagcaagacaatcactgcagagataccagatggacctccagttgtagctcattatgatatgtctgacaccaactctg

SEQ ID NO: 118613 - DNA, 2329 bp, Homo sapiens
  Payload ID: 3214
  Gene Symbol: C18orf25
  Gene Name: chromosome 18 open reading frame 25
  ENST ID: ENST00000615553
  CDS Start-End: 316-1143
ggacgactgaagggacttggtggtagaggctgcggaggcggcgaggttcactttggtcccggcaggggctctgaccgcgacccactgctcgctgccggggcttgttccgaggaggagaaggcggcggtggccgtcgcgtcctgagtcaccgcagcggggaagagtcccggccgggggttcggtgcgtgccccgacggggcgcgcgcgaagcgagcgagaaggcacggagtcgccgcggagcgcaggttgctttcctgttgcatctttgatatcatttcctagactctactccatgatttaacttgaaattctgaaatgaagatggaggaggcagtgggaaaagttgaagaactcattgagtccgaagccccaccaaaagcatctgaacaagagacagccaaggaggaagatggatctgtagaactggaatctcaagttcagaaagatggtgtagcggattctacagttatttcttcaatgccctgcttgttgatggaactgagaagggactcttctgagtctcagttagcatccacagagagtgacaagcctacaactggccgagtttatgagagtgactcctctaatcactgcatgctttccccttcctctagtggtcacctggctgattcagatacgttgtcttccgcagaagagaatgaaccctctcaggcagaaacggcggtagaaggagacccttcaggagtgtctggtgccacagttgggcgcaagtctaggcggtcccgatctgaaagtgaaacttccactatggctgccaagaaaaaccggcaatccagtgataaacagaatggccgagtcgccaaggttaaaggtcatcggagccaaaagcacaaggagaggatcaggctactgaggcagaaacgggaggctgctgcaaggaagaaatataacctgctgcaggacagtagtaccagtgatagtgacctgacttgtgactcaagcacgagctcatcagatgatgatgaagaggtttcagggagcagcaagacaatcactgcagagataccagggacggggttctgttatgttgttcaggctggcctcagacgcctgggcttaagcgatctgcacaccttggcctctcaaagtgctgagattctgtgggattcgcacctggcctaaaacataggtattaatagttatattcaagagttttgctcttgttgcccaggctggagtgcaatggcatgatctcggctcactgcaacctccacctcccaggttcaagtgattctcctgcctcagctacccgagtagctgggattataggcgcctgccaccatgcccggctaattttctgtatttttagtagagataggggttcaccatgttggccaggctggtctcgaactcctgacctcaggtggtccatccgtcttggccccccagagtgctgccacagcgctcagtctgatttatttcttaaaagttgtatgcagaatgatttaaagtgtattaagtctgcttgttaatgaaagaaacaatatagtgaattcttttttaaccaaagtaccctaaattgatattactggtaatttttatttttaacatatagctgactttgcctaaaggtatacagttacatgaatgttataagaaagatggcaaacaggctttgtgttatcatttgtttaaaatagcaaattatgggcaagttatcttacaaaaaggtagccttttaaattaattgtaccttttatattttatttagcttatgttgattttcatctccccttttaaaaaattatttaaatagtacagtgagggtgaaatgaaaaagattttgtggaatgccacatgtcagaaaatacagtgtcaaaacaatttcagtaaattttttttctcaaaatcctcttcaaaaataccatatgcccttaatcctagtacagataaaaaacatgtcattttaatttgtttagaagttacgagattgtgaattgtaagtaacagggaataacttccaagtttctttactcatttttcccccgatttctatttttatttcctctgaagtttaggaaagttagtggaagttgcaaccaaactgtttgtttgctagtattgagtagatattctcatgttgtattaaattaccacagtgtaaaatagaagatgtcataaaaagtgaaggaataatccacaaagaagtgtattctatggcaattaagtcttattcctaatataactttaagatttgggaagaatgttatgaaattactgtttttattttattgcattttcttaatatccttttcctcactgtgcatttgacatgtaacctagatgaataaaaattttgaaaaagaaa

SEQ ID NO: 118614 - DNA, 5264 bp, Homo sapiens
  Payload ID: 3214
  Gene Symbol: C18orf25
  Gene Name: chromosome 18 open reading frame 25
  Uniprot ID: Q96B23
  ENST ID: ENST00000619301
  CDS Start-End: 368-1399
agtgaggcgcccagcggaacggcctctggtgacattttcttgggggcggcgcggacgactgaagggacttggtggtagaggctgcggaggcggcgaggttcactttggtcccggcaggggctctgaccgcgacccactgctcgctgccggggcttgttccgaggaggagaaggcggcggtggccgtcgcgtcctgagtcaccgcagcggggaagagtcccggccgggggttcggtgcgtgccccgacggggcgcgcgcgaagcgagcgagaaggcacggagtcgccgcggagcgcaggttgctttcctgttgcatctttgatatcatttcctagactctactccatgatttaacttgaaattctgaaatgaagatggaggaggcagtgggaaaagttgaagaactcattgagtccgaagccccaccaaaagcatctgaacaagagacagccaaggaggaagatggatctgtagaactggaatctcaagttcagaaagatggtgtagcggattctacagttatttcttcaatgccctgcttgttgatggaactgagaagggactcttctgagtctcagttagcatccacagagagtgacaagcctacaactggccgagtttatgagagtgactcctctaatcactgcatgctttccccttcctctagtggtcacctggctgattcagatacgttgtcttccgcagaagagaatgaaccctctcaggcagaaacggcggtagaaggagacccttcaggagtgtctggtgccacagttgggcgcaagtctaggcggtcccgatctgaaagtgaaacttccactatggctgccaagaaaaaccggcaatccagtgataaacagaatggccgagtcgccaaggttaaaggtcatcggagccaaaagcacaaggagaggatcaggctactgaggcagaaacgggaggctgctgcaaggaagaaatataacctgctgcaggacagtagtaccagtgatagtgacctgacttgtgactcaagcacgagctcatcagatgatgatgaagaggtttcagggagcagcaagacaatcactgcagagataccaggtcatttggatccaggattcctagcaagtgacaaaacatctgctggcaatgcgccactcaatgaagaaattaacattgcgtcttcagatagtgaagtagagattgtgggagttcaggaacatgcaaggtgtgttcatcctcgaggtggtgtgattcagagtgtttcttcatggaagcatggctcgggcacgcagtatgttagcaccaggcaaacacagtcatggactgctgtgactccccagcagacttgggcttcaccagcagaagttgttgaccttaccttggatgaggatagcaggcgtaaatacctactgtaatacaatgtcactgtgtttcctctgcactgttcccttccacttcctcatcctctttgtgacatggaagttcattgtcatagcttcagcttcagaagctgtttgtggcatttgtaggattcaaactcatggaaaattccctcctcttcccccctttttttaattaaaagaagtcacttaggaaaataacatcacagagaaaagaatttcttctttccctcagtaggaatatagaatgatgaattttattagacaactttattttacttggtgacttttaatcttaggaaactctgccttccttttagaataatattttaattgccaggcaaaatgggtttcagtttttgaatcttgtatttatttttctgtataatgaaattaatatctagacttgaccactatctgcccaccccattggcactcccatcttagggcattcgcacacatatcagtcaggtccttattggcacctagtagggcatgtgcatttaaaaacttgtccttaaaaatagaagacagaagtattaaaattatattttcttttattttaagtcttctgccttctttcttgagtttgctcctgttgacttcccacagcacagataattgacatgtccctttgtgtttataaatactactaaggtgacctagttgttctccttgttgcaataattaataactctttgcaaaatgtctcctttgagacagaggcatttcagatagatacccaccatgaggtgttctgggcatctgaaggtattaagagttcagtgggaaaaatctctctccctcgcctttttttctggtttagtcaaataacgggtgaacatagaaacctgttgggaagaatatgaaaagttatgtggcctctgaggctacaggcacttgcaaatccgagaggaaagtgccgtctttcatagctggtctctgtataaagagtatgtagcaacaactgtttaacatccgagatgaagtggacctgatgctgtatttgggtatttttctcctctaccttctaaaaaaaaataccataagaagaatcagaatgtaccataagaaatcagatgcaaagcacgttaatgtcattggtaagttttacagagtctaaaaggattagcaaagggtagcaggagcttcagggaattcaggaaatgccagcattggaattttgtggcattagttactaccttctttcttataatatgttgtagttactagtgaattcttttaaaagcaatacctagagttagaacactatgtactctgcacagggggagtgaagtaatattggcttagaagacttcaccttttgtttttcatggtttttgtttgttttgtttttgtttttgtttccattgttaccgttgctatggccctttgcctgtctctccaaatcccctggtggctcttcttatcattaagagtatgagaattaccattttcagttttcattcagcaaacaaatttaccaagtgcctgctctgcataaggcactgtgaggggtgggtgctctgggggctgctgagatgaatgacacacaccgcacatacacatgcatcagtgtctgcctgcctccacctgcccagcctgttcttcttcttcttcttcatcttcttcttttttttttttttttgtaaagacaagtttattcctttacgcttcttgttgcattagttctcctgtatgttccttcttccacaggaatgtatttgtgcatatgttctttgatcttctctgatagcatctcatttgatctggcctctgtccttcatcagcttttattttttttatttttattttctgcttttgttagataaggcttttaagatcatgaacctccagctttagcaactcatatatcagtctctcacatggccacaattctagacaaaaaccaaagacccagaggccagagcaaagtaggaccttctgaagattcactactggtgtatccttggaccttcacattttactttaggattaatttattgaattttactgttacacatagtttttgacttgaattaaaatactagacaaagcagaaatgtacaatttctggtctgtgttttccaggaaattcatagagaagagaatagagtggatgatgtgacttgaagtttttgcagcttattttttcccccactgtcagggcagaggcccattttaatgaatgtttttgcatgacctgttcttatgttaaccacatattttttttcccaattccacacagcaggtgatttcccgtgtgacatattttcttcatagtccctaatatagtcatcctctacagagttggcgtgctgtgtgcactgtggattaggaacagagtggagctgtaaccagtctcttctctggccctttgcctttatgtcagcttgcacttttgcctcacttattcctagtccagctcccaactgcctgacttaatggaccagaacggagatttggatattaagatgcagagggggaggggaagggatggtagagatagacagctctcccctactaggttgggtcatttcccctaataactatagagagactgtgtttcaactctcttttcattgctgtttccagaagagtggagagtgtggtttcaggcaaggtattaatgatacaattccgtggtatacagctcctgtgacatttgaagtttcttttaaaggggtttttcttaatcaaagttttacatttggtagcataagtagttctttatgcttcacaggacattgtcttcagagtaatctctctgctaaaatggtacatgtgggtcacagattggtttatgccactgacttggttaagtttccaccccctccaatttgtgaaaaacagagcagtgacctagctgttgcatcatcatgactgccatgtaacctgtaattgctgctctccagtaattgtcttttcattttgatggtaggggccagactgaatgaataatgcattcttttttattcaatttatttcattcagtttattcttggcaatcaaacatcccataaactttgcttttattatcaattatgaatatgaattgtctggtttactaatgtagtcatttgttcatctttacttttagcagattagcaccataactaacttaaaactaagtttgttacctgctttttatactgtcacaaaggtttttgaaaaagctggggacactattttgtcttttagttttaaacttttttaaggcaaagcaagctccccaatccctgttctccaatatgtgtatgatgtgacttccatgtagatataaaaatgattgtgccctaaccaaacttcctcagattgtgcactgtttgtttaaaataatcacgtattttagtctgatgctgttgtattttttcattttatttaaaacactacttacttcttattctcttaacaaattttaaaaggtagtgatcttaaaaaaaaatcactggataactaggaaatatttttgttgttgttttgtttcttaaagagtacagaggccattgaagccttttgctcctcttaccgtgaaaatgaaatgttagccattgtatggctaggaaccaatgcacttggcagttaatggatctgctgttgctggagtgtgagcgtggacttgatgcagtgatgacaaatcattgcttagaattaatgttttcaaatgtgcaactctagtttttaaaacaaaatttggttctttacattcattatttcgtttttgtttccctttagtatttaatggtctttggagaaaaaataataaaacagagtgttatatatatattttttggtgcaagataagattttctgttttttgaaataagtctgtagcataaaggttaaactattttaagacaaaataaaatagagtgtattt

SEQ ID NO: 118615 - DNA, 5462 bp, Homo sapiens
  Payload ID: 3214
  Gene Symbol: C18orf25
  Gene Name: chromosome 18 open reading frame 25
  ENST ID: ENST00000615052
  CDS Start-End: 375-1589
gggcggaagtgaggcgcccagcggaacggcctctggtgacattttcttgggggcggcgcggacgactgaagggacttggtggtagaggctgcggaggcggcgaggttcactttggtcccggcaggggctctgaccgcgacccactgctcgctgccggggcttgttccgaggaggagaaggcggcggtggccgtcgcgtcctgagtcaccgcagcggggaagagtcccggccgggggttcggtgcgtgccccgacggggcgcgcgcgaagcgagcgagaaggcacggagtcgccgcggagcgcaggttgctttcctgttgcatctttgatatcatttcctagactctactccatgatttaacttgaaattctgaaatgaagatggaggaggcagtgggaaaagttgaagaactcattgagtccgaagccccaccaaaagcatctgaacaagagacagccaaggaggaagatggatctgtagaactggaatctcaagttcagaaagatggtgtagcggattctacagttatttcttcaatgccctgcttgttgatggaactgagaagggactcttctgagtctcagttagcatccacagagagtgacaagcctacaactggccgagtttatgagagtgactcctctaatcactgcatgctttccccttcctctagtggtcacctggctgattcagatacgttgtcttccgcagaagagaatgaaccctctcaggcagaaacggcggtagaaggagacccttcaggagtgtctggtgccacagttgggcgcaagtctaggcggtcccgatctgaaagtgaaacttccactatggctgccaagaaaaaccggcaatccagtgataaacagaatggccgagtcgccaaggttaaaggtcatcggagccaaaagcacaaggagaggatcaggctactgaggcagaaacgggaggctgctgcaaggaagaaatataacctgctgcaggacagtagtaccagtgatagtgacctgacttgtgactcaagcacgagctcatcagatgatgatgaagaggtttcagggagcagcaagacaatcactgcagagataccagatggacctccagttgtagctcattatgatatgtctgacaccaactctgacccagaagtggtaaatgtggacaatttattggcggctgcagtagttcaagagcacagtaattctgtaggcggccaggacacaggagctacctggaggaccagcgggcttctagaggagctgaatgcagaggcaggtcatttggatccaggattcctagcaagtgacaaaacatctgctggcaatgcgccactcaatgaagaaattaacattgcgtcttcagatagtgaagtagagattgtgggagttcaggaacatgcaaggtgtgttcatcctcgaggtggtgtgattcagagtgtttcttcatggaagcatggctcgggcacgcagtatgttagcaccaggcaaacacagtcatggactgctgtgactccccagcagacttgggcttcaccagcagaagttgttgaccttaccttggatgaggatagcaggcgtaaatacctactgtaatacaatgtcactgtgtttcctctgcactgttcccttccacttcctcatcctctttgtgacatggaagttcattgtcatagcttcagcttcagaagctgtttgtggcatttgtaggattcaaactcatggaaaattccctcctcttcccccctttttttaattaaaagaagtcacttaggaaaataacatcacagagaaaagaatttcttctttccctcagtaggaatatagaatgatgaattttattagacaactttattttacttggtgacttttaatcttaggaaactctgccttccttttagaataatattttaattgccaggcaaaatgggtttcagtttttgaatcttgtatttatttttctgtataatgaaattaatatctagacttgaccactatctgcccaccccattggcactcccatcttagggcattcgcacacatatcagtcaggtccttattggcacctagtagggcatgtgcatttaaaaacttgtccttaaaaatagaagacagaagtattaaaattatattttcttttattttaagtcttctgccttctttcttgagtttgctcctgttgacttcccacagcacagataattgacatgtccctttgtgtttataaatactactaaggtgacctagttgttctccttgttgcaataattaataactctttgcaaaatgtctcctttgagacagaggcatttcagatagatacccaccatgaggtgttctgggcatctgaaggtattaagagttcagtgggaaaaatctctctccctcgcctttttttctggtttagtcaaataacgggtgaacatagaaacctgttgggaagaatatgaaaagttatgtggcctctgaggctacaggcacttgcaaatccgagaggaaagtgccgtctttcatagctggtctctgtataaagagtatgtagcaacaactgtttaacatccgagatgaagtggacctgatgctgtatttgggtatttttctcctctaccttctaaaaaaaaataccataagaagaatcagaatgtaccataagaaatcagatgcaaagcacgttaatgtcattggtaagttttacagagtctaaaaggattagcaaagggtagcaggagcttcagggaattcaggaaatgccagcattggaattttgtggcattagttactaccttctttcttataatatgttgtagttactagtgaattcttttaaaagcaatacctagagttagaacactatgtactctgcacagggggagtgaagtaatattggcttagaagacttcaccttttgtttttcatggtttttgtttgttttgtttttgtttttgtttccattgttaccgttgctatggccctttgcctgtctctccaaatcccctggtggctcttcttatcattaagagtatgagaattaccattttcagttttcattcagcaaacaaatttaccaagtgcctgctctgcataaggcactgtgaggggtgggtgctctgggggctgctgagatgaatgacacacaccgcacatacacatgcatcagtgtctgcctgcctccacctgcccagcctgttcttcttcttcttcttcatcttcttcttttttttttttttttgtaaagacaagtttattcctttacgcttcttgttgcattagttctcctgtatgttccttcttccacaggaatgtatttgtgcatatgttctttgatcttctctgatagcatctcatttgatctggcctctgtccttcatcagcttttattttttttatttttattttctgcttttgttagataaggcttttaagatcatgaacctccagctttagcaactcatatatcagtctctcacatggccacaattctagacaaaaaccaaagacccagaggccagagcaaagtaggaccttctgaagattcactactggtgtatccttggaccttcacattttactttaggattaatttattgaattttactgttacacatagtttttgacttgaattaaaatactagacaaagcagaaatgtacaatttctggtctgtgttttccaggaaattcatagagaagagaatagagtggatgatgtgacttgaagtttttgcagcttattttttcccccactgtcagggcagaggcccattttaatgaatgtttttgcatgacctgttcttatgttaaccacatattttttttcccaattccacacagcaggtgatttcccgtgtgacatattttcttcatagtccctaatatagtcatcctctacagagttggcgtgctgtgtgcactgtggattaggaacagagtggagctgtaaccagtctcttctctggccctttgcctttatgtcagcttgcacttttgcctcacttattcctagtccagctcccaactgcctgacttaatggaccagaacggagatttggatattaagatgcagagggggaggggaagggatggtagagatagacagctctcccctactaggttgggtcatttcccctaataactatagagagactgtgtttcaactctcttttcattgctgtttccagaagagtggagagtgtggtttcaggcaaggtattaatgatacaattccgtggtatacagctcctgtgacatttgaagtttcttttaaaggggtttttcttaatcaaagttttacatttggtagcataagtagttctttatgcttcacaggacattgtcttcagagtaatctctctgctaaaatggtacatgtgggtcacagattggtttatgccactgacttggttaagtttccaccccctccaatttgtgaaaaacagagcagtgacctagctgttgcatcatcatgactgccatgtaacctgtaattgctgctctccagtaattgtcttttcattttgatggtaggggccagactgaatgaataatgcattcttttttattcaatttatttcattcagtttattcttggcaatcaaacatcccataaactttgcttttattatcaattatgaatatgaattgtctggtttactaatgtagtcatttgttcatctttacttttagcagattagcaccataactaacttaaaactaagtttgttacctgctttttatactgtcacaaaggtttttgaaaaagctggggacactattttgtcttttagttttaaacttttttaaggcaaagcaagctccccaatccctgttctccaatatgtgtatgatgtgacttccatgtagatataaaaatgattgtgccctaaccaaacttcctcagattgtgcactgtttgtttaaaataatcacgtattttagtctgatgctgttgtattttttcattttatttaaaacactacttacttcttattctcttaacaaattttaaaaggtagtgatcttaaaaaaaaatcactggataactaggaaatatttttgttgttgttttgtttcttaaagagtacagaggccattgaagccttttgctcctcttaccgtgaaaatgaaatgttagccattgtatggctaggaaccaatgcacttggcagttaatggatctgctgttgctggagtgtgagcgtggacttgatgcagtgatgacaaatcattgcttagaattaatgttttcaaatgtgcaactctagtttttaaaacaaaatttggttctttacattcattatttcgtttttgtttccctttagtatttaatggtctttggagaaaaaataataaaacagagtgttatatatatattttttggtgcaagataagattttctgttttttgaaataagtctgtagcataaaggttaaactattttaagacaaaataaaatagagtgtatttaaacaatg

SEQ ID NO: 118616 - DNA, 1128 bp, Homo sapiens
  Payload ID: 3215
  Gene Symbol: C18orf32
  Gene Name: chromosome 18 open reading frame 32
  Uniprot ID: Q8TCD1
  ENST ID: ENST00000318240
  CDS Start-End: 213-443
gtcagctgcgtttccgcggtcgcgggtgagtgtgcccgggctagcggcctgggttgggctttgtagctgctccgcaggcccagcccgggccgcgctcgcagagtcctaggcggtgcgcggcctcctgcctcctccctcctcggcggtcgcggcccgccggcctccgcggtgcctgccttcgctctcaggttgaggagctcaagcttgggaaaatggtgtgcattccttgtatcgtcattccagttctgctctggatctacaaaaaattcctggagccatatatataccctctggtttcccccttcgttagtcgtatatggcctaagaaagcaatacaagaatccaatgatacaaacaaaggcaaagtaaactttaagggtgcagacatgaatggattaccaacaaaaggaccaacagaaatctgtgataaaaagaaagactaaagaaattttcctaaaggaccccatcatttaaaaaatggacctgataatatgaagcatcttccttgtaattgtctctgacctttttatctgagaccggaattcaggataggagtctagatatttacctgatactaatcaggaaatatatgatatccgtatttaaaatgtagttagttatatttaatgacctcattcctaagttcctttttcgttaatgtagctttcatttctgttattgctgtttgaataatatgattaaatagaaggtttgtgccagtagacattatgttactaaatcagcactttaaaatctttggttctctaattcatatgaatttgctgtttgctctaatttctttgggctcttctaatttgagtggagtacaattttgttgtgaaacagtccagtgaaactgtgcagggaaatgaaggtagaattttgggaggtaataatgatgtgaaacataaagatttaataattactgtccaacacagtggagcagcttgtccacaaatatagtaattactatttattgctctaaggaagattaaaaaaagatagggaaaagggggaaacttctttgaaaaatgaaacatctgttacattaatgtctaattataaaattttaatccttactgcatttcttctgttcctacaaatgtattaaacattcagtttaactgg

SEQ ID NO: 118617 - DNA, 714 bp, Homo sapiens
  Payload ID: 3215
  Gene Symbol: C18orf32
  Gene Name: chromosome 18 open reading frame 32
  Uniprot ID: Q8TCD1
  ENST ID: ENST00000582392
  CDS Start-End: 205-435
tggagcgaataattaaaataataatatctcgtagccaccttctagacttttctgacccagtttccatatgtgtgaagtaaaatatcttaccgaagtattattatgaagattaaaagataagatacaaataggcttcattccgaagagagctaaaaagtctcttaaaagccgtaattgtggcttgaggagctcaagcttgggaaaatggtgtgcattccttgtatcgtcattccagttctgctctggatctacaaaaaattcctggagccatatatataccctctggtttcccccttcgttagtcgtatatggcctaagaaagcaatacaagaatccaatgatacaaacaaaggcaaagtaaactttaagggtgcagacatgaatggattaccaacaaaaggaccaacagaaatctgtgataaaaagaaagactaaagaaattttcctaaaggaccccatcatttaaaaaatggacctgataatatgaagcatcttccttgtaattgtctctgacctttttatctgagaccggaattcaggataggagtctagatatttacctgatactaatcaggaaatatatgatatccgtatttaaaatgtagttagttatatttaatgacctcattcctaagttcctttttcgttaatgtagctttcatttctgttattgctgtttgaataatatgattaaatagaaggtttgtgccagta

SEQ ID NO: 118618 - DNA, 5395 bp, Homo sapiens
  Payload ID: 3215
  Gene Symbol: C18orf32
  Gene Name: chromosome 18 open reading frame 32
  Uniprot ID: Q8TCD1
  ENST ID: ENST00000613385
  CDS Start-End: 70-300
ccctccggaagtgcggacattgtcagctgcgtttccgcggtcgcggttgaggagctcaagcttgggaaaatggtgtgcattccttgtatcgtcattccagttctgctctggatctacaaaaaattcctggagccatatatataccctctggtttcccccttcgttagtcgtatatggcctaagaaagcaatacaagaatccaatgatacaaacaaaggcaaagtaaactttaagggtgcagacatgaatggattaccaacaaaaggaccaacagaaatctgtgataaaaagaaagactaaagaaattttcctaaaggaccccatcatttaaaaaatggacctgataatatgaagcatcttccttgtaattgtctctgacctttttatctgagaccggaattcaggataggagtctagatatttacctgatactaatcaggaaatatatgatatccgtatttaaaatgtagttagttatatttaatgacctcattcctaagttcctttttcgttaatgtagctttcatttctgttattgctgtttgaataatatgattaaatagaaggtttgtgccagtagacattatgttactaaatcagcactttaaaatctttggttctctaattcatatgaatttgctgtttgctctaatttctttgggctcttctaatttgagtggagtacaattttgttgtgaaacagtccagtgaaactgtgcagggaaatgaaggtagaattttgggaggtaataatgatgtgaaacataaagatttaataattactgtccaacacagtggagcagcttgtccacaaatatagtaattactatttattgctctaaggaagattaaaaaaagatagggaaaagggggaaacttctttgaaaaatgaaacatctgttacattaatgtctaattataaaattttaatccttactgcatttcttctgttcctacaaatgtattaaacattcagtttaactggtagttcattttcttttaaagtctattgaaatattcaaaagggaaatttttcaccacgtcagaaggcagaatttggatgttgtgatggcatctgtgtagtggtgggacaacaattactattgttgcgtaacaagacactccaaaatttagtggttttcagcagcagtgactcgactgggcagttctttgctgttctgggctcactcatatggctggctgggcctgggtctggacctgggccgctatgtgatttttatcttgggctttgaaaattcagtgtagggacctataaatattcaaagatgatgagatgcatccttatatattttttgtattcactctgaagctgggaaagattaaaaggaactcctgcccttgggtccctaatgaagtctgggtcctaactcaggctctattaagttctgtggctggtcaagtcactgatttaccttgggctttatttgatataaatcatgtaaatcagcaggtctcagcttttctgtccaaagccacctgagggataagataaattctcattagcaaataaacttttttaaggtataaatactattataaaaataacagatatttacagtacaacaatgcaagaggatcctaaatgaaaagcgaatgttttttctcaactctcattcccttattccagctccacagaggtaaccaattgtttttttgttgttgttgttgtatggtttgtttttgttagacagtagtcttttcctgaacagtgctgctccttgtggagcaaggctaattcataggcagtgcatccagagtccgccccagttgattttgtgtgtaaccttctagcaactttttgaaaattaatttgttcttaaatatgcacatcatttttatttatttatgtttttgagacagggtctcactctgtcactcaagctggagtgcagcagcatgatcacggctctctatggcctcgacctgcagtcctgaagtgatcctctcaccttagcctctcaagtagctgggactacaggtgcacaccaccatgcccagctaatgttttttgtaattttttttatagagacagggtttcgtcatgttgcctgggctgatctcgatctcctgggctcaagcgatcctccactttggcttcccaaagtgctgggattacaggcatgagctactactgcacctggcccacacatcatcttttaaaaattaagtaatattgcaacgtttctaattgtccctacttctttgctcctcaaaggttttacctactgagctgtgggctttttaaatttatctccatatttataaataaattataaaaatataaaaatataaacattttattttttgagacagggtctcactgtcacccaggtgctggagtgcagcggcatcatcatagctcactacagcctccaactcctgggctcaagtgatcctcccacctcagcctcctgaattgctaggactacaggtgtgtgccaccacgcctggctaattttttgtagagacggggtcttgctctgttgcccaagcgagtctcaaactcctggcctcaaagtgatcctcttgcctcagcctcccaaagtgtcgggattacaggcatgagccactgcctggctatactgttatattttgagccatcaacttcagacattgtttcccataatggttgagatgccgctatcttacactgcctctgctcctcccacacatcctcccaagtgcttttgtaaattttgcttacatcatcagtgttcatagcatgagtgtgccaggtgtctttcatttgcccctcccaagtctctgctcccctcatcctgctttcagcccaaggaagctgtatagacatcaacagacttcccatgtctctgggttctgctgggtttggccaatagcgatccatagcaggagatggctggagggaggagaatgaaggcagagtgtttattcccttggccctctctctgcaaggtcacctcaggccaactgttcctcagccagaagtcactgtgcctcaaggaacactccaggcagccaactccacctgacttcttttatttttcctaacctgtccttcaccctgcccttttgggcccaggggtggtggtatttctgttactggctctgggctactgcttcctctcaagagtgctatctggcttgctgggacactgcctgggagaatactattgctcactgcacaggttaatgcactgtgattgcgtcccttttaatatacaggtggtgtcttcctggagtgaccagtttaccttctccccatacacctctcctgcctagttgttgcctagacctggtgcacactgcagtcctcgggactttctgttgccaccctcctgtattggacgtcttgtttctggatttcctatcctcttccttcttggtttatccctcattttttctgtagcacagcagttttctaattcaatacttttaggaggttgagtatggataattttggaaagtgtccccgggatgattccaatttatttaagcctgttttccagagagctgcgggtctcctaaggcctttctcatttctaacaagtctccctctctagaacactggttcccagtcgttgttttcatactagcaacattttaaaagcaggataggggtggctagtatgcaattgccaacttttgatttttccaagcaggagtatatcaaaaagctacaatttattaccagtatttcgtaaaagacagtttgacaccagaagagtgaaaaagaacatgggaatagtggacaaaaatagccatcagtttgaataagcgtatgaaaagtgttaattttatgaaaaattcactattttgttcatatttttcttattttggaggctaattgttaaaagcttttatcagttatccatgggctggagttggtagccactgtttgataccacacaaatgtttctttgccctaaaatatcaacatctgtctgtgtaaaggtcagggctgcctttttagtaagagctaccctttgttaaacacattgtacctgcactgttcatgggtgtttcacacacacaaacctacctggtctgcataaacctgaaatacagtcaagaaaacaggatccaccggaggcggtgactcaagcctataatcccagcactttgggaggccgaggtgggaggatcacttgaggccgggagttcaagaccagcctggccaacatggtgaaaccctgtctctactaaaaatacaaaaattagtcgggcatagtggtacacacctgtaatcccagctactccagaggctgaggcatgagaatcgtttgaaaccaggaggcagaggttgcagtgagctgaaattgtaccactgcactccagcctaggtgacagagcaagactgtctcaaaagaaaagaaaaagaaaaacaggatcccagcctgggcaacatagggagacctcgcctccaccaaaaattaaaaaatttagctaggcatatggtgatgtgcacctgtggtcccagctactctggaggctgaggtgggaggattgcttgaacccaggaggttaaaggctacagtgagctgtgatcaagccactgcactctagcttggacaacagagcaagaccctgtcttaaaaaaagaaaaaaagaataatggagtttaaatatgtaaatgacaagtctaagatttcaaggtcatactttcatgctaaggagccatcacagctacatatatatatagtgtatatatatatatagtgtgtatatatatatagtgtatatacatatagtgtatatatatatagtgtatatatatagtgtgtatatatatagtgtgtgtatatatatatatgtgtatatatatatagtgtgtgtatatatatatatttttgtttgtttgtttgtttttggaagatggagtttcgctcttgttgcccaggctgcagtgcaatggtgcaatctctgctcaccacaacctcctcctcccaggttcaagcgattctgcctcagcctcccaagtagctgggattacaggtgcgtgctaccacacccggctaattttgtactttagtagagacggggtttcaccacgttggtcaggctggtctcaaactcccaacctccagtgatctgcctgccttggcctcccaaagtgctgggatcacaggcataagcactgggcccggctgccacagctactaatatcttaattgttagtaataccttattgggaataattaggcagaaatggagagggtgagtttagattaatcagtatgtgtgaacttgttttaaagtttctggaggctgaggtgagaggatcgcttaagtccaggaggcggaagttgcagtgagccaagatcacaccactgtactccagccaggacaacagagcaataccccgtttcaaataaataataataaagttaattttgct

SEQ ID NO: 118619 - DNA, 575 bp, Homo sapiens
  Payload ID: 3216
  Gene Symbol: C18orf42
  Gene Name: chromosome 18 open reading frame 42
  Uniprot ID: P0CW23
  ENST ID: ENST00000434239
  CDS Start-End: 173-382
agctgcggccccaggatctagcggcgggagctgtccggggtgctgaccgccccgcccgccgcccgcccagcgcgccctcctgcaccggaccccgccaagtccggccttcttcccatcctccgtctgcctgtctttctctcttaatctgggggcgtagcggctggaagaaatcatggtgttcgctccaggtgagaaacctggaaatgagcctgaagaggtgaagctgcagaatgccagcaaacagattgtgcagaatgcaatcctgcaagctgtgcagcaagtctcccaggagagtcagcgcagagaagagagaatcagtgacaaccgggaccacatccaactgggcgttggggagttaaccaagaagcacgaaaagaagtaacatggtggatttggctcttgacatgtgcttggtttctagccttcctcttagtataggacgcatctccaaaatgttgccagtaaagcaaaccgaagtgtcaccggcacctagctgtagaatgaattcacactagcccctggctgagaagcactgttttgaaaaagtgcattagacgattctgttcatatttatg

SEQ ID NO: 118620 - DNA, 523 bp, Homo sapiens
  Payload ID: 3216
  Gene Symbol: C18orf42
  Gene Name: chromosome 18 open reading frame 42
  ENST ID: ENST00000580650
  CDS Start-End: 16-246
acaaatctatcttaaatgtcagtccaatatccacggcgacgagccacagcaggtgagaaacctggaaatgagcctgaagaggtgaagctgcagaatgccagcaaacagattgtgcagaatgcaatcctgcaagctgtgcagcaagtctcccaggagagtcagcgcagagaagagagaatcagtgacaaccgggaccacatccaactgggcgttggggagttaaccaagaagcacgaaaagaagtaacatggtggatttggctcttgacatgtgcttggtttctagccttcctcttagtataggacgcatctccaaaatgttgccagtaaagcaaaccgaagtgtcaccggcacctagctgtagaatgaattcacactagcccctggctgagaagcactgttttgaaaaagtgcattagacgattctgttcatatttatgcagtgcctctgagacatagtggggccaaatatgacactgtaattgcaaaagtagttttgcaggccaatttatttttaaagttct

SEQ ID NO: 118621 - DNA, 5237 bp, Homo sapiens
  Payload ID: 3217
  Gene Symbol: C18orf54
  Gene Name: chromosome 18 open reading frame 54
  Uniprot ID: Q8IYD9
  ENST ID: ENST00000300091
  CDS Start-End: 333-1451
tgcgcactgctggagacgggcgaccttcgctggccggtcggtgggttcctggttttctgctgccgagtaaacaaacgttccctttcctaacttagcagtcacagagctatttccaagagttgttcttaatttcctgtgcgatattcccattggctatttaacactgaacattctgtttttgaatcaaagttagttaaaatttgttgtcaataagtttaacattctgttcttccgcgtgatggattttcttttggagattcgaactgaagcctgtacggaggaaatgttgtttttaagggaaatgaatagaaacaatccactttgaagaagccatggcgaaatcaaagacaaaacatagactttgttctcaggaatcttcagtatctgccctgctggcaagctgcaccctgagtggtagtaattcctctaattctgatggctcgtttcactataaagataagctgtacagatctgcttctcaagctctacaggcttatattgatgattttgatctaggccaaatatatcctggtgcaagcactggaaaaattaacattgatgaggattttactaatatgtcacagttctgcaactatatttacaaaccaaacaatgcttttgaaaaccttgatcacaaaaagcactcaaacttcatatcctgtagaagacacaccgttaatgacatagactccatgagcctaacaactgatgatctattaagactcccagcagatggatcattttcttatacttatgttggaccgagtcaccgaacgagcaagaaaaacaagaaatgccgtggaagactgggttcattggacattgagaagaatccacattttcaaggaccctacacttccatgggcaaggataactttgttactcctgttatacgctcaaatataaatggaaagcaatgtggtgacaaaattgaattgcttatcttgaaggccaagagaaatctagagcagtgtactgaagaattaccaaagtccatgaaaaaggatgacagtccttgctcattagataaacttgaagcagacagatcatgggaaaatattcctgttactttcaaatctcctgttcccgttaactctgatgatagtcctcaacaaacttcaagggcaaagagtgctaaaggggttcttgaagactttctaaataatgataatcagagctgtactctctctggaggcaaacatcatggtcctgttgaagccctgaaacaaatgttatttaaccttcaagcagtacaagaacgttttaatcaaaataagaccacagatccaaaagaagagattaaacaagtttcagaagatgatttctctaaattacagttgaaggaaagtatgattcctattactaggtcacttcagaaggctttgcaccatttatctcgcctgagagacctggttgatgatacgaatggagaacggtcaccgaaaatgtgaagaggaaaatgaaactgtcaccacaatgaatagtcaccacagaacaaataggcattttttctattacttaaactgacaaagtaaatataagccatacattattttgtggttggttcaaggattatatatttctaaaacactaaacttgaaaatacccataggttttgggacctatctttattttgtgccaacatactagaatgtgaactgcaaggacccacaatatatcctgaagtcttactttcgccttctggccagcaaatgtctaatatttaaagatggatgacttctgttcttgaagcttacctggatttaaccttcttcagcatcctcaacattttattacctggttcaggatcattaagaaacttactggtttttatccaaaatcttttacgttaaatagacttttttaaagatatagttagcatcacttttaaacagcttaaaggaatatcaaaattgttattgtgtatctcatctataaggaagtctgttactttgaaattttcataaatttaatatttaagatacattgtatttgaaaattgcattaatagtggggtgatactgtgttaaaaggaatgttgtgttgtgacattcaagagaacctcctcatttaattagtactttgattctgtgtaagataatcttggtagtgcttgacagtttccaaacctttttttggagagatatttaagaatttaatattttgatattagattgtttcccagattttaattttggggttggctcaaactagtgaaaactatgactcaatggccaattgctttatcaaatttgataactaaaacttaaaatgaatatggaaaatcagaaagcaactctattttagagctattttgtaagagttgtgctttctttaacaccatctgtagtcttaagtttgtctctagctagaactgaacaaagctctataatttttaccaagcacttattattaatacttcttataagtagtaagcatctttactaacacaactgagaattaagtcataaaacataactaatacagcacattactgcctgacaaaattaaagagtactgtgtgtatgtataactactacaggttaacacttcacccaaatgatagcgtttttcctcagtagattattgtcaaataggaatttctaagcacattgagtcaaagcattttttccaagttaataaagtgttatttactatctttgttagaggtgacatgtcaaacactacagtgagctctgtggggttttttttttttttttttgcccgtgagttttttaccatgctgctctgaccagtttgagtggcaattaccaatagatttgttttctttattctatggagatgtttttaccactgacactgttttctgattatagtctgcttcatagaaaatagcctgcataatcaaacaaggagttactttgaaattaaagtatgcctggctattaaaaatgcagattttaggtgggtaaacatcaggtaggtctgggtgggtcatgttctaggcctagaaaaatacactattagacaagttctaaagaaggcaaggagataaaggcatcaggtggtaacttctaattgaatattatatgttgatcatacataatatatactatgcctggaaattatgactgaaaagcacctattcggttagtgctcctattcatgagaacatatctccaatactaaatgagataagcctgttctaaaatcttatagccagtattttaagaaacttgattatacttaccaaaggaacattgtttgttttctcttgttttaaatatggagaggtttaatcctttacataacaaaggaattaattttagcaaaatgattcattccaaccttcttataagaaatatctaggagagtcaagtaagaaaaataacgaatctaagtgataaacattcaagaaattctctaaataagagatttatttataattttaatatctcagggttctttttaggtttccaggggaaaagagcaggataacagtgtggagactgctaagttgagaatttaaaacaaatgagaacataagatttttaaaattgcattgtgaatgtaaaatttttatcaatcctttgctctcttttagacatattgagaaaatgttaaatagaaaaaattaagaaattttaataagatgtttcagatctttgagtatgaaaaacataacaaaaaaagcctaatttcaaaaaactatttgagatcaagggacaatggtgtgaccaatatgaagggtcaagactgaaatgtattgtctttactatcaagaactctactttcagttgtttctcagacagttaatttcagcttcatagagatttctgagcaaattaagaaacactgttttcctgggtttgttttgggtatatgtcattatagttatgttatttcttgttgaaatttataattgtaggttttttgtattgttttagtatttaatggtgtataatgtgttattacattatatgtagttataccaaaatattgcctgaagataaatcatgacaaggtcccctgtttattcctgtgttacagacgcatggaattgctcctgtagatttgaatttttgtttcatttttttctgtcccacccttcactctctctgtttcagaacatttttggtagaagtgctatccagaagtgaacttgtcaaaaggcaagtagcatgaaagaagacagaagaagcaaaaggctaatacagtggataatttctgagcacttgaagtttcttcaaatgtgcaagactgtgtgtcttcctattagatgtataaattggatatttcatgcctaattaaatgttgcgttggattgcagtgcctatcatacagtgattggagtaaattgaggcctaatcctgaacacatatagagcatattgttagatatttttcctgtgacatttgaagttattattctcccatttcctttttctttttttgtttataatcatatgtccctaagattgttttccttttttggaccaaaaaaaagaaaaaaaaaatcttagcttttcatcctcccagtgtattctgcattgtccttaccctagatcagccccttctgtgttaacagtttttctcacaatgtagcaacttttatccacccttcaggaccttcactgggactagttcattcattttcaaatagctatttcaacctttaacatctactgtcttagtcttttacacagaagccagagtgactggtcttggcaagactctgttgtgtatcaccactctaaccttactgatttgtttcagcaaatttgctttagttaaattgctttactcagattcccccaaactttatatgtgtattgtcatctttgtgcatattatttctcatgcatgaaatactcaatttttattcttttatctaacgcttactcttacatttctttaaagctctggccaagtattttatttcgtccctaaacattctaactatccaccaaactggtaagttggcttttctttttcctccccctgtcattcatttagctgttatatttcattttaatgttttgggtggtgcctcttatactatgttgtattcctagacaaggaaatgtatatcaaaatatgttagatgattgattgttttatctccttgatgatagcacctcttatactgctttacagaatcaggaaaaagtaaactgcattttacatagtggttttaaatattgattgattgatattctaaacctggtttcctatataaagttgtaagttcaagataaagagaccacattctttact

SEQ ID NO: 118622 - DNA, 4056 bp, Homo sapiens
  Payload ID: 3217
  Gene Symbol: C18orf54
  Gene Name: chromosome 18 open reading frame 54
  Uniprot ID: Q8IYD9
  ENST ID: ENST00000382911
  CDS Start-End: 333-1934
tgcgcactgctggagacgggcgaccttcgctggccggtcggtgggttcctggttttctgctgccgagtaaacaaacgttccctttcctaacttagcagtcacagagctatttccaagagttgttcttaatttcctgtgcgatattcccattggctatttaacactgaacattctgtttttgaatcaaagttagttaaaatttgttgtcaataagtttaacattctgttcttccgcgtgatggattttcttttggagattcgaactgaagcctgtacggaggaaatgttgtttttaagggaaatgaatagaaacaatccactttgaagaagccatggcgaaatcaaagacaaaacatagactttgttctcaggaatcttcagtatctgccctgctggcaagctgcaccctgagtggtagtaattcctctaattctgatggctcgtttcactataaagataagctgtacagatctgcttctcaagctctacaggcttatattgatgattttgatctaggccaaatatatcctggtgcaagcactggaaaaattaacattgatgaggattttactaatatgtcacagttctgcaactatatttacaaaccaaacaatgcttttgaaaaccttgatcacaaaaagcactcaaacttcatatcctgtagaagacacaccgttaatgacatagactccatgagcctaacaactgatgatctattaagactcccagcagatggatcattttcttatacttatgttggaccgagtcaccgaacgagcaagaaaaacaagaaatgccgtggaagactgggttcattggacattgagaagaatccacattttcaaggaccctacacttccatgggcaaggataactttgttactcctgttatacgctcaaatataaatggaaagcaatgtggtaggctgaaaaacccaaaacttatgaataggactaataattgcatttctgaatcatctttgtcttttcccaagaaatcgtctttcaaggacagttcagaacacagtcttgaaaagaattacccaagatggctcactagccagaaatctgaccttaatgtttcagggataactagtatacctgatttcaaatacccagtctggctgcacaatcaagacttgctacctgatgcaaatagtcaaagggtttatcagatatttaaagatgatcagtgttcccctagacatagtcatcaggcacaaggaacttctcggcttatcaataaattagattgttttgaatatgcttttgaaccctcaaacttttcaaattccttgagtgatgataaagaattagttaatgaatacaaatgtgattttgaacatagccagtgtcaatgtgagaatccacttctcccaggacaatccacaaagccattcagtggtgacaaaattgaattgcttatcttgaaggccaagagaaatctagagcagtgtactgaagaattaccaaagtccatgaaaaaggatgacagtccttgctcattagataaacttgaagcagacagatcatgggaaaatattcctgttactttcaaatctcctgttcccgttaactctgatgatagtcctcaacaaacttcaagggcaaagagtgctaaaggggttcttgaagactttctaaataatgataatcagagctgtactctctctggaggcaaacatcatggtcctgttgaagccctgaaacaaatgttatttaaccttcaagcagtacaagaacgttttaatcaaaataagaccacagatccaaaagaagagattaaacaagtttcagaagatgatttctctaaattacagttgaaggaaagtatgattcctattactaggtcacttcagaaggctttgcaccatttatctcgcctgagagacctggttgatgatacgaatggagaacggtcaccgaaaatgtgaagaggaaaatgaaactgtcaccacaatgaatagtcaccacagaacaaataggcattttttctattacttaaactgacaaagtaaatataagccatacattattttgtggttggttcaaggattatatatttctaaaacactaaacttgaaaatacccataggttttgggacctatctttattttgtgccaacatactagaatgtgaactgcaaggacccacaatatatcctgaagtcttactttcgccttctggccagcaaatgtctaatatttaaagatggatgacttctgttcttgaagcttacctggatttaaccttcttcagcatcctcaacattttattacctggttcaggatcattaagaaacttactggtttttatccaaaatcttttacgttaaatagacttttttaaagatatagttagcatcacttttaaacagcttaaaggaatatcaaaattgttattgtgtatctcatctataaggaagtctgttactttgaaattttcataaatttaatatttaagatacattgtatttgaaaattgcattaatagtggggtgatactgtgttaaaaggaatgttgtgttgtgacattcaagagaacctcctcatttaattagtactttgattctgtgtaagataatcttggtagtgcttgacagtttccaaacctttttttggagagatatttaagaatttaatattttgatattagattgtttcccagattttaattttggggttggctcaaactagtgaaaactatgactcaatggccaattgctttatcaaatttgataactaaaacttaaaatgaatatggaaaatcagaaagcaactctattttagagctattttgtaagagttgtgctttctttaacaccatctgtagtcttaagtttgtctctagctagaactgaacaaagctctataatttttaccaagcacttattattaatacttcttataagtagtaagcatctttactaacacaactgagaattaagtcataaaacataactaatacagcacattactgcctgacaaaattaaagagtactgtgtgtatgtataactactacaggttaacacttcacccaaatgatagcgtttttcctcagtagattattgtcaaataggaatttctaagcacattgagtcaaagcattttttccaagttaataaagtgttatttactatctttgttagaggtgacatgtcaaacactacagtgagctctgtggggttttttttttttttttttgcccgtgagttttttaccatgctgctctgaccagtttgagtggcaattaccaatagatttgttttctttattctatggagatgtttttaccactgacactgttttctgattatagtctgcttcatagaaaatagcctgcataatcaaacaaggagttactttgaaattaaagtatgcctggctattaaaaatgcagattttaggtgggtaaacatcaggtaggtctgggtgggtcatgttctaggcctagaaaaatacactattagacaagttctaaagaaggcaaggagataaaggcatcaggtggtaacttctaattgaatattatatgttgatcatacataatatatactatgcctggaaattatgactgaaaagcacctattcggttagtgctcctattcatgagaacatatctccaatactaaatgagataagcctgttctaaaatcttatagccagtattttaagaaacttgattatacttaccaaaggaacattgtttgttttctcttgttttaaatatggagaggtttaatcctttacataacaaaggaattaattttagcaaaatgattcattccaaccttcttataagaaatatctaggagagtcaagtaagaaaaataacgaatctaagtgataaacattcaagaaattctctaaataagagatttatttataattttaatatctcagggttctttttaggtttccaggggaaaagagcaggataacagtgtggagactgctaagttgagaatttaaaacaaatgagaacataagatttttaaaattgcattgtgaatgtaaaatttttatcaatcctttgctctcttttagacatattg

SEQ ID NO: 118623 - DNA, 389 bp, Homo sapiens
  Payload ID: 3217
  Gene Symbol: C18orf54
  Gene Name: chromosome 18 open reading frame 54
  ENST ID: ENST00000579594
  CDS Start-End: 1-108
gaaagtatgattcctattactaggtcacttcagaaggctttgcaccatttatctcgcctgagagacctggttgatgatacgaatggagaacggtcaccgaaaatgtgaagaggaaaatgaaactgtcaccacaatgaatagtcaccacagaacaaataggcattttttctattacttaaactgacaaaaacatttttggtagaagtgctatccagaagtgaacttgtcaaaagctctggccaagtattttatttcgtccctaaacattctaactatccaccaaactggggccctctgatccatccaaaaagcccggcatcaggaaagacaatttcaaaactgaagtttgattttgggaagcctattaaatatgttagaagttcaaacca

SEQ ID NO: 118624 - DNA, 776 bp, Homo sapiens
  Payload ID: 3217
  Gene Symbol: C18orf54
  Gene Name: chromosome 18 open reading frame 54
  ENST ID: ENST00000578138
  CDS Start-End: 133-588
gcggtttgaaagcgagcgcgggtgtcgagctctgctgtgactgcggaggaagctgcgagtgacaaaattgaattgcttatcttgaaggccaagagaaatctagagcagtgtactgaagaattaccaaagtccatgaaaaaggatgacagtccttgctcattagataaacttgaagcagacagatcatgggaaaatattcctgttactttcaaatctcctgttcccgttaactctgatgatagtcctcaacaaacttcaagggcaaagagtgctaaaggggttcttgaagactttctaaataatgataatcagagctgtactctctctggaggcaaacatcatggtcctgttgaagccctgaaacaaatgttatttaaccttcaagcagtacaagaacgttttaatcaaaataagaccacagatccaaaagaagagattaaacaagtttcagaagatgatttctctaaattacagttgaaggaaagtatgattcctattactaggtcacttcagaaggctttgcaccatttatctcgcctgagagacctggttgatgatacgaatggagaacggtcaccgaaaatgtgaagaggaaaatgaaactgtcaccacaatgaatagtcaccacagaacaaataggcattttttctattacttaaactgacaaagtaaatataagccatacattattttgtggttggttcaaggattatatatttctaaaacactaaacttgaaaatacccataggttttgggacctatctttattttgtgc

SEQ ID NO: 118625 - DNA, 5693 bp, Homo sapiens
  Payload ID: 3217
  Gene Symbol: C18orf54
  Gene Name: chromosome 18 open reading frame 54
  Uniprot ID: Q8IYD9
  ENST ID: ENST00000620105
  CDS Start-End: 303-1904
gcggtttgaaagcgagcgcgggtgtcgagctctgctgtgactgcggaggaagctgcgagtgagccgagcctgaggcggggcggtgtccgggttggggatgctttgtggtgtctcgcgttgggtaacaggcctgagctttcggcggagagctgtggaagtttagttaaaatttgttgtcaataagtttaacattctgttcttccgcgtgatggattttcttttggagattcgaactgaagcctgtacggaggaaatgttgtttttaagggaaatgaatagaaacaatccactttgaagaagccatggcgaaatcaaagacaaaacatagactttgttctcaggaatcttcagtatctgccctgctggcaagctgcaccctgagtggtagtaattcctctaattctgatggctcgtttcactataaagataagctgtacagatctgcttctcaagctctacaggcttatattgatgattttgatctaggccaaatatatcctggtgcaagcactggaaaaattaacattgatgaggattttactaatatgtcacagttctgcaactatatttacaaaccaaacaatgcttttgaaaaccttgatcacaaaaagcactcaaacttcatatcctgtagaagacacaccgttaatgacatagactccatgagcctaacaactgatgatctattaagactcccagcagatggatcattttcttatacttatgttggaccgagtcaccgaacgagcaagaaaaacaagaaatgccgtggaagactgggttcattggacattgagaagaatccacattttcaaggaccctacacttccatgggcaaggataactttgttactcctgttatacgctcaaatataaatggaaagcaatgtggtaggctgaaaaacccaaaacttatgaataggactaataattgcatttctgaatcatctttgtcttttcccaagaaatcgtctttcaaggacagttcagaacacagtcttgaaaagaattacccaagatggctcactagccagaaatctgaccttaatgtttcagggataactagtatacctgatttcaaatacccagtctggctgcacaatcaagacttgctacctgatgcaaatagtcaaagggtttatcagatatttaaagatgatcagtgttcccctagacatagtcatcaggcacaaggaacttctcggcttatcaataaattagattgttttgaatatgcttttgaaccctcaaacttttcaaattccttgagtgatgataaagaattagttaatgaatacaaatgtgattttgaacatagccagtgtcaatgtgagaatccacttctcccaggacaatccacaaagccattcagtggtgacaaaattgaattgcttatcttgaaggccaagagaaatctagagcagtgtactgaagaattaccaaagtccatgaaaaaggatgacagtccttgctcattagataaacttgaagcagacagatcatgggaaaatattcctgttactttcaaatctcctgttcccgttaactctgatgatagtcctcaacaaacttcaagggcaaagagtgctaaaggggttcttgaagactttctaaataatgataatcagagctgtactctctctggaggcaaacatcatggtcctgttgaagccctgaaacaaatgttatttaaccttcaagcagtacaagaacgttttaatcaaaataagaccacagatccaaaagaagagattaaacaagtttcagaagatgatttctctaaattacagttgaaggaaagtatgattcctattactaggtcacttcagaaggctttgcaccatttatctcgcctgagagacctggttgatgatacgaatggagaacggtcaccgaaaatgtgaagaggaaaatgaaactgtcaccacaatgaatagtcaccacagaacaaataggcattttttctattacttaaactgacaaagtaaatataagccatacattattttgtggttggttcaaggattatatatttctaaaacactaaacttgaaaatacccataggttttgggacctatctttattttgtgccaacatactagaatgtgaactgcaaggacccacaatatatcctgaagtcttactttcgccttctggccagcaaatgtctaatatttaaagatggatgacttctgttcttgaagcttacctggatttaaccttcttcagcatcctcaacattttattacctggttcaggatcattaagaaacttactggtttttatccaaaatcttttacgttaaatagacttttttaaagatatagttagcatcacttttaaacagcttaaaggaatatcaaaattgttattgtgtatctcatctataaggaagtctgttactttgaaattttcataaatttaatatttaagatacattgtatttgaaaattgcattaatagtggggtgatactgtgttaaaaggaatgttgtgttgtgacattcaagagaacctcctcatttaattagtactttgattctgtgtaagataatcttggtagtgcttgacagtttccaaacctttttttggagagatatttaagaatttaatattttgatattagattgtttcccagattttaattttggggttggctcaaactagtgaaaactatgactcaatggccaattgctttatcaaatttgataactaaaacttaaaatgaatatggaaaatcagaaagcaactctattttagagctattttgtaagagttgtgctttctttaacaccatctgtagtcttaagtttgtctctagctagaactgaacaaagctctataatttttaccaagcacttattattaatacttcttataagtagtaagcatctttactaacacaactgagaattaagtcataaaacataactaatacagcacattactgcctgacaaaattaaagagtactgtgtgtatgtataactactacaggttaacacttcacccaaatgatagcgtttttcctcagtagattattgtcaaataggaatttctaagcacattgagtcaaagcattttttccaagttaataaagtgttatttactatctttgttagaggtgacatgtcaaacactacagtgagctctgtggggttttttttttttttttttgcccgtgagttttttaccatgctgctctgaccagtttgagtggcaattaccaatagatttgttttctttattctatggagatgtttttaccactgacactgttttctgattatagtctgcttcatagaaaatagcctgcataatcaaacaaggagttactttgaaattaaagtatgcctggctattaaaaatgcagattttaggtgggtaaacatcaggtaggtctgggtgggtcatgttctaggcctagaaaaatacactattagacaagttctaaagaaggcaaggagataaaggcatcaggtggtaacttctaattgaatattatatgttgatcatacataatatatactatgcctggaaattatgactgaaaagcacctattcggttagtgctcctattcatgagaacatatctccaatactaaatgagataagcctgttctaaaatcttatagccagtattttaagaaacttgattatacttaccaaaggaacattgtttgttttctcttgttttaaatatggagaggtttaatcctttacataacaaaggaattaattttagcaaaatgattcattccaaccttcttataagaaatatctaggagagtcaagtaagaaaaataacgaatctaagtgataaacattcaagaaattctctaaataagagatttatttataattttaatatctcagggttctttttaggtttccaggggaaaagagcaggataacagtgtggagactgctaagttgagaatttaaaacaaatgagaacataagatttttaaaattgcattgtgaatgtaaaatttttatcaatcctttgctctcttttagacatattgagaaaatgttaaatagaaaaaattaagaaattttaataagatgtttcagatctttgagtatgaaaaacataacaaaaaaagcctaatttcaaaaaactatttgagatcaagggacaatggtgtgaccaatatgaagggtcaagactgaaatgtattgtctttactatcaagaactctactttcagttgtttctcagacagttaatttcagcttcatagagatttctgagcaaattaagaaacactgttttcctgggtttgttttgggtatatgtcattatagttatgttatttcttgttgaaatttataattgtaggttttttgtattgttttagtatttaatggtgtataatgtgttattacattatatgtagttataccaaaatattgcctgaagataaatcatgacaaggtcccctgtttattcctgtgttacagacgcatggaattgctcctgtagatttgaatttttgtttcatttttttctgtcccacccttcactctctctgtttcagaacatttttggtagaagtgctatccagaagtgaacttgtcaaaaggcaagtagcatgaaagaagacagaagaagcaaaaggctaatacagtggataatttctgagcacttgaagtttcttcaaatgtgcaagactgtgtgtcttcctattagatgtataaattggatatttcatgcctaattaaatgttgcgttggattgcagtgcctatcatacagtgattggagtaaattgaggcctaatcctgaacacatatagagcatattgttagatatttttcctgtgacatttgaagttattattctcccatttcctttttctttttttgtttataatcatatgtccctaagattgttttccttttttggaccaaaaaaaagaaaaaaaaaatcttagcttttcatcctcccagtgtattctgcattgtccttaccctagatcagccccttctgtgttaacagtttttctcacaatgtagcaacttttatccacccttcaggaccttcactgggactagttcattcattttcaaatagctatttcaacctttaacatctactgtcttagtcttttacacagaagccagagtgactggtcttggcaagactctgttgtgtatcaccactctaaccttactgatttgtttcagcaaatttgctttagttaaattgctttactcagattcccccaaactttatatgtgtattgtcatctttgtgcatattatttctcatgcatgaaatactcaatttttattcttttatctaacgcttactcttacatttctttaaagctctggccaagtattttatttcgtccctaaacattctaactatccaccaaactggtaagttggcttttctttttcctccccctgtcattcatttagctgttatatttcattttaatgttttgggtggtgcctcttatactatgttgtattcctagacaaggaaatgtatatcaaaatatgttagatgattgattgttttatctccttgatgatagcacctcttatactgctttacagaatcaggaaaaagtaaactgcattttacatagtggttttaaatattgattgattgatattctaaacctggtttcctatataaagttgtaagttcaagataaagagaccacattctttactcat

SEQ ID NO: 118626 - DNA, 5127 bp, Homo sapiens
  Payload ID: 3218
  Gene Symbol: C18orf63
  Gene Name: chromosome 18 open reading frame 63
  Uniprot ID: Q68DL7
  ENST ID: ENST00000579455
  CDS Start-End: 330-2387
gggctgtgaggagggcacgaggggacactccgatgaaggcagggcacgcggggcgagccgggagcgtctcctgagggcagcgaggagggagctgaggcacgcgggctctcaatcgacgccccacagagaccaagaggcctggccttggggggcagctgcttgaaggaggcagagcggaagcgagggagactgctggaggccctgccgcccacccgccctttcctccccctgaggagacgcctgacgcatctgcagtgcaggaggccgtgggcgttagaagtgttgcttttccagtttgcctgattgctgagacactcagtcaggaaagtatgaatgattctaggcagcagtctctgttcttcatcacacttccagatttaaacaaactctgtgctgtcagaataatactgagtaataaggtggcagatactgagattaggactatacaaatgaagatgtgcaggcaattgctgtttttgcatcaagatattcttacatcacctgtgtctggaatattaaaccaaatctgggtggtgatggcgataccattttataaagcaagaaaacttaatgcctatgttgaaaaatatggagctaagatggaggctccacaaagagtaattcctgtaattcttcagaactgcctgtcatattcattcatggctagacttgctccagcctggaatagaactggtcatctcttgatacaaggaagagattttctttctcagatgggaaaacaaagtgctgttgtattaaacatcaatgtaacagaaactcaagtttgtctaagtatagaagcttgcacaatcagactgccagcacctgagctaaaagagtttgagatttcccagagtattataaaggattttcatgctaacaagcatgctgtcattgagagacattccattttaagcaactggtgctacgttttgccaagtatgaaaatgggacaaattataaatatttttcatgccatccccgctgcctgtccttttcactcatatggagatttccagagacactgggatgccctgtatggctataaacttccaggtgattgtggaaaaattaaaatatactgcaacatctatttcaaaatgctcggagaaaggaccttcacatatcctctcagttgcatcagaagtcagcccatgcagttctttccaagggtagattcggaagttgtgttgaaaagttttctttcagatttaaaatctaaactgccccatatatgtggatttcccataaagatgacaagtaaaccatgctactacacacaagaactaactaaacctaatatacaggaacacaaagtcaagccacccaatttgaccactaaaaaaatgcttagggcatctctgactcaagccacttccagaaagcctgcctgtgctcaaagtcttctaccatgttcagtagcagtggaccacaaggtggagctttcagtcagccagccaacatcaggcattttctcagctttgcatctccagccagagtctgttcagggtagaaagaaatccctgtctatcagggctccacaagtacattcagaagtattaatgcccaacagaggaaatactcaagttcagcacacaaatcttagctcccaaagcaacatcacccctaagtttgtaccagttttcaaaaatagattgttacaaatgaacaaaaatacctcagtacttggcagcccaaaaagaaaacagcatgatgtgacacaatctaaattgttttcactcaaaactagtatgatccagcatgacaaactgaatttaggtccagctataaaaaaccgttatagtagtaacattcagatgcaggctgctaacaatttaaatcaggagaattccagacctctgcaagaaaaaaatacagagtcttctgaaaatatgacaaaatttccctcttctcgtggaaaatcgactgtgagtttaaacaaaaataagcaactatctaatagtgcagtatttgtggtgtcaaataacaatttaggggtggtaaaaagtgctgttgacttccaaatgaaaggaaaagaaaatttaacaggcaaaggtataacacaaattttagggaaaagccatgggtcactaaaactgaaaagacagccacacatttttgaatcagatggagaaaccgaagatccacgactgctacagcagcaatcagaaaatcaagctaaagaagttggtacaagtgaccacaggttgatagtaagcaaaatagcccacaggtctaaaagaaaattatgtccagagtcttccaaaacttcaaagaagcatcattccgatactgtgcactatggccaatccagttcttctaagaagcagatacttgactcggataaatcaaaacttaagaaatctctcatcattcataatgcttagaacatggacctgaaagaaggaaatgtctaccagagatgagcattctgaatataggatgaacactcttccagatgcctctcacactcctgtgaccatgaaatcagctctacttactgctgtggaacctcctttttcacttgacagtttctttttattgtttgcatagcatcttgttgtatgtgggtttctgtatttaactagtcccctattgatagacacttcagttcttcccaacttttcactattacaacatcatgtagtctgcagatctttgcaaaatatccaatgatcttatacagtagttttgatagttgaaaatatctttattttgcccttattgaaattatcaaaccacataaagcacagataagagtatgaagaacctctaagtacctatcacccagatctaccagttattaatattttgccactgtttcatctgttcctcacagacatgcttttttttgctataatcttttaaagcaaattcaagacatcatataattttacccataaacaccaaagtgtatatatttctaacataagatatagtatattttttaagaaaaaaagaatgtgtatatatatattacattttggggatctctactatatctctgcaggctcactaaatttcacttttgcttttatatgcaaattaacaggaagccctgaataaatgtaaaagctatttctcaacaaaactggagcctttattggggtggagatttctgtttccaccagtactcattagcatcttctgtgtgccaggcagtggggacaacactgtgtccatggcagaaatggatgagacagccgtggcctgagcccctgagtgctggtggtctagtctcaagcaaattcattctgggttcctggcacagacttagggatatgtatgtattgaagcatatgtccagaatgaccttctagtccatattacaaataaattatctaacatttgaaaaaaagagaaacagaagtggagcttctcagacaatgaatattattctggctttcaaacattttatatgtttgatatacgaaatattatataattgttgtaatatatttaaaagaaaccaaaatcttcattggctattccactgaaacaataattacataaaaatagccactagagatccaagtataagttgaactctgattttgtaaatgtgatttattgtctccaccactttactaaaccattgcaattaaaagcaaaagtaaacaaactctccttcaaacgttaaatgttaactcctgctcctgaaattgtgtttagttaattaatttgctatatacctttattgtaagcatttctgttttccagaattatctctatttcccaattattttaccattttcataaggataagcattttgtctgaagcccattttgagtgtgcttttctcattccaaagtttgtattatagatatctagtagactgttataaagagtggtatgtcattttgtttatgaggctatggtgaaaataacattagtaaatatgcatttttgatgagcacagtcatccacagcatgtaatcattcctaaaaccagccttccccactgttccatacattcccaggccaccttcctgctactgcccagtcactatgcctcaggtaatggacacttactttattattacactgagcaaaataatgaaaaccatacatccactgctgaagtggtattaacatcttccagttctttatataaataatcttgatagcccctcctatactccattagtgtctaaaatttagaatatatagtatagtacttgagtttagatcaatgttaacctacatggcaaaacctgccatgtttagtgtatttttttgtataaagtaggtttgatttttatcttacaatatttatcctaatgaaagttataaaaatatatgcatatatttatatgtgagatttaatatagataggtatatagattgttgatttcatatttcatgttccaagaagaggttctagatcaaatttctgtgttcagaatcaccagagaaatcaattaagattttggttcattttaaacattgcaatttttgaaagccaagataattccaaatctaattagggaaagctacattttacttctttgtgtaagttattggtgatttatatgcagtatggaccatcctccccccagaaattattcttatattccaattgtgcattagttttagaaccattttaattttaaaaccataagaaaataattttatgtttgcctatgtccaggagctgaagaaatcagcgattactttaaaaaatatatggcaatgtcaaaataaatgccaagaatcatatttctaggaatgcaaaagtgcttctcatatactcatatattaggtttcacagtattggttgcttactatatttgtttttatttttattatatatcataattacacatttttatttgcatttgttgcttattgtagtaaaaaggtaaaaaaaaaatgaacttgttaatgattagcttttatttgactaaccagttgaccaattttgctctgttttcaaattgcatatgatggggtattatgctgaaactgctaatatattgggtatttattgatacttaggaatagtcagtatttataaatatttaagaatgtcatggtccttatgttttgatgtttaaaatgttcactttgttgtacgttacatagtgtcttattcaaaattgaaaataataaaggtatttctaata

SEQ ID NO: 118627 - DNA, 2162 bp, Homo sapiens
  Payload ID: 3219
  Gene Symbol: C18orf8
  Gene Name: chromosome 18 open reading frame 8
  Uniprot ID: Q96DM3
  ENST ID: ENST00000269221
  CDS Start-End: 111-2084
ccagagccgcagccgcagccgccgctacagtccgggccgggctccaccgcgcatcctgctccactctggcgaccgcccccggggcccccgccgcgggcgcggcgcccgccatgggcgaggaggactactatctggagctgtgcgagcggccggtgcagttcgagaaggcgaaccctgtcaactgcgtcttcttcgatgaggccaacaagcaggtttttgctgttcgatctggtggagctactggcgtggtagttaaaggcccagatgataggaatcccatctcatttagaatggatgacaaaggagaagtgaagtgcattaagttttccttagaaaataagatattggctgttcagaggacctcaaagactgtggatttttgtaattttatccctgataattcccagctggaatacacacaggagtgcaagactaagaatgccaacattctaggattctgctggactagttcaactgaaattgtcttcataacagatcaaggaatcgaattttaccaggtattaccagagaaacggagtctgaaactcttgaagagccacaatctcaatgtgaattggtacatgtactgccccgagagcgccgtgatcttgctgtctaccacggtcctggagaatgtcctgcagccttttcactttagggctggcactatgtcgaagctgcccaaatttgagattgaattaccagctgcgcctaagtcaactaaacccagcctttccgaaagagacatcgcaatggctaccatatacgggcagctgtatgttctcttcttgaggcatcattctcggacctccaacagcacaggagcggaggtggtcctctatcatctaccacgagaaggtgcctgtaaaaagatgcacatattgaagttaaataggacgggaaagtttgccctgaacgtggtggacaacctggtagtcgtgcatcatcaggatacagagacatcggtaatattcgatatcaagttacggggagagtttgacggctccgttaccttccaccaccccgtgcttcccgctcgatcgatccagccctatcagatccccatcacaggtcctgctgccgtgaccagccagtctcctgttccatgtaaactctattcttcatcttggattgtctttcaacctgacatcattatcagcgcaagccaaggttacctctggaacctccaagtgaaacttgagcccatagtaaatctcttaccagacaaaggaagactcatggactttctcctccagagaaaggaatgcaagatggtcatcctgtctgtctgttcacagatgttaagtgagtcagacagagcatcgctgcccgtgatagccactgtttttgataaactcaaccatgagtataaaaagtacctggatgccgagcagagttatgcgatggcggtggaagcagggcagagccgaagcagcccgctcctcaagaggccggtgcggacccaggcggtgctggaccagtcagatgtgtacacccatgtcctgtcagcctttgtggaaaagaaggagatgcctcataaatttgtgatagccgtgctgatggaatacattcgttctcttaaccagtttcagattgcagtacagcattacctacatgaacttgttatcaaaacccttgtccagcacaacctcttttatatgctgcatcagttcctgcagtaccacgtcctcagcgactccaaacctttggcttgtctgctgttatccctagagagtttctatcctcctgctcatcagctatctctggacatgctgaagcgactttcaacagcaaatgatgaaatagtagaagttctcctttccaaacaccaagtgttagctgccttaaggtttatccggggcattggtggccatgacaacatttctgcacgaaaatttttagatgctgcaaagcagactgaagacaacatgcttttctatacaatattccgcttttttgaacagcgaaaccagcgtttgcgagggagccccaatttcacaccaggggaacactgtgaagaacatgttgcttttttcaaacagatttttggagaccaagctctaatgaggcctacaacattctgaaatcacttgctgtttttttatataaaaatgtgtacaaagttaatttattgcattaataaagctctttaaactataaaa

SEQ ID NO: 118628 - DNA, 2102 bp, Homo sapiens
  Payload ID: 3219
  Gene Symbol: C18orf8
  Gene Name: chromosome 18 open reading frame 8
  ENST ID: ENST00000590870
  CDS Start-End: 87-1088
ctacagtccgggccgggctccaccgcgcatcctgctccactctggcgaccgcccccggggcccccgccgcgggcgcggcgcccgccatgggcgaggaggactactatctggagctgtgcgagcggccggtgcagttcgagaaggcgaaccctgtcaactgcgtcttcttcgatgaggccaacaagcaggtttttgctgttcgatctggtggagctactggcgtggtagttaaaggcccagatgataggaatcccatctcatttagaatggatgacaaaggagaagtgaagtgcattaagttttccttagaaaataagatattggctgttcagaggacctcaaagactgtggatttttgtaattttatccctgataattcccagctggaatacacacaggagtgcaagactaagaatgccaacattctaggattctgctggactagttcaactgaaattgtcttcataacagatcaaggaatcgaattttaccaggtattaccagagaaacggagtctgaaactcttgaagagccacaatctcaatgtgaattggtacatgtactgccccgagagcgccgtgatcttgctgtctaccacggtcctggagaatgtcctgcagccttttcactttagggctggcactatgtcgaagctgcccaaatttgagattgaattaccagctgcgcctaagtcaactaaacccagcctttccgaaagagacatcgcaatggctaccatatacgggcagctgtatgttctcttcttgaggcatcattctcggacctccaacagcacaggagcggaggtggtcctctatcatctaccacgagaaggtgcctgtaaaaagatgcacatattgaagttaaataggacgggaaagtttgccctgaacgtggtggacaacctggtagtcgtgcatcatcaggatacagagacatcggtaatattcgatatcaagttacggggagagtttgacggctccgttaccttccaccaccccgtgcttcccgctcgatcgatccagccctatcagatccccatcacaggtcctgctgccgtgaccagccagtctcctaatttcctataacatgtggattcttcatcttggattgtctttcaacctgacatcattatcagcgcaagccaaggttacctctggaacctccaagtgaaacttgagcccatagtaaatctcttaccagacaaaggaagactcatggactttctcctccagagaaaggaatgcaagatggtcatcctgtctgtctgttcacagatgttaagtgagtcagacagagcatcgctgcccgtgatagccactgtttttgataaactcaaccatgagtataaaaagtacctggatgccgagcagagttatgcgatggcggtggaagcagggcagagccgaagcagcccgctcctcaagaggccggtgcggacccaggcggtgctggaccagtcagatgtgtacacccatgtcctgtcagcctttgtggaaaagaaggagatgcctcataaatttgtgatagccgtgctgatggaatacattcgttctcttaaccagtttcagattgcagtacagcattacctacatgaacttgttatcaaaacccttgtccagcacaacctcttttatatgctgcatcagttcctgcagtaccacgtcctcagcgactccaaacctttggcttgtctgctgttatccctagagagtttctatcctcctgctcatcagctatctctggacatgctgaagcgactttcaacagcaaatgatgaaatagtagaagttctcctttccaaacaccaagtgttagctgccttaaggtttatccggggcattggtggccatgacaacatttctgcacgaaaatttttagatgctgcaaagcagactgaagacaacatgcttttctatacaatattccgcttttttgaacagcgaaaccagcgtttgcgagggagccccaatttcacaccaggggaacactgtgaagaacatgttgcttttttcaaacagatttttggagaccaagctctaatgaggcctacaacattctgaaatcacttgctgtttttttatataaaaatgtgtacaaag

SEQ ID NO: 118629 - DNA, 787 bp, Homo sapiens
  Payload ID: 3219
  Gene Symbol: C18orf8
  Gene Name: chromosome 18 open reading frame 8
  ENST ID: ENST00000589860
  CDS Start-End: 89-289
cgctacagtccgggccgggctccaccgcgcatcctgctccactctggcgaccgcccccggggcccccgccgcgggcgcggcgcccgccatgggcgaggaggactactatctggagctgtgcgagcggccggtgcagttcgagaaggcgaaccctgtcaactgcgtcttcttcgatgaggccaacaagcaggtttttgctgttcgatctggtggagctactggcgtggtagttaaaggcccagatgataggaatcccatctcatttagactaagaatgccaacattctaggattctgctggactagttcaactgaaattgtcttcataacagatcaaggaatcgaattttaccaggtattaccagagaaacggagtctgaaactcttgaagagccacaatctcaatgtgaattggtacatgtactgccccgagagcgccgtgatcttgctgtctaccacggtcctggagaatgtcctgcagccttttcactttagggctggcactatgtcgaagctgcccaaatttgagattgaattaccagctgcgcctaagtcaactaaacccagcctttccgaaagagacatcgcaatggctaccatatacgggcagctgtatgttctcttcttgaggcatcattctcggacctccaacagcacaggagcggaggtggtcctctatcatctaccacgagaaggtgcctgtaaaaagatgcacatattgaagttaaataggacgggaaagtttgccctgaacgtggtggacaacctggtagtcgtgcatcatcagg

SEQ ID NO: 118630 - DNA, 2002 bp, Homo sapiens
  Payload ID: 3219
  Gene Symbol: C18orf8
  Gene Name: chromosome 18 open reading frame 8
  ENST ID: ENST00000590868
  CDS Start-End: 101-1930
agccgcagccgccgctacagtccgggccgggctccaccgcgcatcctgctccactctggcgaccgcccccggggcccccgccgcgggcgcggcgcccgccatgggcgaggaggactactatctggagctgtgcgagcggccggtgcagttcgagaaggcgaaccctgtcaactgcgtcttcttcgatgaggccaacaagcaggtttttgctgttcgatctggtggagctactggcgtggtagttaaaggcccagatgataggaatcccatctcatttagaatggatgacaaaggagaagtgaagtgcattaagttttccttagaaaataagatattggctgttcagaggacctcaaagactgtggtattaccagagaaacggagtctgaaactcttgaagagccacaatctcaatgtgaattggtacatgtactgccccgagagcgccgtgatcttgctgtctaccacggtcctggagaatgtcctgcagccttttcactttagggctggcactatgtcgaagctgcccaaatttgagattgaattaccagctgcgcctaagtcaactaaacccagcctttccgaaagagacatcgcaatggctaccatatacgggcagctgtatgttctcttcttgaggcatcattctcggacctccaacagcacaggagcggaggtggtcctctatcatctaccacgagaaggtgcctgtaaaaagatgcacatattgaagttaaataggacgggaaagtttgccctgaacgtggtggacaacctggtagtcgtgcatcatcaggatacagagacatcggtaatattcgatatcaagttacggggagagtttgacggctccgttaccttccaccaccccgtgcttcccgctcgatcgatccagccctatcagatccccatcacaggtcctgctgccgtgaccagccagtctcctgttccatgtaaactctattcttcatcttggattgtctttcaacctgacatcattatcagcgcaagccaaggttacctctggaacctccaagtgaaacttgagcccatagtaaatctcttaccagacaaaggaagactcatggactttctcctccagagaaaggaatgcaagatggtcatcctgtctgtctgttcacagatgttaagtgagtcagacagagcatcgctgcccgtgatagccactgtttttgataaactcaaccatgagtataaaaagtacctggatgccgagcagagttatgcgatggcggtggaagcagggcagagccgaagcagcccgctcctcaagaggccggtgcggacccaggcggtgctggaccagtcagatgtgtacacccatgtcctgtcagcctttgtggaaaagaaggagatgcctcataaatttgtgatagccgtgctgatggaatacattcgttctcttaaccagtttcagattgcagtacagcattacctacatgaacttgttatcaaaacccttgtccagcacaacctcttttatatgctgcatcagttcctgcagtaccacgtcctcagcgactccaaacctttggcttgtctgctgttatccctagagagtttctatcctcctgctcatcagctatctctggacatgctgaagcgactttcaacagcaaatgatgaaatagtagaagttctcctttccaaacaccaagtgttagctgccttaaggtttatccggggcattggtggccatgacaacatttctgcacgaaaatttttagatgctgcaaagcagactgaagacaacatgcttttctatacaatattccgcttttttgaacagcgaaaccagcgtttgcgagggagccccaatttcacaccaggggaacactgtgaagaacatgttgcttttttcaaacagatttttggagaccaagctctaatgaggcctacaacattctgaaatcacttgctgtttttttatataaaaatgtgtacaaagttaatttattgcattaataaagctctttaaact

SEQ ID NO: 118631 - DNA, 660 bp, Homo sapiens
  Payload ID: 3219
  Gene Symbol: C18orf8
  Gene Name: chromosome 18 open reading frame 8
  ENST ID: ENST00000587690
  CDS Start-End: 100-564
gccgcagccgccgctacagtccgggccgggctccaccgcgcatcctgctccactctggcgaccgcccccggggcccccgccgcgggcgcggcgcccgccatgggcgaggaggactactatctggagctgtgcgagcggccggtgcagttcgagaaggcgaaccctgtcaactgcgtcttcttcgatgaggccaacaagcaggtttttgctgttcgatctggtggagctactggcgtggtagttaaaggcccagatgataggaatcccatctcatttagaatggatgacaaaggagaagtgaagtgcattaagttttccttagaaaataagatattggctgttcagaggacctcaaagactgtggatttttgtaattttatccctgataattcccagctggaatacacacaggagtgcaagggcggactctttggtgaggagaggtgcatccccaccactgtcctgcctgccctgcagtggccccgtgtgaagagaccctcagcccggcccttctcaaacctgtctgccctcaagcgagtcggactaagaatgccaacattctaggattctgctggactagttcaactgaaattgtcttcataacagatcaaggaatcgaattttaccaggtattaccagagaaacggagtctgaaactct

SEQ ID NO: 118632 - DNA, 1945 bp, Homo sapiens
  Payload ID: 3219
  Gene Symbol: C18orf8
  Gene Name: chromosome 18 open reading frame 8
  ENST ID: ENST00000589215
  CDS Start-End: 107-364
agccgcagccgcagccgccgctacagtccgggccgggctccaccgcgcatcctgctccactctggcgaccgcccccggggcccccgccgcgggcgcggcgcccgccatgggcgaggaggactactatctggagctgtgcgagcggccggtgcagttcgagaaggcgaaccctgtcaactgcgtcttcttcgatgaggccaacaagcaggtttttgctgttcgatctggtggagctactggcgtggtagttaaaggcccagatgataggaatcccatctcatttaggatttttgtaattttatccctgataattcccagctggaatacacacaggagtgcaagactaagaatgccaacattctaggattctgctggactagttcaactgaaattgtcttcataacagatcaaggaatcgaattttaccaggtattaccagagaaacggagtctgaaactcttgaagagccacaatctcaatgtgaattggtacatgtactgccccgagagcgccgtgatcttgctgtctaccacggtcctggagaatgtcctgcagccttttcactttagggctggcactatgtcgaagctgcccaaatttgagattgaattaccagctgcgcctaagtcaactaaacccagcctttccgaaagagacatcgcaatggctaccatatacgggcagctgtatgttctcttcttgaggcatcattctcggacctccaacagcacaggagcggaggtggtcctctatcatctaccacgagaaggtgcctgtaaaaagatgcacatattgaagttaaataggacgggaaagtttgccctgaacgtggtggacaacctggtagtcgtgcatcatcaggatacagagacatcggtaatattcgatatcaagttacggggagagtttgacggctccgttaccttccaccaccccgtgcttcccgctcgatcgatccagccctatcagatccccatcacaggtcctgctgccgtgaccagccagtctcctgttccatgtaaactctattcttcatcttggattgtctttcaacctgacatcattatcagcgcaagccaaggttacctctggaacctccaagtgaaacttgagcccatagtaaatctcttaccagacaaaggaagactcatggactttctcctccagagaaaggaatgcaagatggtcatcctgtctgtctgttcacagatgttaagtgagtcagacagagcatcgctgcccgtgatagccactgtttttgataaactcaaccatgagtataaaaagtacctggatgccgagcagagttatgcgatggcggtggaagcagggcagagccgaagcagcccgctcctcaagaggccggtgcggacccaggcggtgctggaccagtcagatgtgtacacccatgtcctgtcagcctttgtggaaaagaaggagatgcctcataaatttgtgatagccgtgctgatggaatacattcgttctcttaaccagtttcagattgcagtacagcattacctacatgaacttgttatcaaaacccttgtccagcacaacctcttttatatgctgcatcagttcctgcagtaccacgtcctcagcgactccaaacctttggcttgtctgctgttatccctagagagtttctatcctcctgctcatcagctatctctggacatgctgaagatgctgcaaagcagactgaagacaacatgcttttctatacaatattccgcttttttgaacagcgaaaccagcgtttgcgagggagccccaatttcacaccaggggaacactgtgaagaacatgttgcttttttcaaacagatttttggagaccaagctctaatgaggcctacaacattctgaaatcacttgctgtttttttatataaaaatgtgtacaaagttaatttattgcattaataaagctctttaaactat

SEQ ID NO: 118633 - DNA, 1958 bp, Homo sapiens
  Payload ID: 3219
  Gene Symbol: C18orf8
  Gene Name: chromosome 18 open reading frame 8
  ENST ID: ENST00000615148
  CDS Start-End: 150-1835
gtgggggcgtggcaccaggaagcggcgtccgcgccgggcccagagccgcagccgcagccgccgctacagtccgggccgggctccaccgcgcatcctgctccactctggcgaccgcccccggggcccccgccgcgggcgcggcgcccgccatgggcgaggaggactactatctggagctgtgcgagcggccggtgcagttcgagaaggcgaaccctgtcaactgcgtcttcttcgatgaggccaacaagcaggtttttgctgttcgatctggtggagctactggcgtggtagttaaaggcccagatgataggaatcccatctcatttagaatggatgacaaaggagaagtgaagtgcattaagttttccttagaaaataagatattggctgttcagaggacctcaaagactgtggtattaccagagaaacggagtctgaaactcttgaagagccacaatctcaatgtgaattggtacatgtactgccccgagagcgccgtgatcttgctgtctaccacggtcctggagaatgtcctgcagccttttcactttagggctggcactatgtcgaagctgcccaaatttgagattgaattaccagctgcgcctaagtcaactaaacccagcctttccgaaagagacatcgcaatggctaccatatacgggcagctgtatgttctcttcttgaggcatcattctcggacctccaacagcacaggagcggaggtggtcctctatcatctaccacgagaaggtgcctgtaaaaagatgcacatattgaagttaaataggacgggaaagtttgccctgaacgtggtggacaacctggtagtcgtgcatcatcaggatacagagacatcggtaatattcgatatcaagttacggggagagtttgacggctccgttaccttccaccaccccgtgcttcccgctcgatcgatccagccctatcagatccccatcacaggtcctgctgccgtgaccagccagtctcctgttccatgtaaactctattcttcatcttggattgtctttcaacctgacatcattatcagcgcaagccaaggttacctctggaacctccaagtgaaacttgagcccatagtaaatctcttaccagacaaaggaagactcatggactttctcctccagagaaaggaatgcaagatggtcatcctgtctgtctgttcacagatgttaagtgagtcagacagagcatcgctgcccgtgatagccactgtttttgataaactcaaccatgagtataaaaagtacctggatgccgagcagagttatgcgatggcggtggaagcagggcagagccgaagcagcccgctcctcaagaggccggtgcggacccaggcggtgctggaccagtcagatgtgtacacccatgtcctgtcagcctttgtggaaaagaaggagatgcctcataaatttgtgatagccgtgctgatggaatacattcgttctcttaaccagtttcagattgcagtacagcattacctacatgaacttgttatcaaaacccttgtccagcacaacctcttttatatgctgcatcagttcctgcagtaccacgtcctcagcgactccaaacctttggcttgtctgctgttatccctagagagtttctatcctcctgctcatcagctatctctggacatgctgaagatgctgcaaagcagactgaagacaacatgcttttctatacaatattccgcttttttgaacagcgaaaccagcgtttgcgagggagccccaatttcacaccaggggaacactgtgaagaacatgttgcttttttcaaacagatttttggagaccaagctctaatgaggcctacaacattctgaaatcacttgctgtttttttatataaaaatgtgtacaaagttaatttattgcattaataaagctctttaaactataaaatgttataaagtgtatctacaacctc

SEQ ID NO: 118634 - DNA, 2464 bp, Homo sapiens
  Payload ID: 3220
  Gene Symbol: C19orf12
  Gene Name: chromosome 19 open reading frame 12
  Uniprot ID: Q9NSK7
  ENST ID: ENST00000323670
  CDS Start-End: 141-566
gggccgccaccaaggcctgcgcgaccctccgcggggctggggagctgggcggggagcccggggcctgccaggcccgggctgcagccgcgtctgatcgccgagcgcgccgcgtagacctccgctcccccaggcccgccacgatgactatcatggtggaggacatcatgaagctgctgtgctccctttctggggagaggaagatgaaggcggctgtcaagcactctgggaagggtgccctggtcacaggggccatggccttcgtcgggggtttggtgggcggcccaccgggactcgccgttgggggggctgtcggggggctgttaggtgcctggatgacaagtggacagtttaagccggttcctcagatcctaatggagctgccccctgccgagcaacagaggctctttaacgaagccgcagccatcatcaggcacctggagtggacggacgccgtgcagctgaccgcgctggtcatgggcagcgaggccctgcagcagcagctgctggccatgctggtgaactacgtcaccaaggagctgcgggccgagatccagtatgatgactaggccgcacctccggggaggtggggggcccctttaaatgactctgtgattctgaagaggtggcttgggagttgggagaagcccagcggatgccccctggggaatctccacatcatcagtgtattactagtaatgtcccgctggagaggccaccgctgtgcagtgtcatgttccagaaattactgatgaagcagcatgtgttggtggcatgtgcactggcctgccatgacagccctctgactggccccccagtgaagagtaaaggcctgcctgccgcaggcttcggaggcgtctgctgagtcctctcacccgcatgggtctggggaagtgatcacgctcagccgacggtctgaccacacttcatcctccccccggggccttctcatcttgggagatgactcctcttcagagcacctgctgcaggactggatcccacccccctgcaggtcctggggtctcagggccttggagcagcccatgctggaatcatgtttacctcctagtgcaaccgtcccctacccagggactgtcgaatggccccacggaggggacgggcggcctgctgagtgaagccacaaataccgagtggacttgaccccggcccccactaggctgcacacctagactcgccctgccagggcctcgctcttcccatctgaaaagtcctggtagttcttgaggtttacttctcaaatgaaatatttttagtaaaaagtacaggtatatctcggagatattgtgggttcagttccagaccacctcggtaaagccaacatcacaataaagcaaggaagcgcattgttttagtttcccagtgcatctaagtcatgtttactgcatattgcagtccactaaatgtgcaatagcattatgtctaacaaatgtacaaaccttaatttaaaaatatttactgttcaaaatgctgacacagaaacgcaaagtgagcacatgctgttggaaaatggtgccaaatagacttgcctgatgccaggctgctacaaaccttcaatttaaaaaaaaaacacagtattcacaaagcatagtagaatgaggtatgcctgtattgctctttctgaagtggtgtgatataaaccatctctaagaaatgtttctaccctaaagatttccccagtacagtcagctctccgtaactgtggtctccacatttagatccaaccagccttggataggaaatatttgaaaaaagaaattgcattggtactgaacacgtacagacctttttttcttgccattattccctaaacaatatggtgtagcatatttacatagcatttatattgtatttggtattataagaaatctagagatgatttaaattatacaggaaggtgtgcgtaggttacgtgcaaacgctatgccattgcccatcagggacttgagcatcctcagatgtcggtgtctgagggttgaggttgcagtcctggaacccatcccccatggatactgaggcatagctgtactgtgtgttttcactttgctttcagaactacgacttgaatgtgatcgattacaataaatgtttttctaaaaagccattttcccacatattatgtgtaaaatatctctaatattcaaagtcttacaaatggaacaagagggaaggtaccagatttgtggctttaaagaatgcaagagtaggtcaggtgaggtggctcatgcttgtaatgtcggcacttttggaggccaaagtgggaggatcgcttgaggccaagagtttgaaactagcctgggcaatatagtgagacctccatctctacaaaaaatgttattccttggtccccaggtcctggggcagggcagggacttggggctctcctctcaggccctggaggctcggagggaggcacttctgctgaggccctgcttataggaaagctcag

SEQ ID NO: 118635 - DNA, 578 bp, Homo sapiens
  Payload ID: 3220
  Gene Symbol: C19orf12
  Gene Name: chromosome 19 open reading frame 12
  ENST ID: ENST00000342680
  CDS Start-End: 162-368
cggagggcggggccagcgccggggccgccaccaaggcctgcgcgaccctccgcggggctggggagctgggcggggagcccggggcctgccaggcccgggctgcagccgcgtctgatcgccgagcgcgccgcgtagacctccgctcccccaggcccgccacgatgactatcatggtggaggacatcatgaagctgctgtgctccctttctggggagaggaagatgaaggcggctgtcaagcactctgggaagggtgccctggtcacaggggccatggccttcgtcgggggtttggtgggcggcccaccgggactcgccgttggatccagtctaagacaccgcattgcattgaatcgcctgctttcttagtctcctctggcctttaacactttctcagacttgccttgttcacagccttgatagttttgaggagtactgggcagggggggctgtcggggggctgttaggtgcctggatgacaagtggacagtttaagccggttcctcagatcctaatggagctgccccctgccgagcaacagaggctctttaacgaagccgcagccatcatcaggcacct

SEQ ID NO: 118636 - DNA, 1912 bp, Homo sapiens
  Payload ID: 3220
  Gene Symbol: C19orf12
  Gene Name: chromosome 19 open reading frame 12
  Uniprot ID: Q9NSK7
  ENST ID: ENST00000392276
  CDS Start-End: 130-363
gggctggggagctgggcggggagcccggggcctgccaggcccgggctgcagccgcgtctgatcgccgagcgcgccgcgtagacctccgctcccccagggggggctgtcggggggctgttaggtgcctggatgacaagtggacagtttaagccggttcctcagatcctaatggagctgccccctgccgagcaacagaggctctttaacgaagccgcagccatcatcaggcacctggagtggacggacgccgtgcagctgaccgcgctggtcatgggcagcgaggccctgcagcagcagctgctggccatgctggtgaactacgtcaccaaggagctgcgggccgagatccagtatgatgactaggccgcacctccggggaggtggggggcccctttaaatgactctgtgattctgaagaggtggcttgggagttgggagaagcccagcggatgccccctggggaatctccacatcatcagtgtattactagtaatgtcccgctggagaggccaccgctgtgcagtgtcatgttccagaaattactgatgaagcagcatgtgttggtggcatgtgcactggcctgccatgacagccctctgactggccccccagtgaagagtaaaggcctgcctgccgcaggcttcggaggcgtctgctgagtcctctcacccgcatgggtctggggaagtgatcacgctcagccgacggtctgaccacacttcatcctccccccggggccttctcatcttgggagatgactcctcttcagagcacctgctgcaggactggatcccacccccctgcaggtcctggggtctcagggccttggagcagcccatgctggaatcatgtttacctcctagtgcaaccgtcccctacccagggactgtcgaatggccccacggaggggacgggcggcctgctgagtgaagccacaaataccgagtggacttgaccccggcccccactaggctgcacacctagactcgccctgccagggcctcgctcttcccatctgaaaagtcctggtagttcttgaggtttacttctcaaatgaaatatttttagtaaaaagtacaggtatatctcggagatattgtgggttcagttccagaccacctcggtaaagccaacatcacaataaagcaaggaagcgcattgttttagtttcccagtgcatctaagtcatgtttactgcatattgcagtccactaaatgtgcaatagcattatgtctaacaaatgtacaaaccttaatttaaaaatatttactgttcaaaatgctgacacagaaacgcaaagtgagcacatgctgttggaaaatggtgccaaatagacttgcctgatgccaggctgctacaaaccttcaatttaaaaaaaaaacacagtattcacaaagcatagtagaatgaggtatgcctgtattgctctttctgaagtggtgtgatataaaccatctctaagaaatgtttctaccctaaagatttccccagtacagtcagctctccgtaactgtggtctccacatttagatccaaccagccttggataggaaatatttgaaaaaagaaattgcattggtactgaacacgtacagacctttttttcttgccattattccctaaacaatatggtgtagcatatttacatagcatttatattgtatttggtattataagaaatctagagatgatttaaattatacaggaaggtgtgcgtaggttacgtgcaaacgctatgccattgcccatcagggacttgagcatcctcagatgtcggtgtctgagggttgaggttgcagtcctggaacccatcccccatggatactgaggcatagctgtactgtgtgttttcactttgctttcagaactacgacttgaatgtgatcgattacaataaatgtttttctaaaaa

SEQ ID NO: 118637 - DNA, 895 bp, Homo sapiens
  Payload ID: 3220
  Gene Symbol: C19orf12
  Gene Name: chromosome 19 open reading frame 12
  Uniprot ID: Q9NSK7
  ENST ID: ENST00000392278
  CDS Start-End: 128-586
caagagcaggcctggagacccgggagtgccttggggagagggtccccgccctgccgggagcccggccctcccggtgccggggtggacactgttagtgtagtcattgtccctatggagaaactgaggcatggagaggctgaagtcacacaagcccgccacgatgactatcatggtggaggacatcatgaagctgctgtgctccctttctggggagaggaagatgaaggcggctgtcaagcactctgggaagggtgccctggtcacaggggccatggccttcgtcgggggtttggtgggcggcccaccgggactcgccgttgggggggctgtcggggggctgttaggtgcctggatgacaagtggacagtttaagccggttcctcagatcctaatggagctgccccctgccgagcaacagaggctctttaacgaagccgcagccatcatcaggcacctggagtggacggacgccgtgcagctgaccgcgctggtcatgggcagcgaggccctgcagcagcagctgctggccatgctggtgaactacgtcaccaaggagctgcgggccgagatccagtatgatgactaggccgcacctccggggaggtggggggcccctttaaatgactctgtgattctgaagaggtggcttgggagttgggagaagcccagcggatgccccctggggaatctccacatcatcagtgtattactagtaatgtcccgctggagaggccaccgctgtgcagtgtcatgttccagaaattactgatgaagcagcatgtgttggtggcatgtgcactggcctgccatgacagccctctgactggccccccagtgaagagtaaaggcctgcctgccgcaggcttcggaggcgtctgctgagtcctctcacccg

SEQ ID NO: 118638 - DNA, 1504 bp, Homo sapiens
  Payload ID: 3220
  Gene Symbol: C19orf12
  Gene Name: chromosome 19 open reading frame 12
  Uniprot ID: Q9NSK7
  ENST ID: ENST00000592153
  CDS Start-End: 111-434
gcggggctggggagctgggcggggagcccggggcctgccaggcccgggctgcagccgcgtctgatcgccgagcgcgccgcgtagacctccgctcccccaggcccgccacgatgactatcatggtggaggacatcatgaagctgctgtgctccctttctggggagaggaagatgaaggcggctgtcaagcactctgggaagggtgccctggtcacaggggccatggccttcgtcgggggtttggtgggcggcccaccgggactcgccgttgggggggctgtcggggggctgttaggtgcctggatgacaagtggacagtttaagccggttcctcagatcctaatggagctgccccctgccgagcaacagaggctctttaacgaagccgcagccatcatcaggccctgcagcagcagctgctggccatgctggtgaactacgtcaccaaggagctgcgggccgagatccagtatgatgactaggccgcacctccggggaggtggggggcccctttaaatgactctgtgattctgaagaggtggcttgggagttgggagaagcccagcggatgccccctggggaatctccacatcatcagtgtattactagtaatgtcccgctggagaggccaccgctgtgcagtgtcatgttccagaaattactgatgaagcagcatgtgttggtggcatgtgcactggcctgccatgacagccctctgactggccccccagtgaagagtaaaggcctgcctgccgcaggcttcggaggcgtctgctgagtcctctcacccgcatgggtctggggaagtgatcacgctcagccgacggtctgaccacacttcatcctccccccggggccttctcatcttgggagatgactcctcttcagagcacctgctgcaggactggatcccacccccctgcaggtcctggggtctcagggccttggagcagcccatgctggaatcatgtttacctcctagtgcaaccgtcccctacccagggactgtcgaatggccccacggaggggacgggcggcctgctgagtgaagccacaaataccgagtggacttgaccccggcccccactaggctgcacacctagactcgccctgccagggcctcgctcttcccatctgaaaagtcctggtagttcttgaggtttacttctcaaatgaaatatttttagtaaaaagtacaggtatatctcggagatattgtgggttcagttccagaccacctcggtaaagccaacatcacaataaagcaaggaagcgcattgttttagtttcccagtgcatctaagtcatgtttactgcatattgcagtccactaaatgtgcaatagcattatgtctaacaaatgtacaaaccttaatttaaaaatatttactgttcaaaatgctgacacagaaacgcaaagtgagcacatgctgttggaaaatggtgccaaatagacttgcctgatgccaggctgctacaaaccttcaatttaaaaaaaaaacaca

SEQ ID NO: 118639 - DNA, 546 bp, Homo sapiens
  Payload ID: 3220
  Gene Symbol: C19orf12
  Gene Name: chromosome 19 open reading frame 12
  ENST ID: ENST00000591243
  CDS Start-End: 228-546
actcagctgctgctatttgcttattcactaactgctgcctgtcctgtctgtgggaactttccaccgtctggatgctgtctgtcatacaggcgcttggagctgctgagctttcctgaaaagggggacccttccttaaaactctaggaactagagtggcattgtgatggaaatactcttatgctcattgaaactgtccctctgaacttctccctcgaaggcccgccacgatgactatcatggtggaggacatcatgaagctgctgtgctccctttctggggagaggaagatgaaggcggctgtcaagcactctgggaagggtgccctggtcacaggggccatggccttcgtcgggggtttggtgggcggcccaccgggactcgccgttgggggggctgtcggggggctgttaggtgcctggatgacaagtggacagtttaagccggttcctcagatcctaatggagctgccccctgccgagcaacagaggctctttaacgaagccgcagccatcatcaggcacctggagtggacggacgccgtgcagc

SEQ ID NO: 118640 - DNA, 4489 bp, Homo sapiens
  Payload ID: 3220
  Gene Symbol: C19orf12
  Gene Name: chromosome 19 open reading frame 12
  Uniprot ID: Q9NSK7
  ENST ID: ENST00000614091
  CDS Start-End: 238-663
acccaacctgcttctccttttgcaacccccagacccagaggctccagagcaggctctggaacagaggaaatctggctccggcccacacattcaccaaatactgacgcagcacccttgacctccagatgcccctgtgctctcttctgtgcccaggctgcggggagagaggggtcctccaggccaaagggagggaggtctccgggaggtccccgcggtcctggaggcaggcccgccacgatgactatcatggtggaggacatcatgaagctgctgtgctccctttctggggagaggaagatgaaggcggctgtcaagcactctgggaagggtgccctggtcacaggggccatggccttcgtcgggggtttggtgggcggcccaccgggactcgccgttgggggggctgtcggggggctgttaggtgcctggatgacaagtggacagtttaagccggttcctcagatcctaatggagctgccccctgccgagcaacagaggctctttaacgaagccgcagccatcatcaggcacctggagtggacggacgccgtgcagctgaccgcgctggtcatgggcagcgaggccctgcagcagcagctgctggccatgctggtgaactacgtcaccaaggagctgcgggccgagatccagtatgatgactaggccgcacctccggggaggtggggggcccctttaaatgactctgtgattctgaagaggtggcttgggagttgggagaagcccagcggatgccccctggggaatctccacatcatcagtgtattactagtaatgtcccgctggagaggccaccgctgtgcagtgtcatgttccagaaattactgatgaagcagcatgtgttggtggcatgtgcactggcctgccatgacagccctctgactggccccccagtgaagagtaaaggcctgcctgccgcaggcttcggaggcgtctgctgagtcctctcacccgcatgggtctggggaagtgatcacgctcagccgacggtctgaccacacttcatcctccccccggggccttctcatcttgggagatgactcctcttcagagcacctgctgcaggactggatcccacccccctgcaggtcctggggtctcagggccttggagcagcccatgctggaatcatgtttacctcctagtgcaaccgtcccctacccagggactgtcgaatggccccacggaggggacgggcggcctgctgagtgaagccacaaataccgagtggacttgaccccggcccccactaggctgcacacctagactcgccctgccagggcctcgctcttcccatctgaaaagtcctggtagttcttgaggtttacttctcaaatgaaatatttttagtaaaaagtacaggtatatctcggagatattgtgggttcagttccagaccacctcggtaaagccaacatcacaataaagcaaggaagcgcattgttttagtttcccagtgcatctaagtcatgtttactgcatattgcagtccactaaatgtgcaatagcattatgtctaacaaatgtacaaaccttaatttaaaaatatttactgttcaaaatgctgacacagaaacgcaaagtgagcacatgctgttggaaaatggtgccaaatagacttgcctgatgccaggctgctacaaaccttcaatttaaaaaaaaaacacagtattcacaaagcatagtagaatgaggtatgcctgtattgctctttctgaagtggtgtgatataaaccatctctaagaaatgtttctaccctaaagatttccccagtacagtcagctctccgtaactgtggtctccacatttagatccaaccagccttggataggaaatatttgaaaaaagaaattgcattggtactgaacacgtacagacctttttttcttgccattattccctaaacaatatggtgtagcatatttacatagcatttatattgtatttggtattataagaaatctagagatgatttaaattatacaggaaggtgtgcgtaggttacgtgcaaacgctatgccattgcccatcagggacttgagcatcctcagatgtcggtgtctgagggttgaggttgcagtcctggaacccatcccccatggatactgaggcatagctgtactgtgtgttttcactttgctttcagaactacgacttgaatgtgatcgattacaataaatgtttttctaaaaagccattttcccacatattatgtgtaaaatatctctaatattcaaagtcttacaaatggaacaagagggaaggtaccagatttgtggctttaaagaatgcaagagtaggtcaggtgaggtggctcatgcttgtaatgtcggcacttttggaggccaaagtgggaggatcgcttgaggccaagagtttgaaactagcctgggcaatatagtgagacctccatctctacaaaaaatgttattccttggtccccaggtcctggggcagggcagggacttggggctctcctctcaggccctggaggctcggagggaggcacttctgctgaggccctgcttataggaaagctcagtatcctggcacctccatgtgtgtaaggacgtcagggtgaattataacccatggtgattaaggaagggccgagcctttctcttgcagagcgattgctcttctgctggcctcgtctagcacaaatcaggtgccctagcacaggccacactcctggagttaatgaagccactttaatcatttatatgccacttaagttgatgggggacagggcaggggtgggaaggaggggttgtctgtctgtgaaaactgagtgtggcttttcttgttgaactgatcattcctgctcttcctgcaaataagtcctgcatacggaccctggaactaaaaatggaaaatcagagcatgccccctcccaattttgtatagctttagtgggctctaaagttgcccgtttttagtgtgaaggaaaaaacgttgatttgcagatatcgtgagaatgaaacctcaacaaagatgtttggttcagtgcttcaaagttgggggacactttttccatgttgaacaaatgccaacttctccggttgcttacagcaaatccttctggaacaatcggggctgaaattgagttgcctttgttaggcgattgggccccattcattcttactcgtgcatcaggtcctggtctgtgtcaggcccaggggacacaggtggtcccagctcagaggcccagtgtccactgcagcccctcccacagcctgcccacccctactgcagggaaaaatgcccagggaggagatggtccaactcctgatcagttttgtgtccgatggagcaggccttgctgagtgaagacactggaactagctgggtcctggggtgacttggaggctttgggcctaaaagggcagcctgaacctggagtcttatctcccccaggagccgaaagcacttttcttgatttcccccaggaaatcaagcgctgcttctcagctcctgtggttttagtatttatatatctgtatcttctttgtagaaatttatttatttttgaataagtaatacctgcctggtacaaaatttaaaaggtacgggagggcgcaagctgcaagggaaggcctgctcctatgccgaccccagaggcagccactgttaccaatttcatgtgtattcctttaactctgttttaaagtaagtctctgaaaactgttcatttccttttgtcagtatttgttgctgaaaacctagaaaaacccagaaaatataatgaaataaaaactacaaatttcacaacccagaaaactgctggtaacagatttggtgtctttcctgcaattgttttaatgctatgtaggtacacatatatttttttctttttttcttttttttttttttgagatggagtctcgcactgtcgcccgggctggagtgcagtagcgcgatcttggttcactgcaagctctgcctcctgggttcaagccattctcctgcctcagcctcccgagtagctttgactacagtcgcccgccaccatgcccggctaatttttatttttttattttttttttatttttagtagagacggggtttcaccatgttagccaggatggtctcaatctccttacctcgtgatctgcccacctcagcctcccaaagtgctgggattacaggcgtgagccactgcgcccggcctatgtatgtatatttctaacgtacttgccttcttatcctatatgcccctttgaacacctgtatcaatgaatgttaaataatatttttgatgtaatttaaaattccttgtaaatatttgtaatggctgcataatattccactgtgcctaaccatgtgcctggtgtgaattccatttgtggatttttactactgtaatgctgaagtattacagtaatactgtgttaatattctctttattgaattctggtatatagtctttgggattcattcctcaaagtgaaattgctggatttaaaagta

SEQ ID NO: 118641 - DNA, 4242 bp, Homo sapiens
  Payload ID: 3220
  Gene Symbol: C19orf12
  Gene Name: chromosome 19 open reading frame 12
  Uniprot ID: Q9NSK7
  ENST ID: ENST00000623113
  CDS Start-End: 183-416
caagagcaggcctggagacccgggagtgccttggggagagggtccccgccctgccgggagcccggccctcccggtgccggggtggacactgttagtgtagtcattgtccctatggagaaactgaggcatggagaggctgaagtcacacaaggggggctgtcggggggctgttaggtgcctggatgacaagtggacagtttaagccggttcctcagatcctaatggagctgccccctgccgagcaacagaggctctttaacgaagccgcagccatcatcaggcacctggagtggacggacgccgtgcagctgaccgcgctggtcatgggcagcgaggccctgcagcagcagctgctggccatgctggtgaactacgtcaccaaggagctgcgggccgagatccagtatgatgactaggccgcacctccggggaggtggggggcccctttaaatgactctgtgattctgaagaggtggcttgggagttgggagaagcccagcggatgccccctggggaatctccacatcatcagtgtattactagtaatgtcccgctggagaggccaccgctgtgcagtgtcatgttccagaaattactgatgaagcagcatgtgttggtggcatgtgcactggcctgccatgacagccctctgactggccccccagtgaagagtaaaggcctgcctgccgcaggcttcggaggcgtctgctgagtcctctcacccgcatgggtctggggaagtgatcacgctcagccgacggtctgaccacacttcatcctccccccggggccttctcatcttgggagatgactcctcttcagagcacctgctgcaggactggatcccacccccctgcaggtcctggggtctcagggccttggagcagcccatgctggaatcatgtttacctcctagtgcaaccgtcccctacccagggactgtcgaatggccccacggaggggacgggcggcctgctgagtgaagccacaaataccgagtggacttgaccccggcccccactaggctgcacacctagactcgccctgccagggcctcgctcttcccatctgaaaagtcctggtagttcttgaggtttacttctcaaatgaaatatttttagtaaaaagtacaggtatatctcggagatattgtgggttcagttccagaccacctcggtaaagccaacatcacaataaagcaaggaagcgcattgttttagtttcccagtgcatctaagtcatgtttactgcatattgcagtccactaaatgtgcaatagcattatgtctaacaaatgtacaaaccttaatttaaaaatatttactgttcaaaatgctgacacagaaacgcaaagtgagcacatgctgttggaaaatggtgccaaatagacttgcctgatgccaggctgctacaaaccttcaatttaaaaaaaaaacacagtattcacaaagcatagtagaatgaggtatgcctgtattgctctttctgaagtggtgtgatataaaccatctctaagaaatgtttctaccctaaagatttccccagtacagtcagctctccgtaactgtggtctccacatttagatccaaccagccttggataggaaatatttgaaaaaagaaattgcattggtactgaacacgtacagacctttttttcttgccattattccctaaacaatatggtgtagcatatttacatagcatttatattgtatttggtattataagaaatctagagatgatttaaattatacaggaaggtgtgcgtaggttacgtgcaaacgctatgccattgcccatcagggacttgagcatcctcagatgtcggtgtctgagggttgaggttgcagtcctggaacccatcccccatggatactgaggcatagctgtactgtgtgttttcactttgctttcagaactacgacttgaatgtgatcgattacaataaatgtttttctaaaaagccattttcccacatattatgtgtaaaatatctctaatattcaaagtcttacaaatggaacaagagggaaggtaccagatttgtggctttaaagaatgcaagagtaggtcaggtgaggtggctcatgcttgtaatgtcggcacttttggaggccaaagtgggaggatcgcttgaggccaagagtttgaaactagcctgggcaatatagtgagacctccatctctacaaaaaatgttattccttggtccccaggtcctggggcagggcagggacttggggctctcctctcaggccctggaggctcggagggaggcacttctgctgaggccctgcttataggaaagctcagtatcctggcacctccatgtgtgtaaggacgtcagggtgaattataacccatggtgattaaggaagggccgagcctttctcttgcagagcgattgctcttctgctggcctcgtctagcacaaatcaggtgccctagcacaggccacactcctggagttaatgaagccactttaatcatttatatgccacttaagttgatgggggacagggcaggggtgggaaggaggggttgtctgtctgtgaaaactgagtgtggcttttcttgttgaactgatcattcctgctcttcctgcaaataagtcctgcatacggaccctggaactaaaaatggaaaatcagagcatgccccctcccaattttgtatagctttagtgggctctaaagttgcccgtttttagtgtgaaggaaaaaacgttgatttgcagatatcgtgagaatgaaacctcaacaaagatgtttggttcagtgcttcaaagttgggggacactttttccatgttgaacaaatgccaacttctccggttgcttacagcaaatccttctggaacaatcggggctgaaattgagttgcctttgttaggcgattgggccccattcattcttactcgtgcatcaggtcctggtctgtgtcaggcccaggggacacaggtggtcccagctcagaggcccagtgtccactgcagcccctcccacagcctgcccacccctactgcagggaaaaatgcccagggaggagatggtccaactcctgatcagttttgtgtccgatggagcaggccttgctgagtgaagacactggaactagctgggtcctggggtgacttggaggctttgggcctaaaagggcagcctgaacctggagtcttatctcccccaggagccgaaagcacttttcttgatttcccccaggaaatcaagcgctgcttctcagctcctgtggttttagtatttatatatctgtatcttctttgtagaaatttatttatttttgaataagtaatacctgcctggtacaaaatttaaaaggtacgggagggcgcaagctgcaagggaaggcctgctcctatgccgaccccagaggcagccactgttaccaatttcatgtgtattcctttaactctgttttaaagtaagtctctgaaaactgttcatttccttttgtcagtatttgttgctgaaaacctagaaaaacccagaaaatataatgaaataaaaactacaaatttcacaacccagaaaactgctggtaacagatttggtgtctttcctgcaattgttttaatgctatgtaggtacacatatatttttttctttttttcttttttttttttttgagatggagtctcgcactgtcgcccgggctggagtgcagtagcgcgatcttggttcactgcaagctctgcctcctgggttcaagccattctcctgcctcagcctcccgagtagctttgactacagtcgcccgccaccatgcccggctaatttttatttttttattttttttttatttttagtagagacggggtttcaccatgttagccaggatggtctcaatctccttacctcgtgatctgcccacctcagcctcccaaagtgctgggattacaggcgtgagccactgcgcccggcctatgtatgtatatttctaacgtacttgccttcttatcctatatgcccctttgaacacctgtatcaatgaatgttaaataatatttttgatgtaatttaaaattccttgtaaatatttgtaatggctgcataatattccactgtgcctaaccatgtgcctggtgtgaattccatttgtggatttttactactgtaatgctgaagtattacagtaatactgtgttaatattctctttattgaattctggtatatagtctttgggattcattcctcaaagtgaaattgctggatttaaaagta

SEQ ID NO: 118642 - DNA, 915 bp, Homo sapiens
  Payload ID: 3221
  Gene Symbol: C19orf18
  Gene Name: chromosome 19 open reading frame 18
  Uniprot ID: Q8NEA5
  ENST ID: ENST00000314391
  CDS Start-End: 103-750
agtagaacttcttgattcctcagataaatagaggacagatgctggactgtagctaagtatttcctttcatctacgggataaaatactgataatttgagagtgatggacaaggttcagagtggtttcctcattttgtttttgtttttaatggaatgccaacttcatttatgcttgccgtatgcagatggactccatcccactggaaacataacaggcttaccaggcagtaaacggtcacaaccacccagaaacatcaccaaagagcccaaagtgttctttcataaaacccagttgcctgggattcaaggggctgcctcgagatccacggctgcatcccctacgaaccccatgaaattcctgaggaataaagcaataattcggcatagacctgctcttgttaaagtaattttaatttcgagcgtagccttcagcattgccctgatatgtgggatggcaatctcctatatgatatatcgactggcacaggctgaggaaagacaacagctcgagtcactttataagaacctcaggataccgttattaggagatgaagaagagggctcagaggacgagggtgagtccacgcacctacttccagagaacgaaaatgagctggaaaagttcatccactcagttattatatcaaaaagaagcaaaaatattaagaagaaactgaaggaagagcaaaactcagtaacagaaaacaaaacaaagaatgcgtcacataatggaaaaatggaagacttgtgaacgcagacgacagaggtgccggctgaggcagaggagaaactatgggggtgctgggagactgagcctgtgggcgtggcttgctcccagagaaccttatggaagaggacatcaaagaaagaaatgccagacctgtatcccagaaaataaagccacatgatatagcaa

SEQ ID NO: 118643 - DNA, 983 bp, Homo sapiens
  Payload ID: 3222
  Gene Symbol: C19orf24
  Gene Name: chromosome 19 open reading frame 24
  Uniprot ID: Q9BVV8
  ENST ID: ENST00000409293
  CDS Start-End: 113-511
gcggggcccggcgtcaagctccgcctccgcgccccattggctggcatcacctccgcgcgcctgactgacagcgcgcataggggcggggcgccgccaccgcttccgccgggccatggggccgcgcgtgctgcagccgccgctgctgctgctcctgctggcgctgctgctggcggcgctgccgtgcggtgccgaagaggcctcgccgctgcgccccgcgcaggtcacgttgtcgccgccgccggccgtgacgaacgggagccagccgggcgcgccacacaacagcacgcacacgcgtccgccgggggcgtcgggctcggcgctgacgcgctccttctacgtgatcctgggcttctgcggcctgaccgcgctctacttcctgatccgggcgtttaggttgaagaagcctcagcggaggcgatacggcctcctcgccaacactgaggaccccacggagatggcctcgctggacagcgacgaggagacggtgtttgagtcccggaatctgagatgatgctgagccagggaggcggcccttccagcagccatgagggaaggacaggagatggggcccaccccagtgcccagcaaccccctgctccaccgctcattcccctgctggccccggggctggtctcacccagtgccaacccgagagctccttttggaacctgcacagcccgccgacctgttgccacctgcacccaccgctggaccatgcagcctcgcctcctggatgctgtcccagcctggccgagggtcccaggtgaagactggagggaccccaacagccaccgcccaggacgctgaggctcccttgcctgactgtgacttgtgcctctctcctgcccccgtggggacatggcagcccagagccaaggctgggtgggcaggtgacccaaggaacctttctgggaacaccttctcgccgggctgggaacaataaatgcagccatgtctctgcagctggtgctgaccccatgcca

SEQ ID NO: 118644 - DNA, 668 bp, Homo sapiens
  Payload ID: 3222
  Gene Symbol: C19orf24
  Gene Name: chromosome 19 open reading frame 24
  ENST ID: ENST00000469144
  CDS Start-End: 235-633
acccgctctccagcctgcgcctggggttggaggtgcccagcgcgccgcctcttaactcgggggtgacgctgcccgtttcccaggttgaagaagcctcagcggaggcgatacggcctcctcgccaacactgaggaccccacggagatggcctcgctggacagcgacgaggagacggtgtttgagtcccggaatctgagatgatgctgagccagggaggcggcccttccagcagccatgagggaaggacaggagatggggcccaccccagtgcccagcaaccccctgctccaccgctcattcccctgctggccccggggctggtctcacccagtgccaacccgagagctccttttggaacctgcacagcccgccgacctgttgccacctgcacccaccgctggaccatgcagcctcgcctcctggatgctgtcccagcctggccgagggtcccaggtgaagactggagggaccccaacagccaccgcccaggacgctgaggctcccttgcctgactgtgacttgtgcctctctcctgcccccgtggggacatggcagcccagagccaaggctgggtgggcaggtgacccaaggaacctttctgggaacaccttctcgccgggctgggaacaataaatgcagccatgtctctgcagctggtgctgacccca

SEQ ID NO: 118645 - DNA, 1410 bp, Homo sapiens
  Payload ID: 3223
  Gene Symbol: C19orf25
  Gene Name: chromosome 19 open reading frame 25
  ENST ID: ENST00000427685
  CDS Start-End: 57-533
cggaatcggaagtggctgcgtcgtcgacgctgggctttcgggtcccgcgcccagagatgggctccaaggcaaagaagcgcgtgctgctgcccacccgcccagcgccccccacggtggagcagatcctggaggatgtgcggggtgcgccggcagaggatccagtgttcaccatcctggccccggaaggtagggggagcccggtcccggggaaaagcggacctgagaccccggcagcaaggggacgggagagaagcacacccctaactcctgaccccacgccctgggaacccccgcaacatgggcacgaccccccagttcccttcaggatgatggaggatgcggaggccccgggagagcagctctaccagcaaagccgggcctacgtggctgccaaccagcggctgcagcaggcgggcaacgtgctgaggcagaggtgtgagctcctgcagcgagccggcgaggacctggagcgggaggtggcccagatgaagcaggcagcattaccggcagccgaggctgcctcctcaggctgacctctcggggcctgcaggcttgggcagcgcacaaggtggcctgcacccaggctttccctgggggtccgtcggccccagactggcattcacggggtcccagcccacgtgggtgttgacacaggcgcccctcctgatgctggggctgcggttcatccgtcgtctcattcatgccgagttggtgggacccacccagctggctccgtcctgcgtgacctgagggccccactggggttctggaagaggatagggacattattgctgtactgtgattctgtcgtcagctcacagtggccgtgctctgcagtggggcccctgggagcaggtgccacctccttcctctcccggggcaggcactcgcctgtccacttctgagtccaggtgttgggatcgaggtgttaactgtgattccatccagcgagtgcccacccaatgtcagagcagcccgagggccagcctgagcccctgaccccacttccttctgggccccgggctcctcccacaagccacgttgatcttcacaacgaccctgggccgctggggtcacccaagagaagcagccctgagacccagccaggctgggcctagctccacggcacgggtgtctcccagccactgcccttgctggaggaccgctgtgagtcactggccaggagcccagggtgtcctgagtctcatagccaccctgccagctgcagcaggtcctgggcctgcttccctgcgggttctggccctgggggagggggcgttagtgcggcggagggtcttgccaaaggcttttcatcctaaatagcaacttgagtggaaacctgggcaaggcggcccagaggctgggccctgcacataaagctttcgtgtgtgtctggccgtctgaatggtg

SEQ ID NO: 118646 - DNA, 2403 bp, Homo sapiens
  Payload ID: 3223
  Gene Symbol: C19orf25
  Gene Name: chromosome 19 open reading frame 25
  Uniprot ID: Q9UFG5
  ENST ID: ENST00000436106
  CDS Start-End: 216-572
cagaggttgagccagaccctgaagccttggccaccgtgtttttgggcggagggagggtcagggcctggggcgagctcagaggggcgggacagggcgggcttccccgggagcgggaccgcgacgggtgcgtacgagttcgctgggcgggaggagcagcccgggcaagggcggagaggtggacgccccggtcagcgcccccttccccgccttcagagatgggctccaaggcaaagaagcgcgtgctgctgcccacccgcccagcgccccccacggtggagcagatcctggaggatgtgcggggtgcgccggcagaggatccagtgttcaccatcctggccccggaagaccccccagttcccttcaggatgatggaggatgcggaggccccgggagagcagctctaccagcaaagccgggcctacgtggctgccaaccagcggctgcagcaggcgggcaacgtgctgaggcagaggtgtgagctcctgcagcgagccggcgaggacctggagcgggaggtggcccagatgaagcaggcagcattaccggcagccgaggctgcctcctcaggctgacctctcggggcctgcaggcttgggcagcgcacaaggtggcctgcacccaggctttccctgggggtccgtcggccccagactggcattcacggggtcccagcccacgtgggtgttgacacaggcgcccctcctgatgctggggctgcggttcatccgtcgtctcattcatgccgagttggtgggacccacccagctggctccgtcctgcgtgacctgagggccccactggggttctggaagaggatagggacattattgctgtactgtgattctgtcgtcagctcacagtggccgtgctctgcagtggggcccctgggagcaggtgccacctccttcctctcccggggcaggcactcgcctgtccacttctgagtccaggtgttgggatcgaggtgttaactgtgattccatccagcgagtgcccacccaatgtcagagcagcccgagggccagcctgagcccctgaccccacttccttctgggccccgggctcctcccacaagccacgttgatcttcacaacgaccctgggccgctggggtcacccaagagaagcagccctgagacccagccaggctgggcctagctccacggcacgggtgtctcccagccactgcccttgctggaggaccgctgtgagtcactggccaggagcccagggtgtcctgagtctcatagccaccctgccagctgcagcaggtcctgggcctgcttccctgcgggttctggccctgggggagggggcgttagtgcggcggagggtcttgccaaaggcttttcatcctaaatagcaacttgagtggaaacctgggcaaggcggcccagaggctgggccctgcacataaagctttcgtgtgtgtctggccgtctgaatggtgcctctgtgagcggctccgtcccggggccccggaagctggggagggatgggtaccggcgaccccgggaaccctgctcagtcctgccgggcactgcatgcagggaccgtccgcctgacccagagacctggggctgcctcaccctctctccagacccacagccagctttgtttcttgaatgtggaagatgtttcttattccctgaagaaagggggcctgccacacacagcctgggaggcgcctcatccagaaactgggacttggctagcccggcctgggccctagggacttctcactggtcatgcttctgaagctgctcacctggccgagggaggtcccggcagtgtcccagggtggaaggtggggagggggccggctcctgccatcccttcccaccctgcacttctgtgctgcttgcagtcatagctttccttgtccccccagctgggccagggctgtgctccctgaagtggctttgacgtggggccgtcccagctcccgcagcccctgtccaccattgactctccccggtagtggctgctgtggctgccccatcccagctgttgcaccagccacagctcctagtggctcatgggtgcctcctgccccacactggggcctgccataataactggcccaggtaccaatgcccaggttggaccccctgtctggggtgctgtgcaccccctggagcctgccctcccttgggaccagggggagactcctggcctcagccagtgcctccccggcccatctgggtggggtgcccacaaaccctgtgcccccagtttctgctttctggctctgcttccagggatctaacctggggggtctcagcaattctgtggcagcacatagacagcgatgaacctacccgcccacagcccattttgaggaagaggtgatggcggcaggcaatgcaagagctcagtttattaaatgtgtgcgagtcggaca

SEQ ID NO: 118647 - DNA, 2128 bp, Homo sapiens
  Payload ID: 3223
  Gene Symbol: C19orf25
  Gene Name: chromosome 19 open reading frame 25
  ENST ID: ENST00000588871
  CDS Start-End: 35-517
gtcgacgctgggctttcgggtcccgcgcccagagatgggctccaaggcaaagaagcgcgtgctgctgcccacccgcccagcgccccccacggtggagcagatcctggaggatgtgcggggtgcgccggcagaggatccagtgttcaccatcctggccccggaagaccccccagttcccttcaggatgatggaggatgcggaggccccgggagagcagctctaccagcaaagccgggcctacgtggctgccaaccagcggctgcagcaggcgggcaacccgaggctgcctcctcaggctgacctctcggggcctgcaggcttgggcagcgcacaaggtggcctgcacccaggctttccctgggggtccgtcggccccagactggcattcacggggtcccagcccacgtgggtgttgacacaggcgcccctcctgatgctggggctgcggttcatccgtcgtctcattcatgccgagttggtgggacccacccagctggctccgtcctgcgtgacctgagggccccactggggttctggaagaggatagggacattattgctgtactgtgattctgtcgtcagctcacagtggccgtgctctgcagtggggcccctgggagcaggtgccacctccttcctctcccggggcaggcactcgcctgtccacttctgagtccaggtgttgggatcgaggtgttaactgtgattccatccagcgagtgcccacccaatgtcagagcagcccgagggccagcctgagcccctgaccccacttccttctgggccccgggctcctcccacaagccacgttgatcttcacaacgaccctgggccgctggggtcacccaagagaagcagccctgagacccagccaggctgggcctagctccacggcacgggtgtctcccagccactgcccttgctggaggaccgctgtgagtcactggccaggagcccagggtgtcctgagtctcatagccaccctgccagctgcagcaggtcctgggcctgcttccctgcgggttctggccctgggggagggggcgttagtgcggcggagggtcttgccaaaggcttttcatcctaaatagcaacttgagtggaaacctgggcaaggcggcccagaggctgggccctgcacataaagctttcgtgtgtgtctggccgtctgaatggtgcctctgtgagcggctccgtcccggggccccggaagctggggagggatgggtaccggcgaccccgggaaccctgctcagtcctgccgggcactgcatgcagggaccgtccgcctgacccagagacctggggctgcctcaccctctctccagacccacagccagctttgtttcttgaatgtggaagatgtttcttattccctgaagaaagggggcctgccacacacagcctgggaggcgcctcatccagaaactgggacttggctagcccggcctgggccctagggacttctcactggtcatgcttctgaagctgctcacctggccgagggaggtcccggcagtgtcccagggtggaaggtggggagggggccggctcctgccatcccttcccaccctgcacttctgtgctgcttgcagtcatagctttccttgtccccccagctgggccagggctgtgctccctgaagtggctttgacgtggggccgtcccagctcccgcagcccctgtccaccattgactctccccggtagtggctgctgtggctgccccatcccagctgttgcaccagccacagctcctagtggctcatgggtgcctcctgccccacactggggcctgccataataactggcccaggtaccaatgcccaggttggaccccctgtctggggtgctgtgcaccccctggagcctgccctcccttgggaccagggggagactcctggcctcagccagtgcctccccggcccatctgggtggggtgcccacaaaccctgtgcccccagtttctgctttctggctctgcttccagggatctaacctggggggtctcagcaattctgtggcagcacatagacagcgatgaacctacccgcccacagcccattttgaggaagaggtgatggcggcaggcaatgcaagagctcagtttattaaatgtgtgcgagtcgg

SEQ ID NO: 118648 - DNA, 1472 bp, Homo sapiens
  Payload ID: 3223
  Gene Symbol: C19orf25
  Gene Name: chromosome 19 open reading frame 25
  ENST ID: ENST00000588849
  CDS Start-End: 14-274
cccgccttcagagatgggctccaaggcaaagaagcgcgtgctgctgcccacccgcccagcgccccccacggtggagcagatcctggaggatgtgcggggtgcgccggcagaggatccagtgttcaccatcctggccccggaagagatgggggtgtcactatgttgtccaggctggtctctaactcttgggctcaagtgttcctcccgcctcggcctcccaaagtgctggattacaggcgtgagccaccacacctggctgcatccgtcatgttaagaagaccccggctggcaagctcactcggggactgcagggaaccctgccctttgggggcagtagtgaggggtgcccaggaggatggggtggtcagcaggcagtgatgctgctgtgtcctgtctcagaccccccagttcccttcaggatgatggaggatgcggaggccccgggagagcagctctaccagcaaagccgggcctacgtggctgccaaccagcggctgcagcaggcgggcaacgtgctgaggcagaggtgtgagctcctgcagcgagccggcgaggacctggagcgggaggtggcccagatgaagcaggcagcattaccggcagccgaggctgcctcctcaggctgacctctcggggcctgcaggcttgggcagcgcacaaggtggcctgcacccaggctttccctgggggtccgtcggccccagactggcattcacggggtcccagcccacgtgggtgttgacacaggcgcccctcctgatgctggggctgcggttcatccgtcgtctcattcatgccgagttggtgggacccacccagctggctccgtcctgcgtgacctgagggccccactggggttctggaagaggatagggacattattgctgtactgtgattctgtcgtcagctcacagtggccgtgctctgcagtggggcccctgggagcaggtgccacctccttcctctcccggggcaggcactcgcctgtccacttctgagtccaggtgttgggatcgaggtgttaactgtgattccatccagcgagtgcccacccaatgtcagagcagcccgagggccagcctgagcccctgaccccacttccttctgggccccgggctcctcccacaagccacgttgatcttcacaacgaccctgggccgctggggtcacccaagagaagcagccctgagacccagccaggctgggcctagctccacggcacgggtgtctcccagccactgcccttgctggaggaccgctgtgagtcactggccaggagcccagggtgtcctgagtctcatagccaccctgccagctgcagcaggtcctgggcctgcttccctgcgggttctggccctgggggagggggcgttagtgcggcggagggtcttgccaaaggcttttcatcctaaatagcaacttgagtggaaacctgggcaaggcggcccagaggctgggccctgcacataaag

SEQ ID NO: 118649 - DNA, 1265 bp, Homo sapiens
  Payload ID: 3223
  Gene Symbol: C19orf25
  Gene Name: chromosome 19 open reading frame 25
  Uniprot ID: Q9UFG5
  ENST ID: ENST00000586564
  CDS Start-End: 45-401
tttcgggtcccgcgcccaggtgggaagaggccggcgactgggagatgggctccaaggcaaagaagcgcgtgctgctgcccacccgcccagcgccccccacggtggagcagatcctggaggatgtgcggggtgcgccggcagaggatccagtgttcaccatcctggccccggaagaccccccagttcccttcaggatgatggaggatgcggaggccccgggagagcagctctaccagcaaagccgggcctacgtggctgccaaccagcggctgcagcaggcgggcaacgtgctgaggcagaggtgtgagctcctgcagcgagccggcgaggacctggagcgggaggtggcccagatgaagcaggcagcattaccggcagccgaggctgcctcctcaggctgacctctcggggcctgcaggcttgggcagcgcacaaggtggcctgcacccaggctttccctgggggtccgtcggccccagactggcattcacggggtcccagcccacgtgggtgttgacacaggcgcccctcctgatgctggggctgcggttcatccgtcgtctcattcatgccgagttggtgggacccacccagctggctccgtcctgcgtgacctgagggccccactggggttctggaagaggatagggacattattgctgtactgtgattctgtcgtcagctcacagtggccgtgctctgcagtggggcccctgggagcaggtgccacctccttcctctcccggggcaggcactcgcctgtccacttctgagtccaggtgttgggatcgaggtgttaactgtgattccatccagcgagtgcccacccaatgtcagagcagcccgagggccagcctgagcccctgaccccacttccttctgggccccgggctcctcccacaagccacgttgatcttcacaacgaccctgggccgctggggtcacccaagagaagcagccctgagacccagccaggctgggcctagctccacggcacgggtgtctcccagccactgcccttgctggaggaccgctgtgagtcactggccaggagcccagggtgtcctgagtctcatagccaccctgccagctgcagcaggtcctgggcctgcttccctgcgggttctggccctgggggagggggcgttagtgcggcggagggtcttgccaaaggcttttcatcctaaatagcaacttgagtggaaacctgggcaaggcggcccagaggctgggccctgcacataaagctttcgtgtgtgtctggc

SEQ ID NO: 118650 - DNA, 1287 bp, Homo sapiens
  Payload ID: 3223
  Gene Symbol: C19orf25
  Gene Name: chromosome 19 open reading frame 25
  Uniprot ID: Q9UFG5
  ENST ID: ENST00000592872
  CDS Start-End: 73-429
gctttcgggtcccgcgcccaggtgggaagaggccggcgactggggtgaccgcggggaaactgaggcagagagatgggctccaaggcaaagaagcgcgtgctgctgcccacccgcccagcgccccccacggtggagcagatcctggaggatgtgcggggtgcgccggcagaggatccagtgttcaccatcctggccccggaagaccccccagttcccttcaggatgatggaggatgcggaggccccgggagagcagctctaccagcaaagccgggcctacgtggctgccaaccagcggctgcagcaggcgggcaacgtgctgaggcagaggtgtgagctcctgcagcgagccggcgaggacctggagcgggaggtggcccagatgaagcaggcagcattaccggcagccgaggctgcctcctcaggctgacctctcggggcctgcaggcttgggcagcgcacaaggtggcctgcacccaggctttccctgggggtccgtcggccccagactggcattcacggggtcccagcccacgtgggtgttgacacaggcgcccctcctgatgctggggctgcggttcatccgtcgtctcattcatgccgagttggtgggacccacccagctggctccgtcctgcgtgacctgagggccccactggggttctggaagaggatagggacattattgctgtactgtgattctgtcgtcagctcacagtggccgtgctctgcagtggggcccctgggagcaggtgccacctccttcctctcccggggcaggcactcgcctgtccacttctgagtccaggtgttgggatcgaggtgttaactgtgattccatccagcgagtgcccacccaatgtcagagcagcccgagggccagcctgagcccctgaccccacttccttctgggccccgggctcctcccacaagccacgttgatcttcacaacgaccctgggccgctggggtcacccaagagaagcagccctgagacccagccaggctgggcctagctccacggcacgggtgtctcccagccactgcccttgctggaggaccgctgtgagtcactggccaggagcccagggtgtcctgagtctcatagccaccctgccagctgcagcaggtcctgggcctgcttccctgcgggttctggccctgggggagggggcgttagtgcggcggagggtcttgccaaaggcttttcatcctaaatagcaacttgagtggaaacctgggcaaggcggcccagaggctgggccctgcacataaagctttcgtgtgtg

SEQ ID NO: 118651 - DNA, 853 bp, Homo sapiens
  Payload ID: 3223
  Gene Symbol: C19orf25
  Gene Name: chromosome 19 open reading frame 25
  ENST ID: ENST00000588427
  CDS Start-End: 42-257
ctgcgtcgtcgacgctgggctttcgggtcccgcgcccagagatgggctccaaggcaaagaagcgcgtgctgctgcccacccgcccagcgccccccacggtggagcagatcctggaggatgtgcggggtgcgccggcagaggatccagtgttcaccatcctggccccggaaggctggagtgcagtggcgagatctcgactcactgcaggctccgactccccagttcaagcgattctcctgcctcagcctccggagtagctgggactacagacacccgccaccacgcccggctaattttttgtatttttagtagagacggggtttcaccgtgttagccaggatggtctcgatctcctgaccttgtgatccgcccgcctcggcctcccaaagtgctgggattacaggcaagagccaccgcgcccggcccagtgaggttgtttttttgagacgcagtcttgctctgtggcccaggctggaatgcagtggcgcaacctccgcctcctaggttcaagtgattctcctgcctcagcctcccgagtagctggactaacaggcgcccgctgccacgcctggctgttttttttagtagagatggggtctgaccatgttggccaggctggtctcgaactcctgacctcaagtgagccacggcgcccagcccacatttgctttcaaagagcagtgacatgaggagtgagccccagccggtctgaggctggaccacccgctaagcagtgagctgttcaacttgatttcctcccaagtcggagagctcgcccgctgccgccagcagtctccttccagtgactgaagaagcatccctgccgcccaccgggtgcccaccttggtggccc

SEQ ID NO: 118652 - DNA, 885 bp, Homo sapiens
  Payload ID: 3223
  Gene Symbol: C19orf25
  Gene Name: chromosome 19 open reading frame 25
  ENST ID: ENST00000590621
  CDS Start-End: 1-129
tccaaggcaaagaagcgcgtgctgctgcccacccgcccagcgccccccacggtggagcagatcctggaggatgtgcggggtgcgccggcagaggatccagtgttcaccatcctggccccggaaggatgatggaggatgcggaggccccgggagagcagctctaccagcaaagccgggcctacgtggctgccaaccagcggctgcagcaggcgggcaacgtgctgaggcagaggtgtgagctcctgcagcgagccggcgaggacctggagcgggaggtggcccagatgaagcaggcagcattaccggcagccgaggctgcctcctcaggctgacctctcggggcctgcaggcttgggcagcgcacaaggtggcctgcacccaggctttccctgggggtccgtcggccccagactggcattcacggggtcccagcccacgtgggtgttgacacaggcgcccctcctgatgctggggctgcggttcatccgtcgtctcattcatgccgagttggtgggacccacccagctggctccgtcctgcgtgacctgagggccccactggggttctggaagaggatagggacattattgctgtactgtgattctgtcgtcagctcacagtggccgtgctctgcagtggggcccctgggagcaggtgccacctccttcctctcccggggcaggcactcgcctgtccacttctgagtccaggtgttgggatcgaggtgttaactgtgattccatccagcgagtgcccacccaatgtcagagcagcccgagggccagcctgagcccctgaccccacttccttctgggccccgggctcctcccacaagccacgttgatcttcacaacgaccctgggccgctggggtcacccaagagaa

SEQ ID NO: 118653 - DNA, 1837 bp, Homo sapiens
  Payload ID: 3223
  Gene Symbol: C19orf25
  Gene Name: chromosome 19 open reading frame 25
  Uniprot ID: Q9UFG5
  ENST ID: ENST00000585675
  CDS Start-End: 397-753
gtgttccggccgccgagtgctcatgcaccaccaggctcccttaggtggacagcaattttgtgctcccgtcagccacatgggtggcgtgtcccctagtgccgtgttccccttttcagaaagacgagcctcggatgcttttctacccagccagtggagcctggactcgaactcgctctcatcgtagcgcgtccaggttcgggttcgcctgagaggctgagatccgagtctcaagggcactatccctttaagacggggcggagccccgcgatgagcggcgggccggcgggagaggaggccggaagtgtgtgtcacgtgttcggggacggggcggtgctccgaccggaatcggaagtggctgcgtcgtcgacgctgggctttcgggtcccgcgcccagagatgggctccaaggcaaagaagcgcgtgctgctgcccacccgcccagcgccccccacggtggagcagatcctggaggatgtgcggggtgcgccggcagaggatccagtgttcaccatcctggccccggaagaccccccagttcccttcaggatgatggaggatgcggaggccccgggagagcagctctaccagcaaagccgggcctacgtggctgccaaccagcggctgcagcaggcgggcaacgtgctgaggcagaggtgtgagctcctgcagcgagccggcgaggacctggagcgggaggtggcccagatgaagcaggcagcattaccggcagccgaggctgcctcctcaggctgacctctcggggcctgcaggcttgggcagcgcacaaggtggcctgcacccaggctttccctgggggtccgtcggccccagactggcattcacggggtcccagcccacgtgggtgttgacacaggcgcccctcctgatgctggggctgcggttcatccgtcgtctcattcatgccgagttggtgggacccacccagctggctccgtcctgcgtgacctgagggccccactggggttctggaagaggatagggacattattgctgtactgtgattctgtcgtcagctcacagtggccgtgctctgcagtggggcccctgggagcaggtgccacctccttcctctcccggggcaggcactcgcctgtccacttctgagtccaggtgttgggatcgaggtgttaactgtgattccatccagcgagtgcccacccaatgtcagagcagcccgagggccagcctgagcccctgaccccacttccttctgggccccgggctcctcccacaagccacgttgatcttcacaacgaccctgggccgctggggtcacccaagagaagcagccctgagacccagccaggctgggcctagctccacggcacgggtgtctcccagccactgcccttgctggaggaccgctgtgagtcactggccaggagcccagggtgtcctgagtctcatagccaccctgccagctgcagcaggtcctgggcctgcttccctgcgggttctggccctgggggagggggcgttagtgcggcggagggtcttgccaaaggcttttcatcctaaatagcaacttgagtggaaacctgggcaaggcggcccagaggctgggccctgcacataaagctttcgtgtgtgtctggccgtctgaatggtgcctctgtgagcggctccgtcccggggccccggaagctggggagggatgggtaccggcgaccccgggaaccctgctcagtcctgccgggcactgcatgcagggaccgtccgcctgacccagagacctggggctgcctcaccctctctccagacccacagccagctttgtttcttgaatgtggaagatgtttcttattccctgaagaaa

SEQ ID NO: 118654 - DNA, 574 bp, Homo sapiens
  Payload ID: 3223
  Gene Symbol: C19orf25
  Gene Name: chromosome 19 open reading frame 25
  ENST ID: ENST00000591027
  CDS Start-End: 54-290
aatcggaagtggctgcgtcgtcgacgctgggctttcgggtcccgcgcccagagatgggctccaaggcaaagaagcgcgtgctgctgcccacccgcccagcgccccccacggtggagcagatcctggaggatgtgcggggtgcgccggcagaggatccagtgttcaccatcctggccccggaaggtgatgacagaggtgatttgatcagcccagacccgtgcggcacgtggagccttcgtccgtgggagaccacactgccgaggggcaggccagagccgaggggcccctgacgcttctctgagtgaccctgaagtcggtgctgcttcagccctgctgcactgggcttgcatacgtgggggagcagggagccatacgtagtttctgctgaatgtgggagtcaccaggacgtcaatgcccacctctcaccttcgccacccctgcctccctaagtgtgtgctccaggaggttgcacggcccctggagaggttttcggtggcgggcttgttgcgtctctggcttccagagacagcaggaatgagagccaggccagctcagtggagtccatcccggtggg

SEQ ID NO: 118655 - DNA, 467 bp, Homo sapiens
  Payload ID: 3224
  Gene Symbol: C19orf33
  Gene Name: chromosome 19 open reading frame 33
  Uniprot ID: Q9GZP8
  ENST ID: ENST00000301246
  CDS Start-End: 102-422
agcattcctccaacgggcaggtctcagcgctcctccccctgctccgctcctctgcagggcccaggcgcccttggccttaggacccaacttctcttaccgccatggagttcgacctgggagcagccctggagcccacctcccagaagcccggtgtgggggcgggccacgggggagatcccaagctcagtccccacaaagttcagggccggtcggaggcaggggcaggtccgggtccaaagcaaggacaccacagctcttccgactccagcagcagctccagcgattcggacacggatgtgaagtcccacgctgctggctccaagcagcacgagagcatcccgggcaaggccaagaagcccaaagtgaagaagaaggagaagggcaagaaggagaagggcaagaagaaggaggctccccactgaagggccctggacagggctcattaaaccttcctctctgccttctgc

SEQ ID NO: 118656 - DNA, 520 bp, Homo sapiens
  Payload ID: 3224
  Gene Symbol: C19orf33
  Gene Name: chromosome 19 open reading frame 33
  Uniprot ID: Q9GZP8
  ENST ID: ENST00000588605
  CDS Start-End: 99-356
attcctccaacgggcaggtctcagcgctcctccccctgctccgctcctctgcagggcccaggcgcccttggccttaggacccaacttctcttaccgccatggagttcgacctgggagcagccctggagcccacctcccagaagcccggtgtgggggcgggccacgggggagatcccaagctcagtccccacaaagttcagggccggtcggaggcaggggcaggtccgggtccaaaggcctccaacttcagggggctgggtaaggggcgccgcctcactgccgcacctccatccagcaaggacaccacagctcttccgactccagcagcagctccagcgattcggacacggatgtgaagtcccacgctgctggctccaagcagcacgagagcatcccgggcaaggccaagaagcccaaagtgaagaagaaggagaagggcaagaaggagaagggcaagaagaaggaggctccccactgaagggccctggacagggctcattaaaccttcctctctgccttc

SEQ ID NO: 118657 - DNA, 2574 bp, Homo sapiens
  Payload ID: 3225
  Gene Symbol: C19orf35
  Gene Name: chromosome 19 open reading frame 35
  Uniprot ID: Q6ZS72
  ENST ID: ENST00000342063
  CDS Start-End: 95-1516
cagacccctcctgcgaggccaggggctgtggccattgggagtttgtccccacggacccctcctcccccagagggcacgccagtcttgaagcaacatgagcagcccggagccccccacagagccccccgagcccgacaaccccacctggtcgactcagcccacgtatagcaaccttggtcagatccgtgcccacctgctgccctccaaggcctgccgcctccggacccctgggtccctctccaccaacccagagcccctgcccccacccctgcccaagaagatcctaacccggacccagtcactgcccacccgcaggaccctccatcccagctccatccaagtacagccgcctcggagaccctttctggggtcccacagtgtggacaagagccaggctgcagtgggaccagcctgtctccctgcagagctgacctttggcccggctgacgccccactgggcctctccctccgcgatctgcacagcccggaggctgtgcacactgcactggctgcgcggcagctgcagggcctccgtaccatctatgcccggctccgtgcccggctcatggggggccaccccgggccctgccaccccggccacagcttccgcctcctagacagctcaccctgcgcagagagcggggacgccctgtattaccgcgtggtgcgcgcgcacgaggacgcctggcacatcctggtcgccaaggtgcccaagcccggggcggacgtgccccacccgtggggcctggagctgcaggcctccctgtctccacacttcaatctgcaggggctgtgtggcctggtgcctgaaggcacactgcccggggcgccctggagaggcgcagtggcgctggcagccgaggttccagagcgcacggtggcgcagtggctggcggaggcctgcacgcagccgccggaggagttcgtgtgggctgtggccctgctgctgctgcagctgagcgcggccctgaagttcctggaggcgtggggcgcggccctagtcgagttgcggccggagaacttgctgctggtggcacctcggggctgtgcgacgacggggcccccacgcctgctcctcactgactttggccgcgtctgtctgcagccccctggacccccgggatccccgggcccccacgcgccgcagctgggcagcctcctccgagcgctgctcagccttgctgcgccctcgaccacgcctttggccgcgggcctggagctcctggcagcacagctgacccgcttgcggccctcggcgtcccggacgcggggcgcgctgcaggcgctgctctgggggcccgggcctgagctgcgcggccgcggagcaccgcttggtccctggctccgagcgctcgggccctggctgcgggtgcgccgcgggctgctggtcctgcgcctagcagagcgggccgcaggtggggaagctcccagcctcgaggactggctgtgttgcgaatacctggccgaggccaccgagtcctcgatgggccaggccctggcgctgctgtgggactgaccccaacccagggcgaacacacctggtccaggcctgcccaggaggcagggctggggctgaggtcagcgtctccatgatagccaagacaccctcttcctgcagagtccaggagcgcagcagagagagcaatgccccactccagagcctcccctcccgtgctggggatgtgggtcaagggcttcccaggaatgcagctgcccctccagggctgggggctggccagcgcctcctgtgttgggcagcagctctctgaagccagggcccccacgccacttccaggtgtggacaaccccgctgatcaatgtctctctgtgttctgccttccccagcagccagggcgctcttccgcgtgggttctgtcattgtctccatgagaggccaatgccgggaccagaggcattcctggctctggagcacccccttgtgctgaagatggccagtgattttgggcatgtgaatgcccctgtccctggtggagaattgcttggtggtgtcacgggaagggaaggctccctgggaccttagacacccagctcatctcagcggggtctggactcaccttccctaaaacagtccccgcggttccctgccacctcccctcaatccctctgcgcccaccctgcctccctccctgttcctccgtgacacaccaacttctttcgcgcccccaagcatttgtgtaggctgttccctctgccatactgttccagttccactttctttttcttttttttttttttttttttttgagacgatctcggcttactgcaagctccgcctcccgggttcacgccattctcctgcctcagcctcccgagtagctgggactacaggcgcccgccaccacgcccggctaattttttgtatttttagtagagacggggtttctccgtgttagccaggatggtctccatctcctgacctcgtgatccgtccgcctcggcctcccaaagtgctgggattacaggcgtgagccaccgcgcccggctacagtttcactttctctaaacaaataaaggtgcccactctgggccatcgctagctccttaccctgcgtt

SEQ ID NO: 118658 - DNA, 1223 bp, Homo sapiens
  Payload ID: 3226
  Gene Symbol: C19orf38
  Gene Name: chromosome 19 open reading frame 38
  Uniprot ID: A8MVS5
  ENST ID: ENST00000397820
  CDS Start-End: 108-800
atcagccctggttctcctttccccgatctggcctcacaggaggagttggcggggagccttgggcccctctggcctcagccggatttcccagccaaacgcagagagagatgccctggaccatcttgctctttgcagctggctccttggcgatcccagcaccatccatccggctggtgcccccgtacccaagcagccaagaggaccccatccacatcgcatgcatggcccctgggaacttcccgggggcgaatttcacactgtatcgaggggggcaggtggtccagctcctgcaggcccccacggaccagcgcggggtgacatttaacctgagcggcggcagcagcaaggctccagggggacccttccactgccagtatggagtgttaggtgagctcaaccagtcccagctgtcagacctcagcgagcccgtgaacgtctccttcccagtgcccacttggatcttggtgctctccctgagcctggctggtgccctcttcctccttgctgggctggtggctgttgccctggtggtcagaaaagttaaactcagaaatttacagaagaaaagagatcgagaatcctgctgggcccagattaacttcgacagcacagacatgtccttcgataactccctgtttaccgtctccgcgaaaacgatgccagaagaagacccggccaccttggatgatcactcaggcaccactgccacccccagcaactccaggacccggaagaggcccacttccacgtcctcctcgcctgagacccccgaattcagcactttccgggcctgccagtgaggctgaggactgggggacccctctgtctccaggcattcgggggcctgaggtccctccagctacttctgggggggctctgtcagccactttctcagggaattggacagaggaaaggaaggggaaccctggccttgggattttcatcacagaggagtgggagaggggacacaggcatgggcctggcactatacagacaacaggaagttcccctctcgaccttcggctcctcaggaccaccagagaaggagatgtcaggaccccttcttgtcccccagctgggccataagacgtcccaggtctctgcacacccgtggaattcctcccttccccagtgggtttttgagcatagggtgcccttgggtgtgttgtgtgtctgcctgctggcttgcttaagttattaattataacacgggtcaaggtgtt

SEQ ID NO: 118659 - DNA, 1060 bp, Homo sapiens
  Payload ID: 3226
  Gene Symbol: C19orf38
  Gene Name: chromosome 19 open reading frame 38
  Uniprot ID: A8MVS5
  ENST ID: ENST00000592854
  CDS Start-End: 265-957
ttggcgggaccgacgtggtggagtggacccaaaaatagcgtctaggcgtggccctgtacgcgacccgtagggctcgcctataaaagggctggggcggggcggagatacctgtggcgtcgtgttttgcttgctctgtgagcgtggtccaggttcgacgccttttgcgccttagaggcatcagcgtatcagtttcctcgaggagttggcggggagccttgggcccctctggcctcagccggatttcccagccaaacgcagagagagatgccctggaccatcttgctctttgcagctggctccttggcgatcccagcaccatccatccggctggtgcccccgtacccaagcagccaagaggaccccatccacatcgcatgcatggcccctgggaacttcccgggggcgaatttcacactgtatcgaggggggcaggtggtccagctcctgcaggcccccacggaccagcgcggggtgacatttaacctgagcggcggcagcagcaaggctccagggggacccttccactgccagtatggagtgttaggtgagctcaaccagtcccagctgtcagacctcagcgagcccgtgaacgtctccttcccagtgcccacttggatcttggtgctctccctgagcctggctggtgccctcttcctccttgctgggctggtggctgttgccctggtggtcagaaaagttaaactcagaaatttacagaagaaaagagatcgagaatcctgctgggcccagattaacttcgacagcacagacatgtccttcgataactccctgtttaccgtctccgcgaaaacgatgccagaagaagacccggccaccttggatgatcactcaggcaccactgccacccccagcaactccaggacccggaagaggcccacttccacgtcctcctcgcctgagacccccgaattcagcactttccgggcctgccagtgaggctgaggactgggggacccctctgtctccaggcattcgggggcctgaggtccctccagctacttctgggggggctctgtcagccactttctcagggaattgg

SEQ ID NO: 118660 - DNA, 970 bp, Homo sapiens
  Payload ID: 3227
  Gene Symbol: C19orf43
  Gene Name: chromosome 19 open reading frame 43
  Uniprot ID: Q9BQ61
  ENST ID: ENST00000242784
  CDS Start-End: 119-649
cgctggagggcctgaccgctcttcccggcatgcattgttcgggacgaggcgagtcgggcgccaagcgcggggccggagcggccttcccggagtcctttgcgcggcacctggcgacaaaatggctgcccgagggagacgggcggagcctcagggccgggaggctccgggccccgcgggcggtggcggtggcgggagccgttgggctgagtcgggatcggggacgtcgcccgagagcggggacgaggaggtgtcgggcgcgggttcgagcccggtgtcgggcggcgtgaacttgttcgccaacgacggcagcttcctggagctgttcaagcggaagatggaggaggagcagcggcagcggcaggaggagccgcccccgggtccgcagcgacccgaccagtcggccgccgccgctggccccggggatccgaagaggaagggcggtccgggctccacacttagcttcgtgggcaaacgcagaggcgggaacaaactagccctcaagacgggaatagtagccaagaagcagaagacggaggatgaggtattaacaagtaaaggtgacgcgtgggccaagtacatggcagaagtgaaaaagtacaaagctcaccagtgcggtgacgatgataaaactcggcccctggtgaaatgacgcccctcccccacctgcccatggcctgggactctctgcgatgtacataactatttaatgcagcggcagcggcgacagccttccctgagaggacttaaaagcagaaggaaaccgagatgcttcccgcagccgtggacgattctccaggactctttttttaccttgagcacttgcctcgtgagacttcatagaacagtggtttactgtcccccccttctcacctcctcattctctctggctctttctgtcttcctcttctcaccctcctccctccccttagccatcacttctgggaagtaaagaacttgacttagtgccgga

SEQ ID NO: 118661 - DNA, 841 bp, Homo sapiens
  Payload ID: 3227
  Gene Symbol: C19orf43
  Gene Name: chromosome 19 open reading frame 43
  ENST ID: ENST00000588213
  CDS Start-End: 15-413
cacctggcgacaaaatggctgcccgagggagacgggcggagcctcagggccgggaggctccgggccccgcgggcggtggcggtggcgggagccgttgggctgagtcgggatcggggacgtcgcccgagagcggggacgaggaggtgtcgggcgcgggttcgagcccggtgtcgggcggcgtgaacttgttcgccaacgacggcagcttcctggagctgttcaagcggaagatggaggaggagcagcggcagcggcaggaggagccgcccccgggtccgcagcgacccgaccagtcggccgccgccgctggccccggggatccgaagaggaagggcggtgggcaaacgcagaggcgggaacaaactagccctcaagacgggaatagtagccaagaagcagaagacggaggatgaggtattaacaagtaaaggtgacgcgtgggccaagtacatggcagaagtgaaaaagtacaaagctcaccagtgcggtgacgatgataaaactcggcccctggtgaaatgacgcccctcccccacctgcccatggcctgggactctctgcgatgtacataactatttaatgcagcggcagcggcgacagccttccctgagaggacttaaaagcagaaggaaaccgagatgcttcccgcagccgtggacgattctccaggactctttttttaccttgagcacttgcctcgtgagacttcatagaacagtggtttactgtcccccccttctcacctcctcattctctctggctctttctgtcttcctcttctcaccctcctccctccccttagccatcacttctgggaagtaaagaacttgacttagtgccg

SEQ ID NO: 118662 - DNA, 783 bp, Homo sapiens
  Payload ID: 3227
  Gene Symbol: C19orf43
  Gene Name: chromosome 19 open reading frame 43
  ENST ID: ENST00000592273
  CDS Start-End: 10-462
ggcgacaaaatggctgcccgagggagacgggcggagcctcagggccgggaggctccgggccccgcgggcggtggcggtggcgggagccgttgggctgagtcgggatcggggacgtcgcccgagagcggggacgaggaggtgtcgggcgcgggttcgagcccggtgtcgggcggcgtgaacttgttcgccaacgacggcagcttcctggagctgttcaagcggaagatggaggaggagcagcggcagcggcaggaggagccgcccccgggtccgcagcgacccgaccagtcggccgccgccgctggccccggggatccgaagaggaagggcggtccgggctccacacttagcttcgtattaacaagtaaaggtgacgcgtgggccaagtacatggcagaagtgaaaaagtacaaagctcaccagtgcggtgacgatgataaaactcggcccctggtgaaatgacgcccctcccccacctgcccatggcctgggactctctgcgatgtacataactatttaatgcagcggcagcggcgacagccttccctgagaggacttaaaagcagaaggaaaccgagatgcttcccgcagccgtggacgattctccaggactctttttttaccttgagcacttgcctcgtgagacttcatagaacagtggtttactgtcccccccttctcacctcctcattctctctggctctttctgtcttcctcttctcaccctcctccctccccttagccatcacttctgggaagtaaagaacttgacttagtgccgga

SEQ ID NO: 118663 - DNA, 988 bp, Homo sapiens
  Payload ID: 3227
  Gene Symbol: C19orf43
  Gene Name: chromosome 19 open reading frame 43
  ENST ID: ENST00000591254
  CDS Start-End: 1-402
atggctgcccgagggagacgggcggagcctcagggccgggaggctccgggccccgcgggcggtggcggtggcgggagccgttgggctgagtcgggatcggggacgtcgcccgagagcggggacgaggaggtgtcgggcgcgggttcgagcccggtgtcgggcggcgtgaacttgttcgccaacgacggcagcttcctggagctgttcaagcggaagatggaggaggagcagcggcagcggcaggaggagccgcccccgggtccgcagcgacccgaccagtcggccgccgccgctggccccggggatccgaagaggaagggcggtccgggctccacacttagcttcgtcggccggctggcggagctgggcgcggcgtcaggacgggccaccaggccgggctaggaaggtgtagtgggcctcagcgccgccaagggcggtcccggctcctgtaaccgttgcagtcttctgtcccttcacccaggtgggcaaacgcagaggcgggaacaaactagccctcaagacgggaatagtagccaagaagcagaagacggaggatgaggtattaacaagtaaaggtgacgcgtgggccaagtacatggcagaagtgaaaaagtacaaagctcaccagtgcggtgacgatgataaaactcggcccctggtgaaatgacgcccctcccccacctgcccatggcctgggactctctgcgatgtacataactatttaatgcagcggcagcggcgacagccttccctgagaggacttaaaagcagaaggaaaccgagatgcttcccgcagccgtggacgattctccaggactctttttttaccttgagcacttgcctcgtgagacttcatagaacagtggtttactgtcccccccttctcacctcctcattctctctggctctttctgtcttcctcttctcaccctcctccctccccttagccatcacttctgggaagtaaagaacttgacttagtgccgga

SEQ ID NO: 118664 - DNA, 3427 bp, Homo sapiens
  Payload ID: 3228
  Gene Symbol: C19orf44
  Gene Name: chromosome 19 open reading frame 44
  Uniprot ID: Q9H6X5
  ENST ID: ENST00000221671
  CDS Start-End: 157-2130
accccgcgattgtgattcggggcgccattggtctgcggggcgcggtgcttcccgggagatgtagtctcttctgctctggctctgttgcccagggcaaccgctccttcaggcgtgaatgtggcggctgcctctgcgaatggacggcgtgggaagagaatggcttctgcaaggaaagccagccgtcccatgcgtgatgtttttggtgacttcagtgatgtttccttggaagattcaacaatggaagaaatcagaaacttccagatcagtagaaatcttaccaaaatagcacctggtcatagcagatttctaaaaagaaaccaaactctagatgagaaacacttactcctgaaagagaaccctgtgctcgggagtggacccaggcttgcctcatgtagaccgcccaccactgcctccaggatccgagccaatgccgcactcatgaagctggcccagctggaaacccggatcatgaatcggaagctgcagaggaatttgtctgacacggaatctgactcaatgaccgccgatgctggtcttccaaagagagctgacagaatcctctctgggggtgcactcgaactcgcgtcccagaacacagacaaaacttcccagaatcaagcccgtgaacttcctgtcaccgaaaataatgcacagaacgcgaaggtcagtaggtttctaaagaagaaacaagcacctgttgaaaacatatcccctgaagcacctgctgggaaagagaggactttgcaaacccccaaacagaaagaacctgctagaacatttgattctccagacagtgacgaagaagaaatgaaagtattgctaggaagcttgatggactcttctagagaaaaaaacacgaatcaaggcttcagcagcgctaacgtcagcgaggaagaagaaagaaaactattttcggtcccatctcaactgagagcatttactgtacccagcgtggaactctccagcgcaaagccttctcagacatcacacctgccaacctccctggcagcagacagaacccttcacagcactcgctcaagagcagactacccacagagtcacgtttccagtgacaccgcctcccacacgccgtcagtttccatcacaggcgccttttcaaactcagtgtctttaaagatggggcatgtcaagcttgtgtcctccccgggaaggagtgaggctgagactgtggacgagccagtctcagaaggtgctgatgacagcctcgacgagtttagaataaatattttatcgcttgacggtctggctccagctgtcagtgagaactccgatttggaacaggaagaggaaagtgctcagagacaaaaaacagctggcaaaatcttcagagccgaggcgtccactgggcaggatgccccgaggcaggcccaggcgaggagctgggcatcacagggaaaggccgcctctgcagagggggatgagagcgaggtctcggagcatctcagtgccagctcggcttctgccatccagcaggacagcacttccagcatgcagccaccatctgaagcccccatggtgaacacagtcagctcagcttattcggaggattttgaaaactctccaagtctgacagcatctgagccaaccgcccattccaaggagtctcttgacagaacactggacgctttgtctgaatcctcttcaagtgtgaagacagaccttccacaaacagccgagtctaggaaaaagtcgggcaggcacgtgacaagagtgcttgtgaaggacacagctgtgcagacgccagatcctgccttcacctacgagtggaccaaggtggccagcatggcagccatggggcctgccctgggaggcgcctacgtggacccgacacccatcgccaatcatgttatcagtgcagatgcaatagaagccctgaccgcttacagcccggccgtgctggcactccatgatgtgctgaagcagcagctgagcctgacgcagcagttcatccaggccagccggcacctgcacgcctccctcctgcgctccctggacgcggactccttccactaccacaccctggaggaagccaaagagtacattaggtgccacagacctgccccactgaccatggaggatgccctggaggaggtgaacaaggagctgtgagcgccagcaggtggagcttgacgtgacgtcttaacaaaagcaaagcaccgcagcttcccagagttaccagcgcagcacttaagacaggatcttacggcggggtggggctcctggaccgtgaccggcgtcttcttcctggggagtacgacttggaccgggaccgcgactgggaccgggagcggcttctggaggagcgcgacctgctccgacttctgcagggaagggtgcccaagggtcagcagcagccaggcgtcgtggggaggccacaggaagaggcctcaggcactgccctgaggcagcctctgcctacctagatctggagcgggagtaggaacgggagcaggagcgcgaccttgaccttgagtacgagcctgaagacttggaggatcttgagttggagcgggaggaagaacgccctcgactcttggatctgctccgagacctcgagggtccgctgtggggagaggcctgatgatcaggtgccccagtggatgggctgcacccagcccaccctggccctcaggttcctagaccaccccagatgcaggggctctggctgtggatgtggcgccatagccacagcaacggtaccaagttcctaaatagtgtggccgagcctgctgctgtgtgaattcaggccttgtggaaaacaccgccccataggcacaggctgtgtgagggtggacgtgatgagtgtatctggggtctgctcccacccatcacaagctgtggaccctggccccccggccactgcagacatctgcgcttttacctgttcctcttctcctggcctttcctccgccgggcccgcatttttgctcggaagaactcatagaggccgttctgctcccagccttcactgtaagacacggcattccgtgtgtgaccacgtgacacccacccacaaggaagtcgtgaaaaagtcatcaggagttaatccacagaaccttggagagtacatggccctgtggctgtgggctccgagcatgggcgcagtagagcttggttcagtgttcccacagggctgtcctcctgcagcccagtggctcctctggtgcccacgcccttgccaccctgctgttccgctgaggtggtggggacccatggtctgtggaactgggaaacaggaacactgactcatgggtggacaggcctgcagcccagcacaggaaggaggggtgaccactgggaagggtgggctgagggccctgtggcagccggctgcttgagacgtgccgccgtgccacaccttccctaacttcttctgatgtgtctccattaaaacgcccttcattga

SEQ ID NO: 118665 - DNA, 569 bp, Homo sapiens
  Payload ID: 3228
  Gene Symbol: C19orf44
  Gene Name: chromosome 19 open reading frame 44
  ENST ID: ENST00000599550
  CDS Start-End: 386-569
gtgggaagaggtcggcagggctggtggggaggtgacctagctgggcgtccgggctcgcgagggggatacggggaaatggggccttctccggggctgagctggttgggccgctgcaggatggtcccgcgcctcagtttccctgtctggggtctattggagcatggtcctgcgcgggtcgcttcatagctggggagaagagcaggatggtctcaggggcgccagggttttcaagttttgagacggggtttcaccgtggtctcgatctcctgacctcgtgatccacccgccttggcctcccaaagtgctgggattacgggcatgagccaccgcacccggcctgtagtttttcatcttttaaagtctttgtaatcttcggaagcctttaatggcttctgcaaggaaagccagccgtcccatgcgtgatgtttttggtgacttcagtgatgtttccttggaagattcaacaatggaagaaatcagaaacttccagatcagtagaaatcttaccaaaatagcacctggtcatagcagatttctaaaaagaaaccaaactctagatgagaaacact

SEQ ID NO: 118666 - DNA, 612 bp, Homo sapiens
  Payload ID: 3228
  Gene Symbol: C19orf44
  Gene Name: chromosome 19 open reading frame 44
  ENST ID: ENST00000601109
  CDS Start-End: 1-108
ggggcctgccctgggaggcgcctacgtggacccgacacccatcgccaatcatgttatcagtgcagatgcaatagaagtacattaggtgccacagacctgccccactgaccatggaggatgccctggaggaggtgaacaaggagctgtgagcgccagcaggtggagcttgacgtgacgtcttaacaaaagcaaagcaccgcagcttcccagagttaccagcgcagcacttaagacaggatcttacggcggggtggggctcctggaccgtgaccggcgtcttcttcctggggagtacgacttggaccgggaccgcgactgggaccgggagcggcttctggaggagcgcgacctgctccgacttctgcagggaagggtgcccaagggtcagcagcagccaggcgtcgtggggaggccacaggaagaggcctcaggcactgccctgaggcagcctctgcctacctagatctggagcgggagtaggaacgggagcaggagcgcgaccttgaccttgagtacgagcctgaagacttggaggatcttgagttggagcgggaggaagaacgccctcgactcttggatctgctccgagacctcgagggtccgctgtgggga

SEQ ID NO: 118667 - DNA, 1071 bp, Homo sapiens
  Payload ID: 3228
  Gene Symbol: C19orf44
  Gene Name: chromosome 19 open reading frame 44
  ENST ID: ENST00000596592
  CDS Start-End: 62-832
aaccgctccttcaggcgtgaatgtggcggctgcctctgcgaatggacggcgtgggaagagaatggcttctgcaaggaaagccagccgtcccatgcgtgatgtttttggtgacttcagtgatgtttccttggaagattcaacaatggaagaaatcagaaacttccagatcagtagaaatcttaccaaaatagcacctggtcatagcagatttctaaaaagaaaccaaactctagatgagaaacacttactcctgaaagagaaccctgtgctcgggagtggacccaggcttgcctcatgtagaccgcccaccactgcctccaggatccgagccaatgccgcactcatgaagctggcccagctggaaacccggatcatgaatcggaagctgcagaggaatttgtctgacacggaatctgactcaatgaccgccgatgctggtcttccaaagagagctgacagaatcctctctgggggtgcactcgaactcgcgtcccagaacacagacaaaacttcccagaatcaagcccgtgaacttcctgtcaccgaaaataatgcacagaacgcgaaggtcagtaggtttctaaagaagaaacaagcacctgttgaaaacatatcccctgaagcacctgctgggaaagagaggactttgcaaacccccaaacagaaagaacctgctagaacatttgattctccagacagtgacgaagaagaaatgaaagtattgctaggaagcttgatggactcttctagagaaaaaaacacgaatcaaggcttcagcagcgctaacgtcagcgaggaagaagaaagaaaactattttcgagtttagaataaatattttatcgcttgacggtctggctccagctgtcagtgagaactccgatttggaacaggaagaggaaagtgctcagagacaaaaaacagctggcaaaatcttcagagccgaggcgtccactgggcaggatgccccgaggcaggcccaggcgaggagctgggcatcacagggaaaggccgcctctgcagagggggatgagagcgaggtctcggagcatctcagtgccagctcggcttct

SEQ ID NO: 118668 - DNA, 439 bp, Homo sapiens
  Payload ID: 3228
  Gene Symbol: C19orf44
  Gene Name: chromosome 19 open reading frame 44
  ENST ID: ENST00000601288
  CDS Start-End: 1-280
acccatcgccaatcatgttatcagtgcagatgcaatagaagccctgaccgcttacagcccggccgtgctggcactccatgatgtgctgaagcagcagctgagcctgacgcagcagttcatccaggccagccggcacctgcacgcctccctcctgcgctccctggacgcggactccttccactaccacaccctggaggaagccaaagagtacattaggtgccacagacctgccccactgaccatggaggatgccctggaggaggtgaacaaggagctgtgagcgccagcaggtggagcttgacgtgacgtcttaacaaaagctacaggaaatctagaacaaaatcaaatattcatcacgttgggttgaaaagttggaagattttgcatcttattgaaaagaatttttcaaaaatgtttctgtacaaatgaatggaattgc

SEQ ID NO: 118669 - DNA, 565 bp, Homo sapiens
  Payload ID: 3228
  Gene Symbol: C19orf44
  Gene Name: chromosome 19 open reading frame 44
  ENST ID: ENST00000594813
  CDS Start-End: 232-565
gaggtcggcagggctggtggggaggtgacctagctgggcgtccgggctcgcgagggggatacggggaaatggggccttctccggggctgagctggttgggccgctgcaggatggtcccgcgcctcagtttccctgtctggggtctattggagcatggtcctgcgcgggtcgcttcatagctggggagaagagcaggatggtctcaggggcgccagggttttcaagttttgaatggcttctgcaaggaaagccagccgtcccatgcgtgatgtttttggtgacttcagtgatgtttccttggaagattcaacaatggaagaaatcagaaacttccagatcagtagaaatcttaccaaaatagcacctggtcatagcagatttctaaaaagaaaccaaactctagatgagaaacacttactcctgaaagagaaccctgtgctcgggagtggacccaggcttgcctcatgtagaccgcccaccactgcctccaggatccgagccaatgccgcactcatgaagctggcccagctggaaacccggatcatgaatcggaagctgcagagga

SEQ ID NO: 118670 - DNA, 3248 bp, Homo sapiens
  Payload ID: 3228
  Gene Symbol: C19orf44
  Gene Name: chromosome 19 open reading frame 44
  Uniprot ID: Q9H6X5
  ENST ID: ENST00000593380
  CDS Start-End: 29-1885
ctctgcgaatggacggcgtgggaagagaatggcttctgcaaggaaagccagccgtcccatgcgtgatgtttttggtgacttcagtgatgtttccttggaagattcaacaatggaagaaatcagaaacttccagatcagtagaaatcttaccaaaatagcacctggtcatagcagatttctaaaaagaaaccaaactctagatgagaaacacttactcctgaaagagaaccctgtgctcgggagtggacccaggcttgcctcatgtagaccgcccaccactgcctccaggatccgagccaatgccgcactcatgaagctggcccagctggaaacccggatcatgaatcggaagctgcagaggaatttgtctgacacggaatctgactcaatgaccgccgatgctggtcttccaaagagagctgacagaatcctctctgggggtgcactcgaactcgcgtcccagaacacagacaaaacttcccagaatcaagcccgtgaacttcctgtcaccgaaaataatgcacagaacgcgaaggtcagtaggtttctaaagaagaaacaagcacctgttgaaaacatatcccctgaagcacctgctgggaaagagaggactttgcaaacccccaaacagaaagaacctgctagaacatttgattctccagacagtgacgaagaagaaatgaaagtattgctaggaagcttgatggactcttctagagaaaaaaacacgaatcaaggcttcagcagcgctaacgtcagcgaggaagaagaaagaaaactattttcggtcccatctcaactgagagcatttactgtacccagcgtggaactctccagcgcaaagccttctcagacatcacacctgccaacctccctggcagcagacagaacccttcacagcactcgctcaagagcagactacccacagagtcacgtttccagtgacaccgcctcccacacgccgtcagtttccatcacaggcgccttttcaaactcagtgtctttaaagatggggcatgtcaagcttgtgtcctccccgggaaggagtgaggctgagactgtggacgagccagtctcagaaggtgctgatgacagcctcgacgagtttagaataaatattttatcgcttgacggtctggctccagctgtcagtgagaactccgatttggaacaggaagaggaaagtgctcagagacaaaaaacagctggcaaaatcttcagagccgaggcgtccactgggcaggatgccccgaggcaggcccaggcgaggagctgggcatcacagggaaaggccgcctctgcagagggggatgagagcgaggtctcggagcatctcagtgccagctcggcttctgccatccagcaggacagcacttccagcatgcagccaccatctgaagcccccatggtgaacacagtcagctcagcttattcggaggattttgaaaactctccaagtctgacagcatctgagccaaccgcccattccaaggagtctcttgacagaacactggacgctttgtctgaatcctcttcaagtgtgaagacagaccttccacaaacagccgagtctaggaaaaagtcgggcaggcacgtgacaagagtgcttgtgaaggacacagctgtgcagacgccagatcctgccttcacctacgagtggaccaaggtggccagcatggcagccatggggcctgccctgggaggcgcctacgtggacccgacacccatcgccaatcatgttatcagtgcagatgcaatagaagcagctgagcctgacgcagcagttcatccaggccagccggcacctgcacgcctccctcctgcgctccctggacgcggactccttccactaccacaccctggaggaagccaaagagtacattaggtgccacagacctgccccactgaccatggaggatgccctggaggaggtgaacaaggagctgtgagcgccagcaggtggagcttgacgtgacgtcttaacaaaagcaaagcaccgcagcttcccagagttaccagcgcagcacttaagacaggatcttacggcggggtggggctcctggaccgtgaccggcgtcttcttcctggggagtacgacttggaccgggaccgcgactgggaccgggagcggcttctggaggagcgcgacctgctccgacttctgcagggaagggtgcccaagggtcagcagcagccaggcgtcgtggggaggccacaggaagaggcctcaggcactgccctgaggcagcctctgcctacctagatctggagcgggagtaggaacgggagcaggagcgcgaccttgaccttgagtacgagcctgaagacttggaggatcttgagttggagcgggaggaagaacgccctcgactcttggatctgctccgagacctcgagggtccgctgtggggagaggcctgatgatcaggtgccccagtggatgggctgcacccagcccaccctggccctcaggttcctagaccaccccagatgcaggggctctggctgtggatgtggcgccatagccacagcaacggtaccaagttcctaaatagtgtggccgagcctgctgctgtgtgaattcaggccttgtggaaaacaccgccccataggcacaggctgtgtgagggtggacgtgatgagtgtatctggggtctgctcccacccatcacaagctgtggaccctggccccccggccactgcagacatctgcgcttttacctgttcctcttctcctggcctttcctccgccgggcccgcatttttgctcggaagaactcatagaggccgttctgctcccagccttcactgtaagacacggcattccgtgtgtgaccacgtgacacccacccacaaggaagtcgtgaaaaagtcatcaggagttaatccacagaaccttggagagtacatggccctgtggctgtgggctccgagcatgggcgcagtagagcttggttcagtgttcccacagggctgtcctcctgcagcccagtggctcctctggtgcccacgcccttgccaccctgctgttccgctgaggtggtggggacccatggtctgtggaactgggaaacaggaacactgactcatgggtggacaggcctgcagcccagcacaggaaggaggggtgaccactgggaagggtgggctgagggccctgtggcagccggctgcttgagacgtgccgccgtgccacaccttccctaacttcttctgatgtgtctccattaaaacgcccttcattgagg

SEQ ID NO: 118671 - DNA, 2609 bp, Homo sapiens
  Payload ID: 3228
  Gene Symbol: C19orf44
  Gene Name: chromosome 19 open reading frame 44
  ENST ID: ENST00000594035
  CDS Start-End: 74-1951
gttgcccagggcaaccgctccttcaggcgtgaatgtggcggctgcctctgcgaatggacggcgtgggaagagaatggcttctgcaaggaaagccagccgtcccatgcgtgatgtttttggtgacttcagtgatgtttccttggaagattcaacaatggaagaaatcagaaacttccagatcagtagaaatcttaccaaaatagcacctggtcatagcagatttctaaaaagaaaccaaactctagatgagaaacacttactcctgaaagagaaccctgtgctcgggagtggacccaggcttgcctcatgtagaccgcccaccactgcctccaggatccgagccaatgccgcactcatgaagctggcccagctggaaacccggatcatgaatcggaagctgcagaggaatttgtctgacacggaatctgactcaatgaccgccgatgctggtcttccaaagagagctgacagaatcctctctgggggtgcactcgaactcgcgtcccagaacacagacaaaacttcccagaatcaagcccgtgaacttcctgtcaccgaaaataatgcacagaacgcgaaggtcagtaggtttctaaagaagaaacaagcacctgttgaaaacatatcccctgaagcacctgctgggaaagagaggactttgcaaacccccaaacagaaagaacctgctagaacatttgattctccagacagtgacgaagaagaaatgaaagtattgctaggaagcttgatggactcttctagagaaaaaaacacgaatcaaggcttcagcagcgctaacgtcagcgaggaagaagaaagaaaactattttcggtcccatctcaactgagagcatttactgtacccagcgtggaactctccagcgcaaagccttctcagacatcacacctgccaacctccctggcagcagacagaacccttcacagcactcgctcaagagcagactacccacagagtcacgtttccagtgacaccgcctcccacacgccgtcagtttccatcacaggcgccttttcaaactcagtgtctttaaagatggggcatgtcaagcttgtgtcctccccgggaaggagtgaggctgagactgtggacgagccagtctcagaaggtgctgatgacagcctcgacgagtttagaataaatattttatcgcttgacggtctggctccagctgtcagtgagaactccgatttggaacaggaagaggaaagtgctcagagacaaaaaacagctggcaaaatcttcagagccgaggcgtccactgggcaggatgccccgaggcaggcccaggcgaggagctgggcatcacagggaaaggccgcctctgcagagggggatgagagcgaggtctcggagcatctcagtgccagctcggcttctgccatccagcaggacagcacttccagcatgcagccaccatctgaagcccccatggtgaacacagtcagctcagcttattcggaggattttgaaaactctccaagtctgacagcatctgagccaaccgcccattccaaggagtctcttgacagaacactggacgctttgtctgaatcctcttcaagtgtgaagacagaccttccacaaacagccgagtctaggaaaaagtcgggcaggcacgtgacaagagtgcttgtgaaggacacagctgtgcagacgccagatcctgccttcacctacgagtggaccaaggccctgaccgcttacagcccggccgtgctggcactccatgatgtgctgaagcagcagctgagcctgacgcagcagttcatccaggccagccggcacctgcacgcctccctcctgcgctccctggacgcggactccttccactaccacaccctggaggaagccaaagagtacattaggtgccacagacctgccccactgaccatggaggatgccctggaggaggtgaacaaggagctgtgagcgccagcaggtggagcttgacgtgacgtcttaacaaaagctacaggaaatctagaacaaaatcaaatattcatcacgttgggttgaaaagttggaagattttgcatcttattgaaaagaatttttcaaaaatgtttctgtacaaatgaatggaattgcaccaggctgcccatggacaccaggtgtggccgattcccaacggtcacccaccagcttctggcaggagcagctcccctcctggcctcccctcccttcgggggtgtgaaatgaaatgatggagtggaaggcgctggctggggtcgggctccatgctctggatgggactgggccgtcgcacacgccagccggtgcagggttcttccaagtgcaaaactcaagcaggggacgcgacgggcacagactccgaggcagcgctcaacctgaagtgtcttaggctggtttcctgttagaatcttgtttcccagataacagcaaatggctacattccagaaaaaaaatatcaacttatacaactaaaataactgaactaagggccagtacgccttcgaagaattaggtttcagaatctcactgggcctcctctcaggtcagtattcttctttctagacctaaaccaaggagagtaaaaatgaaaaccctgcttcacttcgcaagtcaa

SEQ ID NO: 118672 - DNA, 1679 bp, Homo sapiens
  Payload ID: 3229
  Gene Symbol: C19orf45
  Gene Name: chromosome 19 open reading frame 45
  Uniprot ID: Q8NA69
  ENST ID: ENST00000361664
  CDS Start-End: 142-1659
ggatgcagcctgggaaggaacatgaggatcctctgagagaccagggacagagggagacccaaagatctggtctgtagctaagtgaattttctaaaactcattgattcacacgccatcccttgaggtggctggtgtcccgcgatggccacaggcgccctcctgccgtgctcgcgcccgtgcccgatgtcccggctggacttcctcaaggcctcgcacttctcgctggggcctgacctgcggctgcacgagggcaccatgcgcaccacgtcgcaccgggactttgcctacccggctgccacccgggagccgccgagcctgcagccgccgcccgcgctgcttttcccaatggacccgcgctgggaccgggaagagcgcgtgtcggaggcgcaccgcgcgttcccgccgccatccacgccgccgtgggagctgctgcaagcgcaggcgcgggaacgcacgctcgccatgcaggccggcaacctgcacctgcacgaggacgcgcacgccgggatcggcctctccaacgcgcacgccgcctacggctggcccgagctgccggcgcgcacccgagagcggatccgcggcgcgcgcctcatcttcgaccgcgactccctgcctcctggcgaccgcgacaagttgcgcatcccgcccaccacgcaccaggcgctctttccaccccacgacgcgcgcccgcagcctcgcgcgcccagttgccacctcgggggccccaacaccctcaagtgggactacacgagacaagatgggacttcctaccaaagacagttccaggccctgccaggcccacctgccttgaggtgtaagagggcctcctccggagtggagctgggagactgcaagatcagctatggatcaacgtgttcggagcagaaacaggcctacaggccccaggatctgcctgaagataggtatgacaaggcccaggccacagcccacatccactgtgtaaatatccgtcctggtgacggcctcttccgcgacaggaccaccaaggccgagcacttctatgccagggagccagagccttttgttcttcaccacgatcagactccggagtcgcacatcctgaaaggaaattggtgccccggccccggcagtctggacaccttcatgcagtacttctacggccagccgccacccccgacccagccacccagccgccacgtgcctcatgagaaattgcagagtcatgtgaccctaggggagccaaagctactcaaacgcttcttcaagaccaccatgggctcggactactgcccttcagagtggagacaggtgcagaaagcgcccaacctccacttgcagcaaagctacctgccgcggggcacgggcgaattcgattttttaaccatgaaccagaagatgctgaagccacacagaacacctccggccccggtgactgaagagatgctacagcggtgcaagtacagccacatggagccccctctgggtggactgcgcttcttctcaacacaatacaaggacgagtttcctttcaagtaccagggcccagcagccctgagactgaaaaatcctcaggagggcttcgtgcccctgggcacgcctcaccagcgcggctgcagggagaagatagaccctctggtcccccagccccctatgtacctgtgccccagccagcaataaatgccatcttggcaacattc

SEQ ID NO: 118673 - DNA, 833 bp, Homo sapiens
  Payload ID: 3229
  Gene Symbol: C19orf45
  Gene Name: chromosome 19 open reading frame 45
  ENST ID: ENST00000601176
  CDS Start-End: 257-833
ccctgagcctcaatgtcttttgtgaagcagtggttaaaacctacccttggccaggcatggtggctaacacctgtaatcccagcactttgggaggctgaggcagaagggttgcttgagcccaggagtttgagaccagcctgagcaacatagccagacccctgtctctaaaaaaaaaaatagaaagaattagccatgcatggtggtgcacacctatagtcccagatgctcagaagactgaggtggctggtgtcccgcgatggccacaggcgccctcctgccgtgctcgcgcccgtgcccgatgtcccggctggacttcctcaaggcctcgcacttctcgctggggcctgacctgcggctgcacgagggcaccatgcgcaccacgtcgcaccgggactttgcctacccggctgccacccgggagccgccgagcctgcagccgccgcccgcgctgcttttcccaatggacccgcgctgggaccgggaagagcgcgtgtcggaggcgcaccgcgcgttcccgccgccatccacgccgccgtgggagctgctgcaagcgcaggcgcgggaacgcacgctcgccatgcaggccggcaacctgcacctgcacgaggacgcgcacgccgggatcggcctctccaacgcgcacgccgcctacggctggcccgagctgccggcgcgcacccgagagcggatccgcggcgcgcgcctcatcttcgaccgcgactccctgcctcctggcgaccgcgacaagttgcgcatcccgcccaccacgcaccaggcgctctttccaccccacgacgcgcgcccgcagcctcgcgcgcccagttgccacctcg

SEQ ID NO: 118674 - DNA, 786 bp, Homo sapiens
  Payload ID: 3229
  Gene Symbol: C19orf45
  Gene Name: chromosome 19 open reading frame 45
  ENST ID: ENST00000596132
  CDS Start-End: 117-786
acaccctcctggacacttcctacccatgttacctgctggtgacctgtcttgttcatggctatatccgcacagcctggcagaaaacagagaatctgttttgtggctggtgtcccgcgatggccacaggcgccctcctgccgtgctcgcgcccgtgcccgatgtcccggctggacttcctcaaggcctcgcacttctcgctggggcctgacctgcggctgcacgagggcaccatgcgcaccacgtcgcaccgggactttgcctacccggctgccacccgggagccgccgagcctgcagccgccgcccgcgctgcttttcccaatggacccgcgctgggaccgggaagagcgcgtgtcggaggcgcaccgcgcgttcccgccgccatccacgccgccgtgggagctgctgcaagcgcaggcgcgggaacgcacgctcgccatgcaggccggcaacctgcacctgcacgaggacgcgcacgccgggatcggcctctccaacgcgcacgccgcctacggctggcccgagctgccggcgcgcacccgagagcggatccgcggcgcgcgcctcatcttcgaccgcgactccctgcctcctggcgaccgcgacaagttgcgcatcccgcccaccacgcaccaggcgctctttccaccccacgacgcgcgcccgcagcctcgcgcgcccagttgccacctcgggggccccaacaccctcaagtgggactacacgagacaagatgggacttcctaccaaagacagttccaggccctgccaggcccacctgccttga

SEQ ID NO: 118675 - DNA, 578 bp, Homo sapiens
  Payload ID: 3229
  Gene Symbol: C19orf45
  Gene Name: chromosome 19 open reading frame 45
  ENST ID: ENST00000597207
  CDS Start-End: 37-578
gagagctaactctcagaaggtggctggtgtcccgcgatggccacaggcgccctcctgccgtgctcgcgcccgtgcccgatgtcccggctggacttcctcaaggcctcgcacttctcgctggggcctgacctgcggctgcacgagggcaccatgcgcaccacgtcgcaccgggactttgcctacccggctgccacccgggagccgccgagcctgcagccgccgcccgcgctgcttttcccaatggacccgcgctgggaccgggaagagcgcgtgtcggaggcgcaccgcgcgttcccgccgccatccacgccgccgtgggagctgctgcaagcgcaggcgcgggaacgcacgctcgccatgcaggccggcaacctgcacctgcacgaggacgcgcacgccgggatcggcctctccaacgcgcacgccgcctacggctggcccgagctgccggcgcgcacccgagagcggatccgcggcgcgcgcctcatcttcgaccgcgactccctgcctcctggcgaccgcgacaagttgcgcatcccgcccaccacgcaccaggcgctctttccaccccacgacgc

SEQ ID NO: 118676 - DNA, 562 bp, Homo sapiens
  Payload ID: 3229
  Gene Symbol: C19orf45
  Gene Name: chromosome 19 open reading frame 45
  ENST ID: ENST00000596524
  CDS Start-End: 1-273
atcttcgaccgcgactccctgcctcctggcgaccgcgacaagttgcgcatcccgcccaccacgcaccaggcgctctttccaccccacgacgcgcgcccgcagcctcgcgcgcccagttgccacctcgggggccccaacaccctcaagtgggactacacgagacaagatgggacttcctaccaaagacagttccaggccctgccaggcccacctgccttgaggtgtaagagggaccaccaaggccgagcacttctatgccagggagccaggtgagagcctgaggcccgccccgtcccgcctcccaccgcagcctcccagggcagctctgcacctgttccgcttctggcagagccttttgttcttcaccacgatcagactccggagtcgcacatcctgaaaggaaattggtgccccggccccggcagtctggacaccttcatgcagtacttctacggccagccgccacccccgacccagccacccagccgccacgtgcctcatgagaaattgcagagtcatgtgaccctaggggagccaaagctactcaaacgcttcttcaaga

SEQ ID NO: 118677 - DNA, 1774 bp, Homo sapiens
  Payload ID: 3230
  Gene Symbol: C19orf47
  Gene Name: chromosome 19 open reading frame 47
  ENST ID: ENST00000357884
  CDS Start-End: 1-439
agggagcagtgtcagggccagggagacgatggtctccgtgactatggccacttccgagtggatccagttctttaaggaagccggcattcctccaggacctgccgtcaattatgccgtgatgtttgtggataataggattcagaagagcatgctgctggatctcaataaggagataatgaatgagctgggcgtgaccgtggtgggtgacatcatcgccattctcaagcatgccaaagtggtgcaccgtcaggacatgtgcaaagctgccactgagtcagtaccctgcagccctagcccccttgcaggcgaaattcgccgtggcaccagtgatggagtctccctctgttgcccaggctggagtacagtggcgcgaccttggctcagtgcaacctccgcctcccgggttcaagcagttctcctgcctcagcctcccgagtagctgggattacagctgcctcccgaatgatcaccaacagcctgaaccatgactctccacccagcacaccccccaggcgcccggacaccagcacctccaagatctcggtcactgtgtccaacaagatggcagcaaagagtgccaaggccactgcagccctggcccgccgggaggaggagagcctggctgttcctgccaagcggcgccgggtcactgctgagatggaggggaagtacgtcatcaacatgcccaaaggcaccacaccccgcacccgcaagatcctggagcagcagcaggctgcaaaaggtctccataggacgtctgtgtttgaccgcctcggcgccgagaccaaggcagacaccacgacagggagtaaacccacaggagtcttcagccgcctgggggccaccccagaaacggacgaggatctggcttgggacagcgacaatgacagcagcagctctgtcttgcagtatgccggggtcctgaagaagctaggacggggcccagccaaggccagtccccagccagcactgactgtcaaagccaaggccacaagctcagcgacaacggctgctgccccgacactgcggcgcctggcgctttcctcacggtctgggcttgagaggaagccggagtccttgtctaaagtcagcatcatcaagagactgggcgcagctgcccttgtgcccgaggcccaggacagccaggtcaccagcaccaagagtaagtcctcagccgaggtcaaggtcaccattaagaggactctggtggggccccgggggagcagctccagcgagggccttggtgcccagatggaccacgcgggcactgtgagcgtgttcaaaagactgggccgcaggaccttctagcccacctgtgggcggggtgcaggcagcagagcctgcgggcatctgccctggccgccccaggctcctggcttcatcacgcctcccaccagctcctggatgacacagcttgtctccctcgggctctagagctaggcccgagcattcgggggatcaccccatttctcctagcctgggatggtcgtcgcagctggcctggcctgctccaggactccccttctctcatgtcctctgtgctttcttctctggctgtggccttggcagaacccacttttctacctctcccaagtgccagggggcttcttcctctcctacattccccttcttcccctgagcagggtctgctgcctcagaccccagctcatcagcctccctgtccccctcaactaagtgggtgtcacctggtgggcctcccttcccccactccccactgacctccctcactcctctgcgcctccccccactgctg

SEQ ID NO: 118678 - DNA, 2126 bp, Homo sapiens
  Payload ID: 3230
  Gene Symbol: C19orf47
  Gene Name: chromosome 19 open reading frame 47
  Uniprot ID: Q8N9M1
  ENST ID: ENST00000392035
  CDS Start-End: 240-1307
gacagttggcgccgccgggagggagggcgggcggcgcgagtgggcgcgggcccggtgggccaggctccagggagcagtgtcagggccagggagacgatggtctccgtgactatgggtgagtctgtggccttctctccagggccccctctccccactgccctttttgagccacttccgagtggatccagttctttaaggaagccggcattcctccaggacctgccgtcaattatgccgtgatgtttgtggataataggattcagaagagcatgctgctggatctcaataaggagataatgaatgagctgggcgtgaccgtggtgggtgacatcatcgccattctcaagcatgccaaagtggtgcaccgtcaggacatgtgcaaagctgccactgagtcagtaccctgcagccctagcccccttgcaggcgaaattcgccgtggcaccagtgctgcctcccgaatgatcaccaacagcctgaaccatgactctccacccagcacaccccccaggcgcccggacaccagcacctccaagatctcggtcactgtgtccaacaagatggcagcaaagagtgccaaggccactgcagccctggcccgccgggaggaggagagcctggctgttcctgccaagcggcgccgggtcactgctgagatggaggggaagtacgtcatcaacatgcccaaaggcaccacaccccgcacccgcaagatcctggagcagcagcaggctgcaaaaggtctccataggacgtctgtgtttgaccgcctcggcgccgagaccaaggcagacaccacgacagggagtaaacccacaggagtcttcagccgcctgggggccaccccagaaacggacgaggatctggcttgggacagcgacaatgacagcagcagctctgtcttgcagtatgccggggtcctgaagaagctaggacggggcccagccaaggccagtccccagccagcactgactgtcaaagccaaggccacaagctcagcgacaacggctgctgccccgacactgcggcgcctggcgctttcctcacggtctgggcttgagaggaagccggagtccttgtctaaagtcagcatcatcaagagactgggcgcagctgcccttgtgcccgaggcccaggacagccaggtcaccagcaccaagagtaagtcctcagccgaggtcaaggtcaccattaagaggactctggtggggccccgggggagcagctccagcgagggccttggtgcccagatggaccacgcgggcactgtgagcgtgttcaaaagactgggccgcaggaccttctagcccacctgtgggcggggtgcaggcagcagagcctgcgggcatctgccctggccgccccaggctcctggcttcatcacgcctcccaccagctcctggatgacacagcttgtctccctcgggctctagagctaggcccgagcattcgggggatcaccccatttctcctagcctgggatggtcgtcgcagctggcctggcctgctccaggactccccttctctcatgtcctctgtgctttcttctctggctgtggccttggcagaacccacttttctacctctcccaagtgccagggggcttcttcctctcctacattccccttcttcccctgagcagggtctgctgcctcagaccccagctcatcagcctccctgtccccctcaactaagtgggtgtcacctggtgggcctcccttcccccactccccactgacctccctcactcctctgcgcctccccccactgctgtgacttctctctctccctgtcttcactttgttcatttctcttctgttttctgtccccgtggcaaggcccgactgtccgctgcgtcctgcccgaccctcctgtacctccggcctcccagcggccccctcgtcggcggtggcgtcgagcctgttgagactgttagccgccctctactcccaggctggagggacctctccagaccctgggctgcggctgaggcgcatccgttttcctgccctgggcatctgtctctgaaagtgtatggcgggtggtgggcaaggggcactgggaagggaggccagtgcctagagtgaagacagctgctgttttaatatatttttgtgactttcaaa

SEQ ID NO: 118679 - DNA, 3628 bp, Homo sapiens
  Payload ID: 3230
  Gene Symbol: C19orf47
  Gene Name: chromosome 19 open reading frame 47
  Uniprot ID: Q8N9M1
  ENST ID: ENST00000582783
  CDS Start-End: 14-1282
gggcggtcacgtgatggttatggccgcactctcgctggtggcggcctgttggggtagagcggccgcggacgagtcagttcagcttccggcggctccagggagcagtgtcagggccagggagacgatggtctccgtgactatggccacttccgagtggatccagttctttaaggaagccggcattcctccaggacctgccgtcaattatgccgtgatgtttgtggataataggattcagaagagcatgctgctggatctcaataaggagataatgaatgagctgggcgtgaccgtggtgggtgacatcatcgccattctcaagcatgccaaagtggtgcaccgtcaggacatgtgcaaagctgccactgagtcagtaccctgcagccctagcccccttgcaggcgaaattcgccgtggcaccagtgctgcctcccgaatgatcaccaacagcctgaaccatgactctccacccagcacaccccccaggcgcccggacaccagcacctccaagatctcggtcactgtgtccaacaagatggcagcaaagagtgccaaggccactgcagccctggcccgccgggaggaggagagcctggctgttcctgccaagcggcgccgggtcactgctgagatggaggggaagtacgtcatcaacatgcccaaaggcaccacaccccgcacccgcaagatcctggagcagcagcaggctgcaaaaggtctccataggacgtctgtgtttgaccgcctcggcgccgagaccaaggcagacaccacgacagggagtaaacccacaggagtcttcagccgcctgggggccaccccagaaacggacgaggatctggcttgggacagcgacaatgacagcagcagctctgtcttgcagtatgccggggtcctgaagaagctaggacggggcccagccaaggccagtccccagccagcactgactgtcaaagccaaggccacaagctcagcgacaacggctgctgccccgacactgcggcgcctggcgctttcctcacggtctgggcttgagaggaagccggagtccttgtctaaagtcagcatcatcaagagactgggcgcagctgcccttgtgcccgaggcccaggacagccaggtcaccagcaccaagagtaagtcctcagccgaggtcaaggtcaccattaagaggactctggtggggccccgggggagcagctccagcgagggccttggtgcccagatggaccacgcgggcactgtgagcgtgttcaaaagactgggccgcaggaccttctagcccacctgtgggcggggtgcaggcagcagagcctgcgggcatctgccctggccgccccaggctcctggcttcatcacgcctcccaccagctcctggatgacacagcttgtctccctcgggctctagagctaggcccgagcattcgggggatcaccccatttctcctagcctgggatggtcgtcgcagctggcctggcctgctccaggactccccttctctcatgtcctctgtgctttcttctctggctgtggccttggcagaacccacttttctacctctcccaagtgccagggggcttcttcctctcctacattccccttcttcccctgagcagggtctgctgcctcagaccccagctcatcagcctccctgtccccctcaactaagtgggtgtcacctggtgggcctcccttcccccactccccactgacctccctcactcctctgcgcctccccccactgctgtgacttctctctctccctgtcttcactttgttcatttctcttctgttttctgtccccgtggcaaggcccgactgtccgctgcgtcctgcccgaccctcctgtacctccggcctcccagcggccccctcgtcggcggtggcgtcgagcctgttgagactgttagccgccctctactcccaggctggagggacctctccagaccctgggctgcggctgaggcgcatccgttttcctgccctgggcatctgtctctgaaagtgtatggcgggtggtgggcaaggggcactgggaagggaggccagtgcctagagtgaagacagctgctgttttaatatatttttgtgactttcaaatcatttcccccactccttcagggtgagttgcaggactgtttcacactatgcgcagctgggctggggatggtggcagaggattgggctgtgtctctaaaggtcaggcttcctgcacacacatggtccatgtccctgctgcaagccctgagtcagggggagtaatggccacagtcaccattcagttaggccgccccctgcccccaataagccgtagtggttttgtcactctatcccctccccccatggatttcacctgcctgctggcacctttccaaatgatgggctccgtttgtgagaccatgagtttccactggtttggtcgcccacccctccctgctgcacagcgcccctgagccaggcctgtcctaggagctggtagcaggtagtgagcagggcctctccagggatggggtgtaggtaaagcggtggtgctggccaaggaatctgaggagtgggagaaagtggccagggccgcttcagtggttgtggataggaaggccttgcagaaggggtgacatggaggccaagttgggaatgtggcttcatgaagttcaggaggagagctttcagacagagggacagccaggggcagaggtgctgaggtgggacaaggaacaggaagaaggctggtggctgtgggtgagggtgggccctgcctccagcatgaggcagaggtgggtgggcaggggctaggtggctgggggtgttgtgatcaaggaggaggaatgtgcacagtgacccgggagtgctggatcgggaggatttggagctgggatgtgctgagctgagtttcatttaggatcatcgctctggcttctgtgaggagaaggaatggctgggagggctggggtggatgccactgcagcagtccaggcaggaagccaggatggctgcgagggcatggcagtggggagcagggaagagggccgcttgggctgcttagggtgtgctttggaggaagagctgtgggatgtgctgatgggttggaagttggggctagagaagatgagaatcatagggcccgcctagatgttagaccggagcatctgggggaacggctgttaacagagaaggggagacgggaggaaggtcaaggaagagggagctgtgttctgactgcattgcgcctgttagggtccccgctggggctcaggcggacacctgggctgggggttcatggctgctgacagtgcgcagggtacagctggaatcaaagccaagggccttggctgggcgtggtggcttacgcttgtaatcccagcagtttgggaggccaaggcgggtggatcacaaggtcaggagttcgagaccagcctggccaagatggtgaaaccccgtctctactaaaaatacaaaaattagccgggtgtggtgacaggtgcctgtaatcccggctacttaggaggctgaggcaggaggatcgcttgaacccgggaggtggaggttgcagtgagctgagatcgtgccactgcactccagcctaggcaacaagagcgagactccatctcaaaaaaaaaaaaaaaaaaa

SEQ ID NO: 118680 - DNA, 563 bp, Homo sapiens
  Payload ID: 3230
  Gene Symbol: C19orf47
  Gene Name: chromosome 19 open reading frame 47
  ENST ID: ENST00000580977
  CDS Start-End: 1-426
atggttatggccgcactctcgctggtggcggcctgttggggtagagcggccgcggacgagtcagttcagcttccggcggctccagggagcagtgtcagggccagggagacgatggtctccgtgactatggccacttccgagtggatccagttctttaaggaagccggcattcctccaggacctgccgtcaattatgccgtgatgtttgtggataataggattcagaagagcatgctgctggatctcaataaggagataatgaatgagctgggcgtgaccgtggtgggtgacatcatcgccattctcaagcatgccaaagtggtgcaccgtcagggtctcactccatcgcccaggctggagtgcagtagcactatctcggctcactgcaacctctgcctcccaggacatgtgcaaagctgccactgagtcagtaccctgcagccctagcccccttgcaggcgaaattcgccgtggcaccagtgctgcctcccgaatgatcaccaacagcctgaaccatgactctccacccagcacaccccccaggcgcccggacaccagcacct

SEQ ID NO: 118681 - DNA, 581 bp, Homo sapiens
  Payload ID: 3230
  Gene Symbol: C19orf47
  Gene Name: chromosome 19 open reading frame 47
  ENST ID: ENST00000582006
  CDS Start-End: 155-581
acgtgatggttatggccgcactctcgctggtggcggcctgttggggtagagcggccgcggacgagtcagttcagcttccggcgccacttccgagtggatccagttctttaaggaagccggcattcctccaggacctgccgtcaattatgccgtgatgtttgtggataataggattcagaagagcatgctgctggatctcaataaggagataatgaatgagctgggcgtgaccgtggtgggtgacatcatcgccattctcaagcatgccaaagtggtgcaccgtcaggacatgtgcaaagctgccactgagtcagtaccctgcagccctagcccccttgcaggcgaaattcgccgtggcaccagtgctgcctcccgaatgatcaccaacagcctgaaccatgactctccacccagcacaccccccaggcgcccggacaccagcacctccaagatctcggtcactgtgtccaacaagatggcagcaaagagtgccaaggccactgcagccctggcccgccgggaggaggagagcctggctgttcctgccaagcggcgccgggtcactgctgagatggagggga

SEQ ID NO: 118682 - DNA, 803 bp, Homo sapiens
  Payload ID: 3230
  Gene Symbol: C19orf47
  Gene Name: chromosome 19 open reading frame 47
  ENST ID: ENST00000580606
  CDS Start-End: 365-803
aaaaaaaaaattgagcagaagccagagaagggcaagattaaccctagtgaggatagagaagagagtctcatatgtggggacttagggaaagtgtcacaaagtagatggcagtggagcagaaggaaggataggttgccaggaggagacaggcattccaggcacaggtgacatcctctaaaaactgggaggccggcaaagcacctgtgtggggaaggaggcctggaggatgagaccaggcacaacacctccagggtgcttagtaggcaccaagcactgtctcaagtgcttttattcatagaaactcatccagcccttatagcagtcctctaaggctccagggagcagtgtcagggccagggagacgatggtctccgtgactatggccacttccgagtggatccagttctttaaggaagccggcattcctccaggacctgccgtcaattatgccgtgatgtttgtggataataggattcagaagagcatgctgctggatctcaataaggagataatgaatgagctgggcgtgaccgtggtgggtgacatcatcgccattctcaagcatgccaaagtggtgcaccgtcaggacatgtgcaaagctgccactgagtcagtaccctgcagccctagcccccttgcaggcgaaattcgccgtggcaccagtgctgcctcccgaatgatcaccaacagcctgaaccatgactctccacccagcacaccccccaggcgcccggacaccagcacctccaagatctcggtcactgtgtccaacaagatggcagcaaagagtgccaaggccactg

SEQ ID NO: 118683 - DNA, 550 bp, Homo sapiens
  Payload ID: 3230
  Gene Symbol: C19orf47
  Gene Name: chromosome 19 open reading frame 47
  ENST ID: ENST00000577617
  CDS Start-End: 1-506
ctgagatggaggggaagtacgtcatcaacatgcccaaaggcaccacaccccgcacccgcaagatcctggagcagcagcaggctgcaaaaggtctccataggacgtctgtgtttgaccgcctcggcgccgagaccaaggcagacaccacgacagggagtaaacccacaggagtcttcagccgcctgggggccaccccagaaacggacgaggatctggcttgggacagcgacaatgacagcagcagctctgtcttgcagtatgccggggtcctgaagaagctaggacggggcccagccaaggccagtccccagccagcactgactgtcaaagccaaggccacaagctcagcgacaacggctgctgccccgacactgcggcgcctggcgctttcctcacggtctgggcttgagaggaagccggagtccttgtctaaagtcagcatcatcaagagactgggcgcagctgcccttgtgcccgaggcccaggacagccaggccagtgcctagagtgaagacagctgctgttttaatatatttttgtgactttcaaa

SEQ ID NO: 118684 - DNA, 1718 bp, Homo sapiens
  Payload ID: 3231
  Gene Symbol: C19orf48
  Gene Name: chromosome 19 open reading frame 48
  Uniprot ID: Q6RUI8
  ENST ID: ENST00000345523
  CDS Start-End: 974-1327
tcccagcggattctctctcgtgtcgggccgccctcggggtcctttctcttcacggcccatctttgatgctgtcttcagaattgccggacgcaggggacaagacaatcgtttccatcatatccttgcccctttttgtcagccccagagacagcgtctcctcgcttgttcaggaagattctagcggaagcaggcagtattcctttccctaagcatgaaatggggtttcccaaacaggcgtgtgtattggacgcctcgggcggagcgcgggctggcgccgaggaccggccttgcgagcggcgcgcactataaaatggcgcgtgctgcaacccgcgcccgcttcggagagagaaatgctggggtgcagcttcaagcttaggaccacccaccatgcctatccaggtgctgaagggcctgaccatcactcattaagaacagaggaggctgcctgttactcctggtgttgcatccctccagacactctgctgtttcctgcctaggcgtggctgcagccatggctaggaaagcgctgccacccacccacctgggccagagctggttctgctcctgctgcagggacactgagctggctatctcggcgcttcgggcaagaactgcaacaggctctcctgggtcctgcaggtgtacagccgggcccctgccttgtgcctcagctctcgagagctgctgctgccgggtgacctgatccaacctgataaggtgccatcttcagctaccactgcaaggccctgagggcaacagcagcacggcactgcccacccggctgctgatggcctggtgccagctgggagtcctcccggcacttcgaggccactgagccacccttccagccccagcccaccatggacaggggtatccagcttcctcctcaacctcgtcctctgcccctgagccagtgacgcccaaggacatgcctgttacccaggtcctgtaccagcactagctggtcaagggcatgacagtgctggaggccgtcttggagatccaggccatcactggcagcaggctgctctccatggtgccagggcccgccaggccaccaggctcatgctgggacccaacccagtgcacaaggacttggctgctgagccacacacccaggagaaggtggataagtgggctaccaagggcttcctgcaggctaggggaggagccacccccgcttccctattgtgaccaggcctatggggaggagctgtccatacgccaccgtgagacctgggcctggctctcaaggacagacaccgcctggcctggtgctccaggggtgaagcaggccagaatcctgggggagctgctcctggtttgagctgcattcaggaagtgcgggacatggtaggggaggcaaaaagccttgggcactaccctccctgtggagctgttcggtgtccgtcgagctagccacaccctgacaccatgttcaagggtaccggaagagaagggtgtctgcccccaacctcccctgtgggtgtcactggccagatgtcatgagggaagcaggccttgtgagtggacactgaccatgagtccctggggggagtgatcccccaggcatcgtgtgccatgttgcacttctgcccaggcagcagggtgggtgggtaccatgggtgcccacccctccaccacatggggccccaaagcactgcaggccaagcagggcaaccccacacccttgacataaaagcatcttgaagctttta

SEQ ID NO: 118685 - DNA, 1666 bp, Homo sapiens
  Payload ID: 3231
  Gene Symbol: C19orf48
  Gene Name: chromosome 19 open reading frame 48
  Uniprot ID: Q6RUI8
  ENST ID: ENST00000391812
  CDS Start-End: 923-1276
tgaaatggggtttcccaaacaggcgtgtgtattggacgcctcgggcggagcgcgggctggcgccgaggaccggccttgcgagcggcgcgcactataaaatggcgcgtgctgcaacccgcgcccgcttcggagagagaaatgctgggagacagggtttcaccatattggccaggctggtctcgaactcctgacttcgtgatctgcccacctcggcttcccaaagtgctgaggttgcaggcgtgagccaccgtgcccggccgcgtttcctactctttaagctctgttagcttggcctctgtccctgaaggtgcagcttcaagcttaggaccacccaccatgcctatccaggtgctgaagggcctgaccatcactcattaagaacagaggaggctgcctgttactcctggtgttgcatccctccagacactctgctgtttcctgcctaggcgtggctgcagccatggctaggaaagcgctgccacccacccacctgggccagagctggttctgctcctgctgcagggacactgagctggctatctcggcgcttcgggcaagaactgcaacaggctctcctgggtcctgcaggtgtacagccgggcccctgccttgtgcctcagctctcgagagctgctgctgccgggtgacctgatccaacctgataaggtgccatcttcagctaccactgcaaggccctgagggcaacagcagcacggcactgcccacccggctgctgatggcctggtgccagctgggagtcctcccggcacttcgaggccactgagccacccttccagccccagcccaccatggacaggggtatccagcttcctcctcaacctcgtcctctgcccctgagccagtgacgcccaaggacatgcctgttacccaggtcctgtaccagcactagctggtcaagggcatgacagtgctggaggccgtcttggagatccaggccatcactggcagcaggctgctctccatggtgccagggcccgccaggccaccaggctcatgctgggacccaacccagtgcacaaggacttggctgctgagccacacacccaggagaaggtggataagtgggctaccaagggcttcctgcaggctaggggaggagccacccccgcttccctattgtgaccaggcctatggggaggagctgtccatacgccaccgtgagacctgggcctggctctcaaggacagacaccgcctggcctggtgctccaggggtgaagcaggccagaatcctgggggagctgctcctggtttgagctgcattcaggaagtgcgggacatggtaggggaggcaaaaagccttgggcactaccctccctgtggagctgttcggtgtccgtcgagctagccacaccctgacaccatgttcaagggtaccggaagagaagggtgtctgcccccaacctcccctgtgggtgtcactggccagatgtcatgagggaagcaggccttgtgagtggacactgaccatgagtccctggggggagtgatcccccaggcatcgtgtgccatgttgcacttctgcccaggcagcagggtgggtgggtaccatgggtgcccacccctccaccacatggggccccaaagcactgcaggccaagcagggcaaccccacacccttgacataaaagcatcttgaagctttt

SEQ ID NO: 118686 - DNA, 782 bp, Homo sapiens
  Payload ID: 3231
  Gene Symbol: C19orf48
  Gene Name: chromosome 19 open reading frame 48
  ENST ID: ENST00000601267
  CDS Start-End: 708-782
gtttattactttttccggctgtgtggaaagacgcacgtgtcctgaagggttcgaggctgcgacgggagcggccatgtagtcgcgtggaaagggtgcagcttcaagcttaggaccacccaccatgcctatccaggtgctgaagggcctgaccatcactcattaagaacagaggaggctgcctgttactcctggtgttgcatccctccagacactctgctgtttcctgcctaggcgtggctgcagccatggctaggaaagcgctgccacccacccacctgggccagagctggttctgctcctgctgcagggacactgagctggctatctcggcgcttcgggcaagaactgcaacaggctctcctgggtcctgcaggtgtacagccgggcccctgccttgtgcctcagctctcgagagctgctgctgccgggtgacctgatccaacctgataaggtgccatcttcagctaccactgcaaggccctgagggcaacagcagcacggcactgcccacccggctgctgatggcctggtgccagctgggagtcctcccggcacttcgaggccactgagccacccttccagccccagcccaccatggacaggggtatccagcttcctcctcaacctcgtcctctgcccctgagccagtgacgcccaaggacatgcctgttacccaggtcctgtaccagcactagctggtcaagggcatgacagtgctggaggccgtcttggagatccaggccatcactggcagcaggctgctctccatggtgccagggccc

SEQ ID NO: 118687 - DNA, 578 bp, Homo sapiens
  Payload ID: 3231
  Gene Symbol: C19orf48
  Gene Name: chromosome 19 open reading frame 48
  ENST ID: ENST00000593287
  CDS Start-End: 542-578
cgcttcggagagagaaatgctggggtgcagcttcaagcttaggaccacccaccatgcctatccaggtgctgaagggcctgaccatcactcattaagaacagaggaggctgcctgttactcctggtgttggtgagaaggcagatgtagacaggtgcccagcaagtgctgagccaggcgctgccctaagcactgggctcattaaccttagtaaccctgttggggggcggaggtgggatgggggctggggctgggttgcagtgagatgtccagtgtccagggttcttgaaagggctgcacttggggaccccgtgatgtccagcactgggctctgactgcccctgaggacacggtgcaccccgggacctttgacatccggggttctgaggggccccactccgggaggtgatggtgggggtgtggctgtttcccccattcgtgccttttctgtgtccttcccctgacagcatccctccagacactctgctgtttcctgcctaggcgtggctgcagccatggctaggaaagcgctgccaccaggctcatgctgggacccaacccagtgcacaaggacttggctg

SEQ ID NO: 118688 - DNA, 971 bp, Homo sapiens
  Payload ID: 3231
  Gene Symbol: C19orf48
  Gene Name: chromosome 19 open reading frame 48
  ENST ID: ENST00000597493
  CDS Start-End: 826-971
aatggcgcgtgctgcaacccgcgcccgcttcggagagagaaatgctgggagacagggtttcaccatattggccaggctggtctcgaactcctgacttcgtgatctgcccacctcggcttcccaaagtgctgaggttgcaggcgtgagccaccgtgcccggccgcgtttcctactctttaagctctgttagcttggcctctgtccctgaaggtgcagcttcaagcttaggaccacccaccatgcctatccaggtgctgaagggcctgaccatcactcattaagaacagaggaggctgcctgttactcctggtgttgcatccctccagacactctgctgtttcctgcctaggcgtggctgcagccatggctaggaaagcgctgccacccacccacctgggccagagctggttctgctcctgctgcagggacactgagctggctatctcggcgcttcgggcaagaactgcaacaggctctcctgggtcctgcaggtgtacagccgggcccctgccttgtgcctcagctctcgagagctgctgctgccgggtgacctgatccaacctgataaggtgccatcttcagctaccactgcaaggccctgagggcaacagcagcacggcactgcccacccggctgctgatggcctggtgccagctgggagtcctcccggcacttcgaggccactgagccacccttccagccccagcccaccatggacaggggtatccagcttcctcctcaacctcgtcctctgcccctgagccagtgacgcccaaggacatgcctgttacccaggtcctgtaccagcactagctggtcaagggcatgacagtgctggaggccgtcttggagatccaggccatcactggcagcaggctgctctccatggtgccagggcccgccaggccaccaggctcatgctgggacccaacccagtgcacaaggacttggctgctgagccacacacccag

SEQ ID NO: 118689 - DNA, 1639 bp, Homo sapiens
  Payload ID: 3231
  Gene Symbol: C19orf48
  Gene Name: chromosome 19 open reading frame 48
  Uniprot ID: Q6RUI8
  ENST ID: ENST00000596655
  CDS Start-End: 952-1305
ggtgcagcttcaagcttaggaccacccaccatgcctatccaggtgctgaagggcctgaccatcactcattaagaacagaggaggctgcctgttactcctggtgttggtgagaaggcagatgtagacaggtgcccagcaagtgctgagccaggcgctgccctaagcactgggctcattaaccttagtaaccctgttggggggcggaggtgggatgggggctggggctgggttgcagtgagatgtccagtgtccagggttcttgaaagggctgcacttggggaccccgtgatgtccagcactgggctctgactgcccctgaggacacggtgcaccccgggacctttgacatccggggttctgaggggccccactccgggaggtgatggtgggggtgtggctgtttcccccattcgtgccttttctgtgtccttcccctgacagcatccctccagacactctgctgtttcctgcctaggcgtggctgcagccatggctaggaaagcgctgccacccacccacctgggccagagctggttctgctcctgctgcagggacactgagctggctatctcggcgcttcgggcaagaactgcaacaggctctcctgggtcctgcaggtgtacagccgggcccctgccttgtgcctcagctctcgagagctgctgctgccgggtgacctgatccaacctgataaggtgccatcttcagctaccactgcaaggccctgagggcaacagcagcacggcactgcccacccggctgctgatggcctggtgccagctgggagtcctcccggcacttcgaggccactgagccacccttccagccccagcccaccatggacaggggtatccagcttcctcctcaacctcgtcctctgcccctgagccagtgacgcccaaggacatgcctgttacccaggtcctgtaccagcactagctggtcaagggcatgacagtgctggaggccgtcttggagatccaggccatcactggcagcaggctgctctccatggtgccagggcccgccaggccaccaggctcatgctgggacccaacccagtgcacaaggacttggctgctgagccacacacccaggagaaggtggataagtgggctaccaagggcttcctgcaggctaggggaggagccacccccgcttccctattgtgaccaggcctatggggaggagctgtccatacgccaccgtgagacctgggcctggctctcaaggacagacaccgcctggcctggtgctccaggggtgaagcaggccagaatcctgggggagctgctcctggtttgagctgcattcaggaagtgcgggacatggtaggggaggcaaaaagccttgggcactaccctccctgtggagctgttcggtgtccgtcgagctagccacaccctgacaccatgttcaagggtaccggaagagaagggtgtctgcccccaacctcccctgtgggtgtcactggccagatgtcatgagggaagcaggccttgtgagtggacactgaccatgagtccctggggggagtgatcccccaggcatcgtgtgccatgttgcacttctgcccaggcagcagggtgggtgggtaccatgggtgcccacccctccaccacatggggccccaaagcac

SEQ ID NO: 118690 - DNA, 1844 bp, Homo sapiens
  Payload ID: 3231
  Gene Symbol: C19orf48
  Gene Name: chromosome 19 open reading frame 48
  Uniprot ID: Q6RUI8
  ENST ID: ENST00000598463
  CDS Start-End: 1100-1453
ggtcctttaaggtcttgaacatcggtttcctgacttgagcggggcccatgcccctgccgaggaggctcagcctggaagcagctagcccatttcctatctcccccaccacgaccccagcaaggatctctacttgacttacctccttcaggcaaccacctagaaaatcgttgagtttgttcatgtcacaagtgaaagtattttttcatgcattcatcgttggcacgtcgtcctttggcaatattaaaatctaccaacaaatgggaaaagttaacatttgcaccatcttgccatattcaaaaaccttgtgcttaagtgttttgaaaagacagggtttcaccatattggccaggctggtctcgaactcctgacttcgtgatctgcccacctcggcttcccaaagtgctgaggttgcaggcgtgagccaccgtgcccggccgcgtttcctactctttaagctctgttagcttggcctctgtccctgaaggtgcagcttcaagcttaggaccacccaccatgcctatccaggtgctgaagggcctgaccatcactcattaagaacagaggaggctgcctgttactcctggtgttgcatccctccagacactctgctgtttcctgcctaggcgtggctgcagccatggctaggaaagcgctgccacccacccacctgggccagagctggttctgctcctgctgcagggacactgagctggctatctcggcgcttcgggcaagaactgcaacaggctctcctgggtcctgcaggtgtacagccgggcccctgccttgtgcctcagctctcgagagctgctgctgccgggtgacctgatccaacctgataaggtgccatcttcagctaccactgcaaggccctgagggcaacagcagcacggcactgcccacccggctgctgatggcctggtgccagctgggagtcctcccggcacttcgaggccactgagccacccttccagccccagcccaccatggacaggggtatccagcttcctcctcaacctcgtcctctgcccctgagccagtgacgcccaaggacatgcctgttacccaggtcctgtaccagcactagctggtcaagggcatgacagtgctggaggccgtcttggagatccaggccatcactggcagcaggctgctctccatggtgccagggcccgccaggccaccaggctcatgctgggacccaacccagtgcacaaggacttggctgctgagccacacacccaggagaaggtggataagtgggctaccaagggcttcctgcaggctaggggaggagccacccccgcttccctattgtgaccaggcctatggggaggagctgtccatacgccaccgtgagacctgggcctggctctcaaggacagacaccgcctggcctggtgctccaggggtgaagcaggccagaatcctgggggagctgctcctggtttgagctgcattcaggaagtgcgggacatggtaggggaggcaaaaagccttgggcactaccctccctgtggagctgttcggtgtccgtcgagctagccacaccctgacaccatgttcaagggtaccggaagagaagggtgtctgcccccaacctcccctgtgggtgtcactggccagatgtcatgagggaagcaggccttgtgagtggacactgaccatgagtccctggggggagtgatcccccaggcatcgtgtgccatgttgcacttctgcccaggcagcagggtgggtgggtaccatgggtgcccacccctccaccacatggggccccaaagcactgcaggccaagcagggcaaccccacacccttgacataaaagcatcttgaagctttta

SEQ ID NO: 118691 - DNA, 709 bp, Homo sapiens
  Payload ID: 3231
  Gene Symbol: C19orf48
  Gene Name: chromosome 19 open reading frame 48
  ENST ID: ENST00000600373
  CDS Start-End: 596-709
tcaagcttaggaccacccaccatgcctatccaggtgctgaagggcctgaccatcactcattaagaacagaggaggctgcctgttactcctggtgttggtgagaaggcagatgtagacaggcgtggctgcagccatggctaggaaagcgctgccacccacccacctgggccagagctggttctgctcctgctgcagggacactgagctggctatctcggcgcttcgggcaagaactgcaacaggctctcctgggtcctgcaggtgtacagccgggcccctgccttgtgcctcagctctcgagagctgctgctgccgggtgacctgatccaacctgataaggtgccatcttcagctaccactgcaaggccctgagggcaacagcagcacggcactgcccacccggctgctgatggcctggtgccagctgggagtcctcccggcacttcgaggccactgagccacccttccagccccagcccaccatggacaggggtatccagcttcctcctcaacctcgtcctctgcccctgagccagtgacgcccaaggacatgcctgttacccaggtcctgtaccagcactagctggtcaagggcatgacagtgctggaggccgtcttggagatccaggccatcactggcagcaggctgctctccatggtgccagggcccgccaggccaccaggctcatgctgggacccaacccagtgc

SEQ ID NO: 118692 - DNA, 827 bp, Homo sapiens
  Payload ID: 3231
  Gene Symbol: C19orf48
  Gene Name: chromosome 19 open reading frame 48
  ENST ID: ENST00000596287
  CDS Start-End: 582-827
gtgcagcttcaagcttaggaccacccaccatgcctatccaggtgctgaagggcctgaccatcactcattaagaacagaggaggctgcctgttactcctggtgttggcgtggctgcagccatggctaggaaagcgctgccacccacccacctgggccagagctggttctgctcctgctgcagggacactgagctggctatctcggcgcttcgggcaagaactgcaacaggctctcctgggtcctgcaggtgtacagccgggcccctgccttgtgcctcagctctcgagagctgctgctgccgggtgacctgatccaacctgataaggtgccatcttcagctaccactgcaaggccctgagggcaacagcagcacggcactgcccacccggctgctgatggcctggtgccagctgggagtcctcccggcacttcgaggccactgagccacccttccagccccagcccaccatggacaggggtatccagcttcctcctcaacctcgtcctctgcccctgagccagtgacgcccaaggacatgcctgttacccaggtcctgtaccagcactagctggtcaagggcatgacagtgctggaggccgtcttggagatccaggccatcactggcagcaggctgctctccatggtgccagggcccgccaggccaccaggctcatgctgggacccaacccagtgcacaaggacttggctgctgagccacacacccaggagaaggtggataagtgggctaccaagggcttcctgcaggctaggggaggagccacccccgcttccctattgtgaccaggcctatggggaggagctgtcc

SEQ ID NO: 118693 - DNA, 892 bp, Homo sapiens
  Payload ID: 3231
  Gene Symbol: C19orf48
  Gene Name: chromosome 19 open reading frame 48
  ENST ID: ENST00000597705
  CDS Start-End: 650-892
agcgcgggctggcgccgaggaccggccttgcgagcggcgcgcactataaaatggcgcgtgctgcaacccgcgcccgcttcggagagagaaatgctggggtgcagcttcaagcttaggaccacccaccatgcctatccagcatccctccagacactctgctgtttcctgcctaggcgtggctgcagccatggctaggaaagcgctgccacccacccacctgggccagagctggttctgctcctgctgcagggacactgagctggctatctcggcgcttcgggcaagaactgcaacaggctctcctgggtcctgcaggtgtacagccgggcccctgccttgtgcctcagctctcgagagctgctgctgccgggtgacctgatccaacctgataaggtgccatcttcagctaccactgcaaggccctgagggcaacagcagcacggcactgcccacccggctgctgatggcctggtgccagctgggagtcctcccggcacttcgaggccactgagccacccttccagccccagcccaccatggacaggggtatccagcttcctcctcaacctcgtcctctgcccctgagccagtgacgcccaaggacatgcctgttacccaggtcctgtaccagcactagctggtcaagggcatgacagtgctggaggccgtcttggagatccaggccatcactggcagcaggctgctctccatggtgccagggcccgccaggccaccaggctcatgctgggacccaacccagtgcacaaggacttggctgctgagccacacacccaggagaaggtggataagtgggctaccaagggcttcctgcaggctaggggaggagccacccccgcttccctattgtgaccaggcctatggggaggagctg

SEQ ID NO: 118694 - DNA, 1425 bp, Homo sapiens
  Payload ID: 3232
  Gene Symbol: C19orf52
  Gene Name: chromosome 19 open reading frame 52
  Uniprot ID: Q9BSF4
  ENST ID: ENST00000270502
  CDS Start-End: 91-873
gttggcgcttgcgcagaagagactcccgggctcttaacgtcgggtatcaggagtttcttcccggagcaaggacccccaagacggaagaggatggccgcggcggctctgaggagattttggtcccggcgccgcgcagaggcgggcgacgcggtagtggcgaagccgggagtgtgggcgcggctggggtcctgggcccgcgcgctgctccgggactacgccgaggcctgcagggacgcttcggcggaggctagggcccggccggggcgcgccgctgtgtatgtgggtctgctgggcggcgcggcggcctgcttcacgctggcgcccagcgagggtgccttcgaggaggcgctgctggaggcgtcggggaccctcctgctgctggcgccggccacccgcaaccgcgagtccgaagccttcgtgcagaggctgctctggctgcggggccgtggccgcctgcgctacgtcaacctggggctctgctcgctggtgtacgaggcgcccttcgacgcccaggccagcctctaccaggcgcgttgccgctacctgcagccccgctggaccgacttccccggccgggtcctggacgtgggcttcgtgggtcgctggtgggtgctgggggcctggatgcgcgactgcgacatcaacgacgacgaattcctgcacctgccggcgcatttgcgggtggtcgggccccagcagctgcattccgagaccaacgagcggctcttcgatgagaagtacaagcctgtcgtgctcaccgacgatcaggtggaccaggcgctgtgggaggagcaggtcttgcagaaggagaagaaggacaggctcgccctgagccaggcccactcgctggtgcaggcggaggccccgagatgaaaccctgaggcccccgagtcctggcaaactgcttgcctggggtggtgcagttctgagtgtgcctcacctgcagaacagctgagacagatgatgtgcaaagtgttttctcactggatttgcacaagtttggggagcctttctgccccccgtctttgttctttattagctgaagctaattcagagccacctgggtccgggagttggggacagcagaacgacttgacacatgttcatcactggcagagctggtcatgagccttttatataagcctttttcatcgggcctcagaggccctccttaaggaggtaccacattggtcagctgacttgcaaactcttctaaggccacttagattttctttttcaagtttgggttgtggcctggcatggtgatgtctgtaatcccagcagtttgcaaactgaggcaagagaatcgcttgaggccaggagtttgaggccagctagagtgacatagcaagactccgatgctacaaaaaagaataataatagtaattaactaaataaaatttgagctgaaatgtttttattcta

SEQ ID NO: 118695 - DNA, 859 bp, Homo sapiens
  Payload ID: 3232
  Gene Symbol: C19orf52
  Gene Name: chromosome 19 open reading frame 52
  ENST ID: ENST00000588807
  CDS Start-End: 1-82
gcaggtcttgcagaaggagaagaaggacaggctcgccctgagccaggcccactcgctggtgcaggcggaggccccgagatgaaaccctgaggcccccgagtcctggcaaactgcttgcctggggtggtgcagttctgagtgtgcctcacctgcagaacagctgagacagatgatgtgcaaagtgttttctcactggatttgcacaagtttggggagcctttctgccccccgtctttgttctttattagctgaagctaattcagagccacctgggtccgggagttggggacagcagaacgacttgacacatgttcatcactggcagagctggtcatgagccttttatataagcctttttcatcgggcctcagaggccctccttaaggaggtaccacattggtcagctgacttgcaaactcttctaaggccacttagattttctttttcaagtttgggttgtggcctggcatggtgatgtctgtaatcccagcagtttgcaaactgaggcaagagaatcgcttgaggccaggagtttgaggccagctagagtgacatagcaagactccgatgctacaaaaaagaataataatagtaattaactaaataaaatttgagctgaaatgtttttattctatgacctattctctctcgttttttttttttttttttttgagacagggtcttgctctgttttgcctgctggagttgcagtgagccgagatcacgccactgcgttccagtctgggcaacagagtgagactccgtcacacaaaaaaaaaaaaagagaaaaaataaataacataaaactgaagtattaagggagtgatgctacctcaggggcctgtggcaagttaataaa

SEQ ID NO: 118696 - DNA, 504 bp, Homo sapiens
  Payload ID: 3233
  Gene Symbol: C19orf53
  Gene Name: chromosome 19 open reading frame 53
  ENST ID: ENST00000221576
  CDS Start-End: 1-243
tggcgcaggggcagcgcaagtttcaggcgcacaaacccgcaaagagtaagacggcagcggcagcctctgaaaagaatcggggcccaagaaaaggcgaacctagaagtcggaatccggaagaagatcgaacatgacgtggtgatgaaagccagcagcagcctgcccaagaagctggcactgctgaaggccccagccaagaagaaaggggcagctgccgccacctcctccaagacaccttcctgaggacgctggccccagtgcaggccaacatcccaccccctacctccatatgggaccttgcaagtcatcccacaggctgcactgtcaggaagaggaccctgtcccccagcactgggcttcacctagaacttcagtgggggccaagggtgctgagaacccagcaatgaccaggaagatacagtcactaacttcatctgtccccgtgccccttcccaggtcctgcctccacaggtttaacccagaacaataaacctggctttgtca

SEQ ID NO: 118697 - DNA, 499 bp, Homo sapiens
  Payload ID: 3233
  Gene Symbol: C19orf53
  Gene Name: chromosome 19 open reading frame 53
  ENST ID: ENST00000588841
  CDS Start-End: 1-18
cccaagaaaaggcggtaaggagcggcccggggacttgggggcgaggtggacccccggcttcccggcctcacgtgagcacatctttccccaggtcgtgttatcgctcccaagaaggcgcgcgtcgtgcagcagcaaaagctcaagaagaacctagaagtcggaatccggaagaagatcgaacatgacgtggtgatgaaagccagcagcagcctgcccaagaagctggcactgctgaaggccccagccaagaagaaaggggcagctgccgccacctcctccaagacaccttcctgaggacgctggccccagtgcaggccaacatcccaccccctacctccatatgggaccttgcaagtcatcccacaggctgcactgtcaggaagaggaccctgtcccccagcactgggcttcacctagaacttcagtgggggccaagggtgctgagaacccagcaatgaccaggaagatacagtcactaacttcatctgtccccgtgccc

SEQ ID NO: 118698 - DNA, 357 bp, Homo sapiens
  Payload ID: 3233
  Gene Symbol: C19orf53
  Gene Name: chromosome 19 open reading frame 53
  ENST ID: ENST00000592760
  CDS Start-End: 1-94
aaaaggcggtcgtgttatcgctcccaagaaggcgcgcgtcgtgcagcagcaaaagctcaagaaggtttcactatgctgctcgggctggtcttgaactcctggcctcaaggcatcctcccgcctctgcctcccaaaatgctgggattacaggcgtgagccaccctatggttgtttttaagtgcaacatttatatgtagatggaacctagaagtcggaatccggaagaagatcgaacatgacgtggtgatgaaagccagcagcagcctgcccaagaagctggcactgctgaaggccccagccaagaagaaaggggcagctgccgccacctcctccaagacaccttcctgaggacgctgg

SEQ ID NO: 118699 - DNA, 873 bp, Homo sapiens
  Payload ID: 3233
  Gene Symbol: C19orf53
  Gene Name: chromosome 19 open reading frame 53
  Uniprot ID: Q9UNZ5
  ENST ID: ENST00000588234
  CDS Start-End: 311-610
cagaggtgagtgccacaccctaacctagtctgagtttttatgtgtaaagatcataaaacgttgtaagttttctaaaacacataagctctcaataaacgttagcttatcattgtcaccgttttgttcgtaatgtttgaaaactccaactgtgatccactacactacccttgtgggatgctgtctctttaactctgtgccacgttgtatcccgtgagttcttgcgtttttccgccccgctgtatcccatggttccctgtgccttccggctacgactgctcacagtcccgcctcttccgctgcgtgccggaccatggcgcaggggcagcgcaagtttcaggcgcacaaacccgcaaagagtaagacggcagcggcagcctctgaaaagaatcggggcccaagaaaaggcggtcgtgttatcgctcccaagaaggcgcgcgtcgtgcagcagcaaaagctcaagaagaacctagaagtcggaatccggaagaagatcgaacatgacgtggtgatgaaagccagcagcagcctgcccaagaagctggcactgctgaaggccccagccaagaagaaaggggcagctgccgccacctcctccaagacaccttcctgaggacgctggccccagtgcaggccaacatcccaccccctacctccatatgggaccttgcaagtcatcccacaggctgcactgtcaggaagaggaccctgtcccccagcactgggcttcacctagaacttcagtgggggccaagggtgctgagaacccagcaatgaccaggaagatacagtcactaacttcatctgtccccgtgccccttcccaggtcctgcctccacaggtttaacccagaacaataaacctggctttgtcatc

SEQ ID NO: 118700 - DNA, 666 bp, Homo sapiens
  Payload ID: 3233
  Gene Symbol: C19orf53
  Gene Name: chromosome 19 open reading frame 53
  ENST ID: ENST00000588858
  CDS Start-End: 1-149
caaagagtaagacggcagcggcagcctctgaaaagaatcggggcccaagaaaaggcggtcgtgttatcgctcccaagaaggcgcgcgtcgtgcagcagcaaaagctcaagaagagacaggtttcactatgctgctcgggctggtcttgaactcctggcctcaaggcatcctcccgcctctgcctcccaaaatgctgggattacaggcgtgagccaccctatggttgtttttaagtgcaacatttatatgtagatggaacctagaagtcggaatccggaagaagatcgaacatgacgtggtgatgaaagccagcagcagcctgcccaagaagctggcactgctgaaggccccagccaagaagaaaggggcagctgccgccacctcctccaagacaccttcctgaggacgctggccccagtgcaggccaacatcccaccccctacctccatatgggaccttgcaagtcatcccacaggctgcactgtcaggaagaggaccctgtcccccagcactgggcttcacctagaacttcagtgggggccaagggtgctgagaacccagcaatgaccaggaagatacagtcactaacttcatctgtccccgtgccccttcccaggtcctgcctccacaggtttaacccagaacaataaacctggctttgtcatc

SEQ ID NO: 118701 - DNA, 491 bp, Homo sapiens
  Payload ID: 3233
  Gene Symbol: C19orf53
  Gene Name: chromosome 19 open reading frame 53
  ENST ID: ENST00000593274
  CDS Start-End: 57-227
ctggggacgagctaggagcgaggggatagagccaggggccgcgttaggagcgaaggatggagcccggggcgcagagagggaacctagaagtcggaatccggaagaagatcgaacatgacgtggtgatgaaagccagcagcagcctgcccaagaagctggcactgctgaaggccccagccaagaagaaaggggcagctgccgccacctcctccaagacaccttcctgaggacgctggccccagtgcaggccaacatcccaccccctacctccatatgggaccttgcaagtcatcccacaggctgcactgtcaggaagaggaccctgtcccccagcactgggcttcacctagaacttcagtgggggccaagggtgctgagaacccagcaatgaccaggaagatacagtcactaacttcatctgtccccgtgccccttcccaggtcctgcctccacaggtttaacccagaacaataaacctggctttgtcatcc

SEQ ID NO: 118702 - DNA, 2753 bp, Homo sapiens
  Payload ID: 3234
  Gene Symbol: C19orf54
  Gene Name: chromosome 19 open reading frame 54
  Uniprot ID: Q5BKX5
  ENST ID: ENST00000378313
  CDS Start-End: 121-1176
cccagattctggaactcagctcttaaacctttaaaatctccatccctgagaccgttctccgttggaggatccttccctccccgctttctgaacctctcaacacctcctgtagaccccaaaatgacttctccatgctctcctcccctaaaaccaccaatttctcctccaaaaacccctgtaccccaagccagcagcattccatctcctcctctacccccaagtcccctggacttttcagctttaccatcccctccctggagtcagcagacccctgttcccccaccgctcccactgcctcctccacccgctgccacagggcctgctccccgtcatgtcttcggcctggagaagagccagctcctgaaggaggcctttgataaggccggcccggtccccaagggcagagaagatgtgaagaggcttctgaaactacacaaggaccggttccgaggtgacctgcggtggatcctcttctgtgcagacctgccgtccctcatccaagaaggccctcaatgcgggctggtggccttgtggatggcaggtactctcctgtcgccccccagtggcgtccccctggagagactcatacgggtggccacggaaagaggctacacggcccagggagagatgttctcagtggccgatatgggcaggctggcccaggaggtgctgggctgccaggccaagctgctctctggtggcctgggcggtcccaacagagacctcgtcctgcagcacctggtcactggacatcccctgctcatcccctacgacgaggacttcaaccatgagccgtgtcagaggaagggccacaaggcacactgggcggtgagtgcaggggtcctgctgggtgttcgggctgtgcccagtctcggctacactgaggaccctgagctgccgggcctgttccacccagtgctgggcacgccctgccaaccaccatccctgccagaggagggctccccgggagctgtctacctgctgtccaagcagggcaagagttggcactatcagctgtgggactacgaccaggtccgggagagcaacctgcagctgacggacttctcgccctcacgggccactgacggccgggtgtacgtggtgcccgtgggtggggtacgggctggcctctgtggccaggccctgctcctcacaccacaggactgcagccattagctgcggctgcggtctcaggctgcagcctagctcggtaaccatttgaagtgtgcctacacttctcccactgtgtgatggcgacaagattgaagctaggtctcaggggtctccagtcctccttcatcagggccaccccctgcagtattgagcaccagctggtccctctagggagagattgacaacagcccggaccctgcggcctgcctattccatctgaatgtcgcatcgtctgtttctcactaggggccgcctctgtcatctcactagacatttgaggaacctcctgcctgggccctctgcttctcacaggacagggacactgaactgcgtcagcctcagctcacccctccttagcccaaggtcttcctcatgcttgccacctactagtcatactggccttttagatccctgaagtgttgttcaaatccccggatcattgagtcccacccccagccctctgctgcggatcactccttaacttttccattggggctcaggtatcactacctcagggaagagtcctgcagccccagtcaagacacccctcccccacctcatgtcttcacagttttaaagcccatctgggagcagttacctgtgccagcccctctacctgtgttagcagatctggcaaccctgtaaggggggtgctagatggacccgatttgacagatggcaagactgaggcctggagaagtggaatcactggcctgaggtcacatgactagcacatggcaaggtcaggattcaagctaggtagtcagtatctcagccaggctgtctcctggctccctgaacattatggtgctgaccacaaactttcctgtccacttatacaaacttctagtgagtgtgtgtgattactagcttcatgaatacctgacccctccactctgaaggaggaacaggcctgtctggatcacttctctgtccctaactgagcccatctcatttagggaaactacagagcactgttgctttttttttttttagatggagtctcgttctgtcgtccaggctggagtgcggtggcgtgatctcagctcactccagcctccacttcccaggttcaagtgattctcctgcctcagccccccaagtaactgggattacaggcatgcaccaccatgcctggctaattttttgtatttttagtagagacggggctttgccatgttggccaggctggtctcgaactcctgaccttgagtaatccacccgcctcggcctcccaaagtgctgggattacaggtgtgagccactgagcccggccacagtgcagtatttctaaccagtgatcagggtaaagaggatgcgtgtccaccatcccagccctgatcagcctgtctgtgcatcccccatcccagccagggcttggagcagccttgctcaccactgtgtcccctgcattgtaacacatccaggcacaagaatagccgcccagtgactgccaagtgagtgaaccagcctgcttggagcctgcctctttcccaaactgctcattatcctgttaccccacccagcccacgtgtccaaatacactccagatgcaaaataaaaagctctacgacattggc

SEQ ID NO: 118703 - DNA, 553 bp, Homo sapiens
  Payload ID: 3234
  Gene Symbol: C19orf54
  Gene Name: chromosome 19 open reading frame 54
  ENST ID: ENST00000598485
  CDS Start-End: 215-418
ttgacctctgactcaaagggcctgctccccgtcatgtcttcggcctggagaagagccagctcctgaaggaggcctttgataaggccggcccggtccccaagggcagagaagatgtgaagaggcttctgaaactacacaaggaccggttccgaggtgacctgcggtggatcctcttctgtgcagacctgccgtccctcatccaagaaggccctcaatgcgggctggtggccttgtggatggcaggtactctcctgtcgccccccagtggcgtccccctggagagactcatacgggtggccacggaaagaggctacacggcccagggagagatgttctcagcaccagctacgacgaggacttcaaccatgagccgtgtcagaggaagggccacaaggcacactgggcggcacaagaatagccgcccagtgactgccaagtgagtgaaccagcctgcttggagcctgcctctttcccaaactgctcattatcctgttaccccacccagcccacgtgtccaaatacactccagatgcaaaataaaaagctctacgac

SEQ ID NO: 118704 - DNA, 1104 bp, Homo sapiens
  Payload ID: 3234
  Gene Symbol: C19orf54
  Gene Name: chromosome 19 open reading frame 54
  ENST ID: ENST00000596809
  CDS Start-End: 380-553
cgggtgcaggggacggaagaggggccagcccgtgcgggacagtctggactccggactatcccgagaactcaccatccttcttgatcttctcattgaggttgttgatataaatagtgtggttagggcgggtctcgggaactgccatggagtgaagtgttgagggcctgctccccgtcatgtcttcggcctggagaagagccagctcctgaaggaggcctttgataaggccggcccggtccccaagggcagagaagatgtgaagaggcttctgaaactacacaaggaccggttccgaggtgacctgcggtggatcctcttctgtgcagacctgccgtccctcatccaagaaggccctcaatgcgggctggtggccttgtggatggcaggtactctcctgtcgccccccagtggcgtccccctggagagactcatacgggtggccacggaaagaggctacacggcccagggagagatgttctcagcaccagctacgacgaggacttcaaccatgagccgtgtcagaggaagggccacaaggcacactgggcggtgagtgcaggggtcctgctgggtgttcgggctgtgcccagtctcggctacactgaggaccctgagctgccgggcctgttccacccagtgctgggcacgccctgccaaccaccatccctgccagaggagggctccccgggagctgtctacctgctgtccaagcagggcaagagttggcactatcagctgtgggactacgaccaggtccgggagagcaacctgcagctgacggacttctcgccctcacgggccactgacggccgggtgtacgtggtgcccgtgggtggggtacgggctggcctctgtggccaggccctgctcctcacaccacaggactgcagccattagctgcggctgcggtctcaggctgcagcctagctcgttttaaagcccatctgggagcagttacctgtgccagcccctctacctgtgttagcagatctggcaaccctgtaaggggggtgctagatggacccgatttgacagatggcaagactgaggcctggagaagtggaatcactggcctgaggtcacatgactagcacatggcaaggt

SEQ ID NO: 118705 - DNA, 2521 bp, Homo sapiens
  Payload ID: 3234
  Gene Symbol: C19orf54
  Gene Name: chromosome 19 open reading frame 54
  ENST ID: ENST00000470681
  CDS Start-End: 427-600
ccgccattttccgggagtgggaggtgcactttacttcctgactcctttcctttttccagtggttatcgcggcgcccaccggcctctgatctctgagtcttctccaacccacagacgttttttgttgctctggttccaggaccttctccacaactaggccattttccctgccaggtgtcctttttgacctcttgacctctgactcaaagggcctgctccccgtcatgtcttcggcctggagaagagccagctcctgaaggaggcctttgataaggccggcccggtccccaagggcagagaagatgtgaagaggcttctgaaactacacaaggaccggttccgaggtgacctgcggtggatcctcttctgtgcagacctgccgtccctcatccaagaaggccctcaatgcgggctggtggccttgtggatggcaggtactctcctgtcgccccccagtggcgtccccctggagagactcatacgggtggccacggaaagaggctacacggcccagggagagatgttctcagcaccagctacgacgaggacttcaaccatgagccgtgtcagaggaagggccacaaggcacactgggcggtgagtgcaggggtcctgctgggtgttcgggctgtgcccagtctcggctacactgaggaccctgagctgccgggcctgttccacccagtgctgggcacgccctgccaaccaccatccctgccagaggagggctccccgggagctgtctacctgctgtccaagcagggcaagagttggcactatcagctgtgggactacgaccaggtccgggagagcaacctgcagctgacggacttctcgccctcacgggccactgacggccgggtgtacgtggtgcccgtgggtggggtacgggctggcctctgtggccaggccctgctcctcacaccacaggactgcagccattagctgcggctgcggtctcaggctgcagcctagctcggtaaccatttgaagtgtgcctacacttctcccactgtgtgatggcgacaagattgaagctaggtctcaggggtctccagtcctccttcatcagggccaccccctgcagtattgagcaccagctggtccctctagggagagattgacaacagcccggaccctgcggcctgcctattccatctgaatgtcgcatcgtctgtttctcactaggggccgcctctgtcatctcactagacatttgaggaacctcctgcctgggccctctgcttctcacaggacagggacactgaactgcgtcagcctcagctcacccctccttagcccaaggtcttcctcatgcttgccacctactagtcatactggccttttagatccctgaagtgttgttcaaatccccggatcattgagtcccacccccagccctctgctgcggatcactccttaacttttccattggggctcaggtatcactacctcagggaagagtcctgcagccccagtcaagacacccctcccccacctcatgtcttcacagttttaaagcccatctgggagcagttacctgtgccagcccctctacctgtgttagcagatctggcaaccctgtaaggggggtgctagatggacccgatttgacagatggcaagactgaggcctggagaagtggaatcactggcctgaggtcacatgactagcacatggcaaggtcaggattcaagctaggtagtcagtatctcagccaggctgtctcctggctccctgaacattatggtgctgaccacaaactttcctgtccacttatacaaacttctagtgagtgtgtgtgattactagcttcatgaatacctgacccctccactctgaaggaggaacaggcctgtctggatcacttctctgtccctaactgagcccatctcatttagggaaactacagagcactgttgctttttttttttttagatggagtctcgttctgtcgtccaggctggagtgcggtggcgtgatctcagctcactccagcctccacttcccaggttcaagtgattctcctgcctcagccccccaagtaactgggattacaggcatgcaccaccatgcctggctaattttttgtatttttagtagagacggggctttgccatgttggccaggctggtctcgaactcctgaccttgagtaatccacccgcctcggcctcccaaagtgctgggattacaggtgtgagccactgagcccggccacagtgcagtatttctaaccagtgatcagggtaaagaggatgcgtgtccaccatcccagccctgatcagcctgtctgtgcatcccccatcccagccagggcttggagcagccttgctcaccactgtgtcccctgcattgtaacacatccaggcacaagaatagccgcccagtgactgccaagtgagtgaaccagcctgcttggagcctgcctctttcccaaactgctcattatcctgttaccccacccagcccacgtgtccaaatacactccagatgcaaaataaaaagctctacgacattggc

SEQ ID NO: 118706 - DNA, 1792 bp, Homo sapiens
  Payload ID: 3234
  Gene Symbol: C19orf54
  Gene Name: chromosome 19 open reading frame 54
  ENST ID: ENST00000469741
  CDS Start-End: 488-1000
aaaatgggcgggaactgttgcgtgtaataccacgtgatatgggaaaggcagtgtgcgggggccgccattttccgggagtgggaggtgcactttacttcctgactcctttcctttttccagtggttatcgcggcgcccaccggcctctgatctctgagtcttctccaacccacagacgttttttgttgctctggttccaggaccttctccacaactaggccattttccctgccaggtgtcctttttgacctcttgacctctgactcaaagggcctgctccccgtcatgtcttcggcctggagaagagccagctcctgaaggaggcctttgataaggccggcccggtccccaagggcagagaagatgtgaagaggcttctgaaactacacaaggaccggttccgaggtgacctgcggtggatcctcttctgtgcagacctgccgtccctcatccaagaaggccctcaatgcgggctggtggccttgtggatggcaggtactctcctgtcgccccccagtggcgtccccctggagagactcatacgggtggccacggaaagaggctacacggcccagggagagatgttctcagtggccgatatgggcaggctggcccaggaggtgctgggctgccaggccaagctgctctctggtggcctgggcggtcccaacagagacctcgtcctgcagcacctggtcactggacatcccctgctcatcccctacgacgaggacttcaaccatgagccgtgtcagaggaagggccacaaggcacactgggcggggtcctgctgggtgttcgggctgtgcccagtctcggctacactgaggaccctgagctgccgggcctgttccacccagtgctgggcacgccctgccaaccaccatccctgccagaggagggctccccgggagctgtctacctgctgtccaagcagggcaagagttggcactatcagctgtgggactacgaccaggtccgggagagcaacctgcagctgacggacttctcgccctcacgggccactgacggccgggtttttaaagcccatctgggagcagttacctgtgccagcccctctacctgtgttagcagatctggcaaccctgtaaggggggtgctagatggacccgatttgacagatggcaagactgaggcctggagaagtggaatcactggcctgaggtcacatgactagcacatggcaagatggagtctcgttctgtcgtccaggctggagtgcggtggcgtgatctcagctcactccagcctccacttcccaggttcaagtgattctcctgcctcagccccccaagtaactgggattacaggcatgcaccaccatgcctggctaattttttgtatttttagtagagacggggctttgccatgttggccaggctggtctcgaactcctgaccttgagtaatccacccgcctcggcctcccaaagtgctgggattacaggtgtgagccactgagcccggccacagtgcagtatttctaaccagtgatcagggtaaagaggatgcgtgtccaccatcccagccctgatcagcctgtctgtgcatcccccatcccagccagggcttggagcagccttgctcaccactgtgtcccctgcattgtaacacatccaggcacaagaatagccgcccagtgactgccaagtgagtgaaccagcctgcttggagcctgcctctttcccaaactgctcattatcctgttaccccacccagcccacgtgtccaaatacactccagatgcaaaataaaaagctctacgacattggc

SEQ ID NO: 118707 - DNA, 947 bp, Homo sapiens
  Payload ID: 3234
  Gene Symbol: C19orf54
  Gene Name: chromosome 19 open reading frame 54
  ENST ID: ENST00000597507
  CDS Start-End: 383-556
ctttcctttttccagtggttatcgcggcgcccaccggcctctgatctctgagtcttctccaacccacagacgttttttgttgctctggttccaggaccttctccacaactaggccattttccctgccaggtgtcctttttgacctcttgacctctgactcaaagggcctgctccccgtcatgtcttcggcctggagaagagccagctcctgaaggaggcctttgataaggccggcccggtccccaagggcagagaagatgtgaagaggcttctgaaactacacaaggaccggttccgaggtgacctgcggtggatcctcttctgtgcagacctgccgtccctcatccaagaaggccctcaatgcgggctggtggccttgtggatggcaggtactctcctgtcgccccccagtggcgtccccctggagagactcatacgggtggccacggaaagaggctacacggcccagggagagatgttctcagcaccagctacgacgaggacttcaaccatgagccgtgtcagaggaagggccacaaggcacactgggcggtgagtgcaggggtcctgctgggtgttcgggctgtgcccagtctcggctacactgaggaccctgagctgccgggcctgttccacccagtgctgggcacgccctgccaaccaccatccctgccagaggagggctccccgggagctgtctacctgctgtccaagcagggcaagagttggcactatcagctgtgggactacgaccaggggccgcctctgtcatctcactagacatttgaggaacctcctgcctgggccctctgcttctcacaggacagggacactgaactgcgtcagcctcagctcacccctccttagcccaagttttaaagcccatctgggagcagttacctgtgccagcccctctacctgtgttagcagatctggcaaccctgtaa

SEQ ID NO: 118708 - DNA, 492 bp, Homo sapiens
  Payload ID: 3234
  Gene Symbol: C19orf54
  Gene Name: chromosome 19 open reading frame 54
  ENST ID: ENST00000596940
  CDS Start-End: 1-338
cctttgataaggccggcccggtccccaagggcagagaagatgtgaagaggcttctgaaactacacaaggaccggttccgaggtgacctgcggtggatcctcttctgtgcagacctgccgtccctcatccaagaaggccctcaatgcgggctggtggccttgtggatggcaggtactctcctgtcgccccccagtggcgtccccctggagagactcatacgggtggccacggaaagaggctacacggcccagggagagatgttctcagcaccagctacgacgaggacttcaaccatgagccgtgtcagaggaagggccacaaggcacactgggcggtgagtgcaggcacaagaatagccgcccagtgactgccaagtgagtgaaccagcctgcttggagcctgcctctttcccaaactgctcattatcctgttaccccacccagcccacgtgtccaaatacactccagatgcaaaataaaaagctctacgaca

SEQ ID NO: 118709 - DNA, 369 bp, Homo sapiens
  Payload ID: 3234
  Gene Symbol: C19orf54
  Gene Name: chromosome 19 open reading frame 54
  ENST ID: ENST00000600139
  CDS Start-End: 1-196
tcatgtcttcggcctggagaagagccagctcctgaaggaggcctttgataaggccggcccggtccccaagggcagagaagatgtgaagaggcttctgaaactacacaaggaccggttccgaggtgacctgcggtggatcctcttctgtgcagacctgccgtccctcatccaagaaggccctcagtatgtgccctgatgcgggaaccccagcccatctgctgcctttactctgcccttgctgggcttcttaaggactgatctggagaagaggagtggattgtccctgctgggaggaggagggaaggaaagggggaactttccactcaggcttctgagtgcctgcatagtaaacatagttgggacatgcga

SEQ ID NO: 118710 - DNA, 546 bp, Homo sapiens
  Payload ID: 3234
  Gene Symbol: C19orf54
  Gene Name: chromosome 19 open reading frame 54
  ENST ID: ENST00000598352
  CDS Start-End: 1-546
cctgctccccgtcatgtcttcggcctggagaagagccagctcctgaaggaggcctttgataaggccggcccggtccccaagggcagagaagatgtgaagaggcttctgaaactacacaaggaccggttccgaggtgacctgcggtggatcctcttctgtgcagacctgccgtccctcatccaagaaggccctcaatgcgggctggtggccttgtggatggcaggtactctcctgtcgccccccagtggcgtccccctggagagactcatacgggtggccacggaaagaggctacacggcccagggagagatgttctcagcaccagctacgacgaggacttcaaccatgagccgtgtcagaggaagggccacaaggcacactgggcggggccgcctctgtcatctcactagacatttgaggaacctcctgcctgggccctctgcttctcacaggacagggacactgaactgcgtcagcctcagctcacccctccttagcccaagttttaaagcccatctgggagcagttacctgtgccagcccctct

SEQ ID NO: 118711 - DNA, 2489 bp, Homo sapiens
  Payload ID: 3235
  Gene Symbol: C19orf57
  Gene Name: chromosome 19 open reading frame 57
  Uniprot ID: Q0VDD7
  ENST ID: ENST00000346736
  CDS Start-End: 129-2042
ctggctggggcggtgctgactgtcgcgggctgcgagggcggtgtttgcgtcgctcatgcgcggggcgggacctcgcggggcgcgggaaagaggcagagcgcgcgcagatttctcaaggggaagataaaatgactaagaggaagaagctgcggacctcaggagagggactctgtcctccaaaacccctaaagaacccaaggctaggagacttctatggggacccccagagttccatgttgggctgtttacatcaccctgaggagccagagggcaaattgggacctgttccctctacacagcagcacggggaggaaccaggaaaggccgtctccagctcccctgatgaggaaacaggatctccctgccggctcctccgtcaaccagaaaaggagccagctccccttcctccttcccagaactcattcgggaggtttgttccccagtttgcaaaatccaggaagacagtgacaagaaaagaagagatgaaggatgaggaccgtgggagtggggcctttagcctggaaacaatcgcagagtccagcgcccagagtccaggatgccagctgctagtggagaccctgggggtccccctccaggaggccacggagctgggggacccaacgcaggcagacagtgcccgccctgagcagagcagccagagccctgtgcaggcggtgcccggcagtggggattctcagcctgatgaccctccagacagggggacggggttgtccgcctcacagagggccagccaagaccacctgtcagaacaaggggccgatgacagcaagcctgagacagacagggttccaggtgacggtggccaaaaggaacacctaccaagcattgattctgaaggggagaagccagacagaggagccccccaggagggaggggcccaaaggacagcaggggctggcctgcctggagggccccaggaggagggagacggtgtcccctgtaccccagcatcagctcctacctcaggccctgctccaggactgggccctgcctcttggtgcctggaacccgggtctgtggcccagggctcccctgacccccagcagacccccagcaggatgggtagggaaggggaagggactcatagcagcctgggatgctcctccctcgggatggttgtcatcgcagacctgagcacagaccccactgagctggaagagagggctctggaggtggctgggcccgatgggcaggccagtgccatatcacctgcctctcccaggaggaaggccgctgatggaggccacaggagggccttgccaggctgcacctcgctcactggggaaaccacaggagaaagtggggaggcagggcaggatggcaagccccccggcgatgtcctagtgggccctacagcctccctggctctggcacctgggagcggagagtccatgatgggtgctggagattccggtcatgcatccccggacacaggtccatgtgtcaatcagaagcaggagccaggtcctgctcaagaggaagccgagttaggtggccagaacctcgaacgagacctcgaggggttccgtgtgtccccgcaagcctctgttgtgctggaacacagagaaatagcagacgaccctctccaggagcccggggctcagcagggcattccagacaccacctcagagctggcagggcagcgagaccacctgcctcattctgcagaccagggcacctgggcagactctttagctgtggaactcgacttcctgctggacagccagatacaggatgccctggacgcctctgacttcgaagccccacctgagcagctctttccttcggggaacaagccgggcccttgctggccgggccccagctcacatgccaatggagaccctgttgcagtggccaaggcccagccgagccggctgatcatgggcacccaccgggacctggaagctttcaagcgccttaactaccggaagacaaagctgggaggcaaagcccccctgccttacccttccaaggggcctgggaatatccctcgaggggacccaccctggagggagttgtaggccactttgaggtctgtgtttcctttgccacccagcccccatgtccgcagacctcctccaagatgctccagggggtcctagtggaccctacaaacctcccttcagttgcccggaagttggtcttccatggacaacacaaaggaggccgtgaggtcctggcctcacctggccagggtcaaggtcatttgccacccttggcttcagggagggaaactgtgtctcccacagccccagtgacttcaagcgggcctgggctccaggaagctggccacctctgagcagggcccatcctgtccggatttgcaaattttagggtcctgagccaagtatggatggttcagaatttgtttctttcctggaggagaagagagctccctttgttttctttctccccatttccattttatttcttctgggaagacccataataaatgattctgtagaggc

SEQ ID NO: 118712 - DNA, 1049 bp, Homo sapiens
  Payload ID: 3235
  Gene Symbol: C19orf57
  Gene Name: chromosome 19 open reading frame 57
  ENST ID: ENST00000589393
  CDS Start-End: 1-886
ccagggctcccctgacccccagcagacccccagcaggatgggtagggaaggggaagggactcatagcagcctgggatgctcctccctcgggatggttgtcatcgcagacctgagcacagaccccactgagctggaagagagggctctggaggtggctgggcccgatgggcaggccagtgccatatcacctgcctctcccaggaggaaggccgctgatggaggccacaggagggccttgccaggctgcacctcgctcactggggaaaccacaggagaaagtggggaggcagggcaggatggcaagccccccggcgatgtcctagtgggccctacagcctccctggctctggcacctgggagcggagagtccatgatgggtgctggagattccggtcatgcatccccggacacaggtccatgtgtcaatcagaagcaggagccaggtcctgctcaagaggaagccgagttaggtggccagaacctcgaacgagacctcgaggggttccgtgtgtccccgcaagcctctgttgtgctggaacacagagaaatagcagacgaccctctccaggagcccggggctcagcagggcattccagacaccacctcagagctggcagggcagcgagaccacctgcctcattctgcagaccagggcacctgggcagactctttagctgtggaactcgacttcctgctggacagccagatacaggatgccctggacgcctctgacttcgaagccccacctgagcagctctttccttcggggaacaagccgggcccttgctggccgggccccagctcacatgccaatggagaccctgttgcagtggccaaggcccagccgaggccaccagtgagccgtcctccagcctgctgtgtgtgaggagggcaccctctcccccgcaccatgcccggggtctccgcagcctgtcccctcctcccgtgccctcccacagccctcctcgaagccagcgctgggtggctgccctctctgttacctggcacttgaacctgcctctctgcagaggcggcagcttatcaattat

SEQ ID NO: 118713 - DNA, 2454 bp, Homo sapiens
  Payload ID: 3235
  Gene Symbol: C19orf57
  Gene Name: chromosome 19 open reading frame 57
  Uniprot ID: Q0VDD7
  ENST ID: ENST00000586783
  CDS Start-End: 1-2007
atgactaagaggaagaagctgcggacctcaggagagggactctgtcctccaaaacccctaaagaacccaaggctaggagacttctatggggacccccagagttccatgttgggctgtttacatcaccctgaggagccagagggcaaattgggacctgttccctctacacagcagcacggggaggaaccaggaaaggccgtctccagctcccctgatgaggaaacaggatctccctgccggctcctccgtcaaccagaaaaggagccagctccccttcctccttcccagaactcattcgggaggtttgttccccagtttgcaaaatccaggaagacagtgacaagaaaagaagagatgaaggatgaggaccgtgggagtggggcctttagcctggaaacaatcgcagagtccagcgcccagagtccaggatgccagctgctagtggagaccctgggggtccccctccaggaggccacggagctgggggacccaacgcaggcagacagtgcccgccctgagcagagcagccagagccctgtgcaggcggtgcccggcagtggggattctcagcctgatgaccctccagacagggggacggggttgtccgcctcacagagggccagccaagaccacctgtcagaacaaggggccgatgacagcaagcctgagacagacagggttccaggtgacggtggccaaaaggaacacctaccaagcattgattctgaaggggagaagccagacagaggagccccccaggagggaggggcccaaaggacagcaggggctggcctgcctggagggccccaggaggagggagacggtgtcccctgtaccccagcatcagctcctacctcaggccctgctccaggactgggccctgcctcttggtgcctggaacccgggtctgtggcccagggctcccctgacccccagcagacccccagcaggatgggtagggaaggggaagggactcatagcagcctgggatgctcctccctcgggatggttgtcatcgcagacctgagcacagaccccactgagctggaagagagggctctggaggtggctgggcccgatgggcaggccagtgccatatcacctgcctctcccaggaggaaggccgctgatggaggccacaggagggccttgccaggctgcacctcgctcactggggaaaccacaggagaaagtggggaggcagggcaggatggcaagccccccggcgatgtcctagtgggccctacagcctccctggctctggcacctgggagcggagagtccatgatgggtgctggagattccggtcatgcatccccggacacaggtccatgtgtcaatcagaagcaggagccaggtcctgctcaagaggaagccgagttaggtggccagaacctcgaacgagacctcgaggggttccgtgtgtccccgcaagcctctgttgtgctggaacacagagaaatagcagacgaccctctccaggagcccggggctcagcagggcattccagacaccacctcagagctggcagggcagcgagaccacctgcctcattctgcagaccagggcacctgggcagactctttagctgtggaactcgacttcctgctggacagccagatacaggatgccctggacgcctctgacttcgaagccccacctgagcagctctttccttcggggaacaagccgggcccttgctggccgggccccagctcacatgccaatggagaccctgttgcagtggccaaggcccagccgaggaccttcgtggggatccaggcctctgaggcctccaggatggaggatgccaccaacgtcgtgcgtggcctcatcgttgagctctccaacctgaaccggctgatcatgggcacccaccgggacctggaagctttcaagcgccttaactaccggaagacaaagctgggaggcaaagcccccctgccttacccttccaaggggcctgggaatatccctcgaggggacccaccctggagggagttgtaggccactttgaggtctgtgtttcctttgccacccagcccccatgtccgcagacctcctccaagatgctccagggggtcctagtggaccctacaaacctcccttcagttgcccggaagttggtcttccatggacaacacaaaggaggccgtgaggtcctggcctcacctggccagggtcaaggtcatttgccacccttggcttcagggagggaaactgtgtctcccacagccccagtgacttcaagcgggcctgggctccaggaagctggccacctctgagcagggcccatcctgtccggatttgcaaattttagggtcctgagccaagtatggatggttcagaatttgtttctttcctggaggagaagagagctccctttgttttctttctccccatttccattttatttcttctgggaagacccataataaatgattctgtagaggc

SEQ ID NO: 118714 - DNA, 360 bp, Homo sapiens
  Payload ID: 3235
  Gene Symbol: C19orf57
  Gene Name: chromosome 19 open reading frame 57
  ENST ID: ENST00000585755
  CDS Start-End: 286-360
ctcttgtgcatcttcaaggctggatgcccggaccacctgcccccaagcccggccttgccctgcctccttccccgggctctgtcgccgcgcactcgcccttcctgagtcctgcactcctcgtcggcgccccgcggccgtcgatcccgagccctcgcttccctgcttggccgtcccacttccgcctcgggcctcgggcgccgccgcaccggagcgcggccactgggctcgccgggtctgccgagccgaaactacaactcccggcagatttctcaaggggaagataaaatgactaagaggaagaagctgcggacctcagctcccctgatgaggaaacaggatctccctgccggctcctccgtc

SEQ ID NO: 118715 - DNA, 1559 bp, Homo sapiens
  Payload ID: 3235
  Gene Symbol: C19orf57
  Gene Name: chromosome 19 open reading frame 57
  ENST ID: ENST00000591586
  CDS Start-End: 415-1146
cgcggggcgggacctcgcggggcgcgggaaagaggcagagcgcgcgcaggtgtgaggggcggcgacatctgtggggttcagagcgtctgtcagtcaccgacgggctccggcttcacgtgggctctcggcctgtggagtcctcacttctcggtggtcggcgtagtgtcagtgtggggcttgtcaccgggagcggggtctacagcgcccaccctcaggcctttccatctttcacctccggactcgaggcctccagcgttctgtgagggccaatttggccatttattttttccaaaaagagtaacgcggataattcaagcgacttattcccaactgatccaggcagagctcgtttctgataaggacagagggtcctcaacgacttctgtggcccagatttctcaaggggaagataaaatgactaagaggaagaagctgcggacctcaggagagggactctgtcctccaaaacccctaaagaacccaaggctaggagacttctatggggacccccagagttccatgttgggctgtttacatcaccctgaggagccagagggcaaattgggacctgttccctctacacagcagcacggggaggaaccaggaaaggccgtctccagctcccctgatgaggaaacaggatctccctgccggctcctccgtcaaccagaaaaggagccagctccccttcctccttcccagaactcattcgggaggtttgttccccagtttgcaaaatccaggaagacagtgacaagaaaagaagagatgaaggatgaggaccgtgggagtggggcctttagcctgctctttccttcggggaacaagccgggcccttgctggccgggccccagctcacatgccaatggagaccctgttgcagtggccaaggcccagccgaggaccttcgtggggatccaggcctctgaggcctccaggatggaggatgccaccaacgtcgtgcgtggcctcatcgttgagctctccaacctgaaccggctgatcatgggcacccaccgggacctggaagctttcaagcgccttaactaccggaagacaaagctgggaggcaaagcccccctgccttacccttccaaggggcctgggaatatccctcgaggggacccaccctggagggagttgtaggccactttgaggtctgtgtttcctttgccacccagcccccatgtccgcagacctcctccaagatgctccagggggtcctagtggaccctacaaacctcccttcagttgcccggaagttggtcttccatggacaacacaaaggaggccgtgaggtcctggcctcacctggccagggtcaaggtcatttgccacccttggcttcagggagggaaactgtgtctcccacagccccagtgacttcaagcgggcctgggctccaggaagctggccacctctgagcagggcccatcctgtccggatttgcaaattttagggtcctgagccaagtatggatggttcagaatttgtttctttcctggaggagaagagagctccctttgttttctttctccccatttccattttatttcttc

SEQ ID NO: 118716 - DNA, 718 bp, Homo sapiens
  Payload ID: 3235
  Gene Symbol: C19orf57
  Gene Name: chromosome 19 open reading frame 57
  ENST ID: ENST00000588115
  CDS Start-End: 1-264
ttcgtgcgcctgctagagctctttccttcggggaacaagccgggcccttgctggccgggccccagctcacatgccaatggagaccctgttgcagtggccaaggcccagccgagccggctgatcatgggcacccaccgggacctggaagctttcaagcgccttaactaccggaagacaaagctgggaggcaaagcccccctgccttacccttccaaggggcctgggaatatccctcgaggggacccaccctggagggagttgtaggccactttgaggtctgtgtttcctttgccacccagcccccatgtccgcagacctcctccaagatgctccagggggtcctagtggaccctacaaacctcccttcagttgcccggaagttggtcttccatggacaacacaaaggaggccgtgaggtcctggcctcacctggccagggtcaaggtcatttgccacccttggcttcagggagggaaactgtgtctcccacagccccagtgacttcaagcgggcctgggctccaggaagctggccacctctgagcagggcccatcctgtccggatttgcaaattttagggtcctgagccaagtatggatggttcagaatttgtttctttcctggaggagaagagagctccctttgttttctttctccccatttccattttatttcttctgggaagacccataataaatgattctgtagaggccccgtga

SEQ ID NO: 118717 - DNA, 569 bp, Homo sapiens
  Payload ID: 3235
  Gene Symbol: C19orf57
  Gene Name: chromosome 19 open reading frame 57
  ENST ID: ENST00000591439
  CDS Start-End: 1-420
cgtgtgtccccgcaagcctctgttgtgctggaacacagagaaatagcagacgaccctctccaggagcccggggctcagcagggcattccagacaccacctcagagctggcagggcagcgagaccacctgcctcattctgcagaccagggcacctgggcagactctttagctgtggaactcgacttcctgctggacagccagatacaggatgccctggacgcctctgacttcgaagccccacctgagcagctctttccttcggggaacaagccgggcccttgctggccgggccccagctcacatgccaatggagaccctgttgcagtggccaaggcccagccgagagggcggctctgtccctgcctcctgccgtcactccctgtgacttgtacctgctgtgccactggccacctcccttagccacacacacaacctgcacgtggaccagaggcagttcatcagagcggcccgctgtggtttgagtgaagagccgggagggttcacatctgaatctccgacagcgtcccagggccaatgcagctcccctccccaccgtcctggatgtctgg

SEQ ID NO: 118718 - DNA, 839 bp, Homo sapiens
  Payload ID: 3236
  Gene Symbol: C19orf60
  Gene Name: chromosome 19 open reading frame 60
  Uniprot ID: Q96EN9
  ENST ID: ENST00000358607
  CDS Start-End: 78-683
gtggacctcccggcctgtagggggcgtcgggcgcagcggaagggcctgctccggagcctggccagggctgcgcagtcatgatcaccgagaccgcggcggagcctacggtccctgcagtgcctgctgctgaggaggccaccgaagctcggggacgcgaggagccggcgtggccctggaaagacgccccgatccggacgctggtgcagcgcatccaccagctgcaggctgagcgcgcgcagggcttccgccgactggaggagtggttggcgccggtgcagggcctgagagcctgggggcgcggcctcagggtccccacatgccgcagaggccaccgccagtacctgcgcagcggccctgactacgacttcgcgcgctaccggagcacagtgcacggggtgacccaggccttcgccgccgcctcgcgggaggtgctggcggtggaagcagagctgggcgggcctcgcaggcagccgctgctcgccggccacgtgcgcagcctgcaggagctggagcagacgcggctgggcacggtggccctgctgcagttgatggagacgccagagctggcggggcaggaggacgctgtacggatgcagcagctgaaaatgaaggtaattaaaaccatggaggcgatcagcgaggttctccaggaccttaggtttgatgcggaatctgccgagtgatggcggctccccagggatgcgccgagggagatgggaaacggggcggatggcgcccagcccagccctaactgccagctggctggggttgcgccccactgcgctgctgaccttcctgcagttccagacacctcccacaataaagagctcctcctctgt

SEQ ID NO: 118719 - DNA, 702 bp, Homo sapiens
  Payload ID: 3236
  Gene Symbol: C19orf60
  Gene Name: chromosome 19 open reading frame 60
  Uniprot ID: Q96EN9
  ENST ID: ENST00000450195
  CDS Start-End: 7-546
gcagtcatgatcaccgagaccgcggcggagcctacggtccctgcagtgcctgctgctgaggaggccaccgaagctcggggacgcgaggagccggcgtggccctggaaagacgccccgatccggacgctggtgcagcgcatccaccagctgcaggctgagcgcgcgcagggcttccgccgactggaggaaggccaccgccagtacctgcgcagcggccctgactacgacttcgcgcgctaccggagcacagtgcacggggtgacccaggccttcgccgccgcctcgcgggaggtgctggcggtggaagcagagctgggcgggcctcgcaggcagccgctgctcgccggccacgtgcgcagcctgcaggagctggagcagacgcggctgggcacggtggccctgctgcagttgatggagacgccagagctggcggggcaggaggacgctgtacggatgcagcagctgaaaatgaaggtaattaaaaccatggaggcgatcagcgaggttctccaggaccttaggtttgatgcggaatctgccgagtgatggcggctccccagggatgcgccgagggagatgggaaacggggcggatggcgcccagcccagccctaactgccagctggctggggttgcgccccactgcgctgctgaccttcctgcagttccagacacctcccacaataaagagctcctcctctgt

SEQ ID NO: 118720 - DNA, 410 bp, Homo sapiens
  Payload ID: 3236
  Gene Symbol: C19orf60
  Gene Name: chromosome 19 open reading frame 60
  ENST ID: ENST00000595490
  CDS Start-End: 1-181
gctgggcgggcctcgcaggcagccgctgctcgccggccacgtgcgcagcctgcaggagctggagcagacgcggctgggcacggtggccctgctgcagttgatggagacgccagagctggcggggcaggaggacgctgtacggatgcagcagctgaaaatgaattcccatccgctcttgtagggtaattaaaaccatggaggcgatcagcgaggttctccaggaccttaggtttgatgcggaatctgccgagtgatggcggctccccagggatgcgccgagggagatgggaaacggggcggatggcgcccagcccagccctaactgccagctggctggggttgcgccccactgcgctgctgaccttcctgcagttccagacacctcccacaataaagagctcctcctctgt

SEQ ID NO: 118721 - DNA, 491 bp, Homo sapiens
  Payload ID: 3236
  Gene Symbol: C19orf60
  Gene Name: chromosome 19 open reading frame 60
  ENST ID: ENST00000601736
  CDS Start-End: 1-201
atgatcaccgagaccgcggcggagcctacggtccctgcagtgcctgctgctgaggaggccaccgaagctcggggacgcgaggagccggcgtggccctggaaagacgccccgatccggacgctggtgcagcgcatccaccagctgcaggctgagcgcgcgcagggcttccgccgactggaggagtggccctgctgcagttgatggagacgccagagctggcggggcaggaggacgctgtacggatgcagcagctgaaaatgaaggtaattaaaaccatggaggcgatcagcgaggttctccaggaccttaggtttgatgcggaatctgccgagtgatggcggctccccagggatgcgccgagggagatgggaaacggggcggatggcgcccagcccagccctaactgccagctggctggggttgcgccccactgcgctgctgaccttcctgcagttccagacacctcccacaataaagagctcctcctctgt

SEQ ID NO: 118722 - DNA, 2117 bp, Homo sapiens
  Payload ID: 3237
  Gene Symbol: C19orf66
  Gene Name: chromosome 19 open reading frame 66
  Uniprot ID: Q9NUL5
  ENST ID: ENST00000253110
  CDS Start-End: 299-1174
gactgcagaggccgcgccgcctcccccgtccgaggtctgcgcgctccgccgcagggtgcagacccggggcgcccgcctgggtttggggcgcaagagcagaggcggagccagggcggagccagcgcgccgggtcccccctgaatcgaaagcgaaacaggggccggggaggaagggcggagccggccccgaggcaccgccccctgccctgcgcggctgctggaccgacgggcgcacccaggtaggggggcggctgagccgcgcagtgcggaccctcgcggggaactgcgccgccgccaccatgtctcaggaaggtgtggagctggagaagagcgtccggcgcctccgggagaagtttcatgggaaggtatcctccaagaaggcgggggctctgatgaggaaattcggcagcgaccacacgggagtggggcgctccatcgtgtacggggtaaagcaaaaagatggccaagaactaagtaacgatctggatgcccaggatccaccagaagatatgaagcaggaccgggacattcaggcagtggcgacctccctcctgccactgacagaagccaacctacgcatgtttcaacgtgcccaggacgaccttatccctgctgtggaccggcagtttgcctgctcctcctgcgaccacgtctggtggcgccgcgtgccccagcggaaggaggtatcccggtgccggaaatgccggaagcgctacgagccagtgccagctgacaagatgtggggcctggctgagttccactgcccgaagtgtcggcacaacttccggggctgggcacagatggggtccccgtccccctgctacgggtgcggcttccccgtgtatccaacacggatcctccccccgcgctgggaccgggacccggatcgccgcagcacccacactcactcctgctcagctgccgactgctacaaccggcgagagccccacgtgcctgggacatcctgtgctcaccccaagagccggaagcagaaccacctgcccaaagtgctccaccccagcaaccctcacattagcagtggctccactgtggccacctgcttgagccagggtggcctcctggaagacctggacaacctcatcctggaggacctgaaggaggaggaggaggaagaggaggaggtggaggacgaggagggcgggcccagggagtgacccctgccaggtgcagatacaaaccagacacggtctgtggctactttgtgttattataagatatgagctcaaaccgagatatgaatgaccttggggagccatctgaggccaagatattgacgggggggattcctgggtcccattttcagcgcccagggtcacagatccacagtgggaagttctgtgggacacattggcactgagccacaaagaaggtgtggccagaacaacttgggctcctgctgaccaatgtcctctagggcctaggggacagaggaacacagagtcacagcttcaggggccgaatgagcatggcggccttcctgagagaatatgccccaccacgaaactcagcccagtagacaccatcctggtagcggcttcggtagtggccgccgtggtgccacacaccgttgaggttggagtgggcacaggcatggtaccaccagcctccccgctggtacagggcacagttacctgaggggagagagagagtccatgtcctctcaccagaataaaagcctctacctgcacctcacagtgcaaggcttttgccaggcatcccctggcccctcccattcttattgaatacaagccctgatcttccatctcctcagcaaaaaaataggagccctggccccccaactttcttcagagtaatagccttaattccttccctatctccttaccaaagtacaagtcacatctttcccaccttttctgcaaactaggagtctaccgttcattcctttatcaaagaaaagtatctacttcctttctagaataagagtactagctctcaccctctgccctttacttgaacaggagtcttgattctttttttgcctcatcagagaaggaatctggactccccatccccccaccaggataaaagtcctgacctttgttctcttgacggaataaaagcttgcttatccttata

SEQ ID NO: 118723 - DNA, 2140 bp, Homo sapiens
  Payload ID: 3237
  Gene Symbol: C19orf66
  Gene Name: chromosome 19 open reading frame 66
  Uniprot ID: Q9NUL5
  ENST ID: ENST00000397881
  CDS Start-End: 478-1200
agaacggtgcctagagatgggggagggatgatcccgtttccccttcccccaccggaacccccctgtctccatcccagctggagaagagcgtccggcgcctccgggagaagtttcatgggaaggtatcctccaagaaggcgggggctctgatgaggaaattcggcagcgaccacacgggagtggggcgctccatcgtgtacggggtaaagcaaaaagatggccaagaactaagtaacgatctggatgcccagacaaagaaactgaggccgaagtcacttgccagcaagcaggggcagctgcgatttgaaccctggccacctggagtcagagcctgggctctaacatgcctgtcagtgggaacccagggggcagggagtggcttgcccaagtccccacagctggaagtgatacagctgggatttgaacccacatctctctcccacttagccgagcacaacgtggcctcaaaggggcgatatgtcacaacatcaacaagcatgtggcatttgcaggcaggaagatccaccagaagatatgaagcaggaccgggacattcaggcagtggcgacctccctcctgccactgacagaagccaacctacgcatgtttcaacgtgcccaggacgaccttatccctgctgtggaccggcagtttgcctgctcctcctgcgaccacgtctggtggcgccgcgtgccccagcggaaggaggtatcccggtgccggaaatgccggaagcgctacgagccagtgccagctgacaagatgtggggcctggctgagttccactgcccgaagtgtcggcacaacttccggggctgggcacagatggggtccccgtccccctgctacgggtgcggcttccccgtgtatccaacacggatcctccccccgcgctgggaccgggacccggatcgccgcagcacccacactcactcctgctcagctgccgactgctacaaccggcgagagccccacgtgcctgggacatcctgtgctcaccccaagagccggaagcagaaccacctgcccaaagtgctccaccccagcaaccctcacattagcagtggctccactgtggccacctgcttgagccagggtggcctcctggaagacctggacaacctcatcctggaggacctgaaggaggaggaggaggaagaggaggaggtggaggacgaggagggcgggcccagggagtgacccctgccaggtgcagatacaaaccagacacggtctgtggctactttgtgttattataagatatgagctcaaaccgagatatgaatgaccttggggagccatctgaggccaagatattgacgggggggattcctgggtcccattttcagcgcccagggtcacagatccacagtgggaagttctgtgggacacattggcactgagccacaaagaaggtgtggccagaacaacttgggctcctgctgaccaatgtcctctagggcctaggggacagaggaacacagagtcacagcttcaggggccgaatgagcatggcggccttcctgagagaatatgccccaccacgaaactcagcccagtagacaccatcctggtagcggcttcggtagtggccgccgtggtgccacacaccgttgaggttggagtgggcacaggcatggtaccaccagcctccccgctggtacagggcacagttacctgaggggagagagagagtccatgtcctctcaccagaataaaagcctctacctgcacctcacagtgcaaggcttttgccaggcatcccctggcccctcccattcttattgaatacaagccctgatcttccatctcctcagcaaaaaaataggagccctggccccccaactttcttcagagtaatagccttaattccttccctatctccttaccaaagtacaagtcacatctttcccaccttttctgcaaactaggagtctaccgttcattcctttatcaaagaaaagtatctacttcctttctagaataagagtactagctctcaccctctgccctttacttgaacaggagtcttgattctttttttgcctcatcagagaaggaatctggactccccatccccccaccaggataaaagtcctgacctttgttctcttgacggaataaaagcttgcttatcctt

SEQ ID NO: 118724 - DNA, 550 bp, Homo sapiens
  Payload ID: 3237
  Gene Symbol: C19orf66
  Gene Name: chromosome 19 open reading frame 66
  ENST ID: ENST00000586889
  CDS Start-End: 1-233
tcgtgtacggggtaaagcaaaaagatggccaagaactaagtaacgatctggatgcccagacaaagaaactgaggccgaagtcacttgccagcaagcaggggcagctgcgatttgaaccctggccacctggagtcagagcctgggctctaacatgcctccgagcacaacgtggcctcaaaggggcgatatgtcacaacatcaacaagcatgtggcatttgcaggcaggaagtgagtatgggggtcaggctagcctcactcaggcaagccctcccctaagcctcagtttccccatctgagcaataaggtaacaggtgtgcccacctctcagggctgctatgaggacaactgaggccacacacctggctctcaataagtgagtggtgctctgtgagcttctggcgagttaggggcaccctactcattgcggccgggggcctcccccagcaaacgggtggaaagaggcctgagccccatccccagtttctgcccctgctatctccacccaggatccaccagaagatatgaagcaggaccgggacattcaggcag

SEQ ID NO: 118725 - DNA, 621 bp, Homo sapiens
  Payload ID: 3237
  Gene Symbol: C19orf66
  Gene Name: chromosome 19 open reading frame 66
  ENST ID: ENST00000590378
  CDS Start-End: 409-621
gtaaagggatgaaaggcggggggggggcggcggaggccaaaaccaagggtcaagttcgggccgggagaacggtgcctagagatgggggagggatgatcccgtttccccttcccccaccggaacccccctgtctccatcccagctggagaagagcgtccggcgcctccgggagaagtttcatgggaaggtatcctccaagaaggcgggggctctgatgaggaaattcggcagcgaccacacgggagtggggcgctccatcgtgtacggggtaaagcaaaaagatggccaagaactaagtaacgatctggatgcccagacaaagaaactgaggccgaagtcacttgccagcaagcaggggcagctgcgatttgaaccctggccacctggagtcagagcctgggctctaacatgcctccgagcacaacgtggcctcaaaggggcgatatgtcacaacatcaacaagcatgtggcatttgcaggcaggaagatccaccagaagatatgaagcaggaccgggacattcaggcagtggcgacctccctcctgccactgacagaagccaacctacgcatgtttcaacgtgcccaggacgaccttatccctgctgtggaccggcagttt

SEQ ID NO: 118726 - DNA, 808 bp, Homo sapiens
  Payload ID: 3237
  Gene Symbol: C19orf66
  Gene Name: chromosome 19 open reading frame 66
  ENST ID: ENST00000587710
  CDS Start-End: 81-464
ggaccgacgggcgcacccaggtaggggggcggctgagccgcgcagtgcggaccctcgcggggaactgcgccgccgccaccatgtctcaggaaggtgtggagctggagaagagcgtccggcgcctccgggagaagtttcatgggaaggtatcctccaagaaggcgggggctctgatgaggaaattcggcagcgaccacacgggagtggggcgctccatcgtgtacggggtaaagcaaaaagatggccaagaactaagtaacgatctggatgcccagacaaagaaactgaggccgaagtcacttgccagcaagcaggggcagctgcgatttgaaccctggccacctggagtcagagcctgggctctaacatgcctccgagcacaacgtggcctcaaaggggcgatatgtcacaacatcaacaagcatgtggcatttgcaggcaggaagatccaccagaagatatgaagcaggaccgggacattcaggcagtggcgacctccctcctgccactgacagaagccaacctacgcatgtttcaacgtgcccaggacgaccttatccctgctgtggaccggcagtttgcctgctcctcctgcgaccacgtctggtggcgccgcgtgccccagcggaaggaggtatcccggtgccggaaatgccggaagcgctacgagccagtgccagctgacaagatgtggggcctggctgagttccactgcccgaagtgtcggcacaacttccggggctgggcacagatggggtccccgtccccctgctacgggtgcggcttccccgtgtatccaacacggatc

SEQ ID NO: 118727 - DNA, 565 bp, Homo sapiens
  Payload ID: 3237
  Gene Symbol: C19orf66
  Gene Name: chromosome 19 open reading frame 66
  ENST ID: ENST00000593131
  CDS Start-End: 1-432
gatccaccagaagatatgaagcaggaccgggacattcagaagccaacctacgcatgtttcaacgtgcccaggacgaccttatccctgctgtggaccggcagtttgcctgctcctcctgcgaccacgtctggtggcgccgcgtgccccagcggaaggaggtatcccggtgccggaaatgccggaagcgctacgagccagtgccagctgacaagatgtggggcctggctgagttccactgcccgaagtgtcggcacaacttccgcacccacactcactcctgctcagctgccgactgctacaaccggcgagagccccacgtgcctgggacatcctgtgctcaccccaagagccggaagcagaaccacctgcccaaagtgctccaccccagcaaccctcacattagcagtggctccactgtggccacctgcttgagccagggtggcctcctggaagacctggacaacctcatcctggaggacctgaaggaggaggaggaggaagaggaggaggtggaggacgaggagggcgggcccagggagtgacccctgccaggtgcagatacaaa

SEQ ID NO: 118728 - DNA, 1481 bp, Homo sapiens
  Payload ID: 3237
  Gene Symbol: C19orf66
  Gene Name: chromosome 19 open reading frame 66
  Uniprot ID: Q9NUL5
  ENST ID: ENST00000591813
  CDS Start-End: 89-856
cggctgctggaccgacgggcgcacccaggtaggggggcggctgagccgcgcagtgcggaccctcgcggggaactgcgccgccgccaccatgtctcaggaaggtgtggagctggagaagagcgtccggcgcctccgggagaagtttcatgggaaggtatcctccaagaaggcgggggctctgatgaggaaattcggcagcgaccacacgggagtggggcgctccatcgtgtacggggtaaagcaaaaagatggccaagaactaagtaacgatctggatgcccaggatccaccagaagatatgaagcaggaccgggacattcaggcagtggcgacctccctcctgccactgacagaagccaacctacgcatgtttcaacgtgcccaggacgaccttatccctgctgtggaccggcagtttgcctgctcctcctgcgaccacgtctggtggcgccgcgtgccccagcggaaggaggtatcccggtgccggaaatgccggaagcgctacgagccagtgccagctgacaagatgtggggcctggctgagttccactgcccgaagtgtcggcacaacttccgcacccacactcactcctgctcagctgccgactgctacaaccggcgagagccccacgtgcctgggacatcctgtgctcaccccaagagccggaagcagaaccacctgcccaaagtgctccaccccagcaaccctcacattagcagtggctccactgtggccacctgcttgagccagggtggcctcctggaagacctggacaacctcatcctggaggacctgaaggaggaggaggaggaagaggaggaggtggaggacgaggagggcgggcccagggagtgacccctgccaggtgcagatacaaaccagacacggtctgtggctactttgtgttattataagatatgagctcaaaccgagatatgaatgaccttggggagccatctgaggccaagatattgacgggggggattcctgggtcccattttcagcgcccagggtcacagatccacagtgggaagttctgtgggacacattggcactgagccacaaagaaggtgtggccagaacaacttgggctcctgctgaccaatgtcctctagggcctaggggacagaggaacacagagtcacagcttcaggggccgaatgagcatggcggccttcctgagagaatatgccccaccacgaaactcagcccagtagacaccatcctggtagcggcttcggtagtggccgccgtggtgccacacaccgttgaggttggagtgggcacaggcatggtaccaccagcctccccgctggtacagggcacagttacctgaggggagagagagagtccatgtcctctcaccagaataaaagcctctacctgcacctcacagtgcaaggcttttgccaggcatcccctggcccctcccattcttattgaatacaagccctgatcttccatctcctcagcaaaaaaa

SEQ ID NO: 118729 - DNA, 751 bp, Homo sapiens
  Payload ID: 3238
  Gene Symbol: C19orf67
  Gene Name: chromosome 19 open reading frame 67
  ENST ID: ENST00000343945
  CDS Start-End: 104-751
aaattcaaaagaggcgaacggcccccggcgcggcggcgcggctccggtggagaggtcaaggcagggcagagaccaagtacagaaggagcagctggccaaggccatgcccaccttcttacagatgtgtgagccctacttcctgtacctggaggcagccgcgagaagcataccccccatctatggacccctgcaggagctggtccgaaaggggctgttagagatctcccaacagctgaccctgcgcctggaacagctggtcctcatgtacgcttcctttgggttcgtggacctggaggagatgaacccccttagcatctcctgtttcttttgcgggaggttctccatcagcctgtcccatgaggtctccatcttcagatactgtgccccaaccgcctacactgccagccgcttcccccgctacctctataagaagatgcgctggcacctggaagccaccccagaggcccctggtcggggacaagattcccttgtggattactactttctgtgctatcgagatacttgggaagacacaggccagagtccagccaattcgtgcccacagatccagaagctgtggtccatcggccgatgggtgcccctaggaccagccgaggatgacctttattcatggattttgtgcccgcagccgcttggggactaccagcagctgctgaccatcggcttcgaggagcccacgcccacgctggccaccgacctgctggtgcagatcctcacgggccaggcaggc

SEQ ID NO: 118730 - DNA, 1427 bp, Homo sapiens
  Payload ID: 3238
  Gene Symbol: C19orf67
  Gene Name: chromosome 19 open reading frame 67
  Uniprot ID: A6NJJ6
  ENST ID: ENST00000548523
  CDS Start-End: 136-1212
gcgcggcggcgcggctccggtggagaggtcaaggcaggggccagtcggaggctcccggggcggggtcgaacccgcggccaacctgagcagcagcggaagcttaaagagctcaggttcccgccccccggccctaccatggctacagagcagtggttcgaggggtcgctccccctggaccctggagaaacaccgcctccagacgccttggaacctgggacgccgccctgcggagacccctccaggtcgacgccccctggcaggcctgggaacccatctgagccggatcctgaagatgccgaggggcggctggctgaggcccgggcctccacgtcttcccccaaacctctggtcccccggcctgggccagcacctccccgcctatccctggacactttgttcagccccatcacccaacagctgcgctacctactgaagaaggcagatgatttccagagctacttgctctacagcagagaccaagtacagaaggagcagctggccaaggccatgcccaccttcttacagatgtgtgagccctacttcctgtacctggaggcagccgcgagaagcataccccccatctatggacccctgcaggagctggtccgaaaggggctgttagagatctcccaacagctgaccctgcgcctggaacagctggtcctcatgtacgcttcctttgggttcgtggacctggaggagatgaacccccttagcatctcctgtttcttttgcgggaggttctccatcagcctgtcccatgaggtctccatcttcagatactgtgccccaaccgcctacactgccagccgcttcccccgctacctctataagaagatgcgctggcacctggaagccaccccagaggcccctggtcggggacaagattcccttgtggattactactttctgtgctatcgagatacttgggaagacacaggccagagtccagccaattcgtgcccacagatccagaagctgtggtccatcggccgatgggtgcccctaggaccagccgaggatgacctttattcatggattttgtgcccgcagccgcttggggactaccagcagctgctgaccatcggcttcgaggagcccacgcccacgctggccaccgacctgctggtgcagatcctcacgggccaggcaggccaggcccggcctccgagcgcagccgggcctgcggggtgggcagcgcaggggtcttgaacctggggaagagggtaggagctggaacttgacagttccaaactccagaatagggggcaggggaggggctcactcgttctcgcagtgcagcccggcctcgccttccaaagggccaggccgagctgacctgtctgcaccgagtccggcttggccgtggggccctgaatgcggacacgtcagttttgtgttaaataaaagaaagaaagaggtcacag

SEQ ID NO: 118731 - DNA, 2277 bp, Homo sapiens
  Payload ID: 3239
  Gene Symbol: C19orf68
  Gene Name: chromosome 19 open reading frame 68
  Uniprot ID: Q86XI8
  ENST ID: ENST00000328759
  CDS Start-End: 33-1916
ggacgccgctccggggcgggtaggcccccaggatggagcggccggagcccccacccggcacggctgcggggcaggaggagcaggagctgcgggagcgggccttcttctcgtgggccgagttcagccgcttcttcgacgcgtggtgccagcagcggctggcgctcttcttcgtcaagagctccatgcacctggcgcgctgccgctgggccagtgcgcccccgctctacacgctcatcgacgtgctcaagtacagctacgtgcggcttgtgtgcaaggacgtgcgtgcgcccagccggcccgccgtggggcctccccagcccggctgccccgccttcatcatcgtcaagctgagcccgctgcgggaccgcctcgtggtgacggagtgccagctgacccactcacacccggcctgcccgctggagttcgcctactacttccgcccgggccacctgctggccaacgcctgcctgccggtgcgcaccaccaacaagatctccaagcagttcgtggccccagccgacgtgcgccgcctgctgtcctactgcaagggccgcgaccacggcgtcctggacgccctgcacgtgctcgagggcctcttccgcaccgaccccgaggccaaggtgaagctggtgttcgtggaggaccaggctgtggtggagacggtgttcttcctgacgtcgcgcaccagggcgctgctgcggcgcttccctcgcatgctgctggtggaccggctgccggggctgcagggcgcgctggatctgctggccgtgctgtgcgtggacggctcgggccgtgcgcgccaggctgcctgctgcgtggcgcgcccgggcacaccgagcctgctgcgcttcgcgctcgcgtcgctgctgcagagcgcgccagacgtcaagggccgcgtgcgctgcctcaccgccgggcccgaggtggcggcgcagttgcctgcagtgcgccagctgctgccctgcgcgcgcgtgcagatctgccgcgcgcagggcctggagacgctcttcagcaaggcgcaggagctgggcggcgccggccgcgaggacccgggcctgtggtcgcgcctgtgccgcctggctggcgcgtcgtcgcccgcagcctacgacgaggcgctggccgagctccacgcccacggcccagccgccttcgtggactacttcgagcgcaactgggagccccgccgcgacatgtgggtccgcttccgcgccttcgaggcggccagagacctggacgcgtgtgccctggtgcgaggccaccgccggcgactgctgcgtcgtctcagcccctcgcgtggcgtggcgcagtgccttcgcgacctggtggccatgcagtgggccgacgcggccggggaggcggtgcccgaggggcccgatggcggggggccttggctggaggatgagccagggaggggagcccagggggagaacgagagggtgaggggcctggagacaggcgactggggaggggctccgaaagaaggaagtatttggaggggagcccagatggagaaggagtgggcaagggcactggaaaccagagactggggcggggctcagttcgaaggtgagaaggggagggcactgcagatcagagattggagagggggtcggttggagaatcagaagccgaggggactggaagggggtgtcttgagagggtcgaagttagagaaagggcacctgagagggccagagattagagactggagggggccccagttggagggtgagaaagattggggactggaaggttatgtctggagggggtcccagttggaggaccaggcgctaagaggattggaagggtatacctggagggtggcccagctggaagatcgcaggagtaccaccgacctgagggggacccagtttgactatgagaggggaaagggagaaagtacagaagacagatgaaggagaggaggtaagcgagaaaaaatggaaaggggagccggaaatggaggagagaggacaagcaaagagacagaaatgaagacatgaggaaaagctgggggaagcaggagaggaagggacgggatgtaggagggggaagaaaaatcggagatgagacaaaagaaatgtgtgggagacgggtagagacgaaatgcaaggggcgtggttttggtttttctccaagacctggagacatcgacccccatcgccttctgaagagagagggagggcgggcactgggggtcaggagagtctccagcaggggaggggaattgtttggactattgttcttcaggattggaataaaacaatcttattttgg

SEQ ID NO: 118732 - DNA, 3588 bp, Homo sapiens
  Payload ID: 3239
  Gene Symbol: C19orf68
  Gene Name: chromosome 19 open reading frame 68
  ENST ID: ENST00000614654
  CDS Start-End: 33-2795
ggacgccgctccggggcgggtaggcccccaggatggagcggccggagcccccacccggcacggctgcggggcaggaggagcaggagctgcgggagcgggccttcttctcgtgggccgagttcagccgcttcttcgacgcgtggtgccagcagcggctggcgctcttcttcgtcaagagctccatgcacctggcgcgctgccgctgggccagtgcgcccccgctctacacgctcatcgacgtgctcaagtacagctacgtgcggcttgtgtgcaaggacgtgcgtgcgcccagccggcccgccgtggggcctccccagcccggctgccccgccttcatcatcgtcaagctgagcccgctgcgggaccgcctcgtggtgacggagtgccagctgacccactcacacccggcctgcccgctggagttcgcctactacttccgcccgggccacctgctggccaacgcctgcctgccggtgcgcaccaccaacaagatctccaagcagttcgtggccccagccgacgtgcgccgcctgctgtcctactgcaagggccgcgaccacggcgtcctggacgccctgcacgtgctcgagggcctcttccgcaccgaccccgaggccaaggtgaagctggtgttcgtggaggaccaggctgtggtggagacggtgttcttcctgacgtcgcgcaccagggcgctgctgcggcgcttccctcgcatgctgctggtggaccggctgccggggctgcagggcgcgctggatctgctggccgtgctgtgcgtggacggctcgggccgtgcgcgccaggctgcctgctgcgtggcgcgcccgggcacaccgagcctgctgcgcttcgcgctcgcgtcgctgctgcagagcgcgccagacgtcaagggccgcgtgcgctgcctcaccgccgggcccgaggtggcggcgcagttgcctgcagtgcgccagctgctgccctgcgcgcgcgtgcagatctgccgcgcgcagggcctggagacgctcttcagcaaggcgcaggagctgggcggcgccggccgcgaggacccgggcctgtggtcgcgcctgtgccgcctggctggcgcgtcgtcgcccgcagcctacgacgaggcgctggccgagctccacgcccacggcccagccgccttcgtggactacttcgagcgcaactgggagccccgccgcgacatgtgggtccgcttccgcgccttcgaggcggccagagacctggacgcgtgtgccctggtgcgaggccaccgccggcgactgctgcgtcgtctcagcccctcgcgtggcgtggcgcagtgccttcgcgacctggtggccatgcagtgggccgacgcggccggggaggcggtgcccgaggggcccgatggcggggggccttggctggaggatgagccagggaggggagcccagggggagaacgagagggtgaggggcctggagacaggcgactggggaggggctccgaaagaaggaagtatttggaggggagcccagatggagaaggagtgggcaagggcactggaaaccagagactggggcggggctcagttcgaaggtgagaaggggagggcactgcagatcagagattggagagggggtcggttggagaatcagaagccgaggggactggaagggggtgtcttgagagggtcgaagttagagaaagggcacctgagagggccagagattagagactggagggggccccagttggagggtgagaaagattggggactggaaggttatgtctggagggggtcccagttggaggaccaggcgctaagaggattggaagggtatacctggagggtggcccagctggaagatcgcaggagtaccaccgacctgagggggacccagtttgactatgagagggtcaggagtcttgaaggaagcccctggaggggggcgcagctgcacgatgaaagggcagggggactgagaactgcagaatggaaggggccacagtcagaagtagagaaggggagggggctggaggtcagaaacttgagggggatccccttggagaagtccctggagttggcccctgagaacggagaccaaaggggaccccagtgggaagatgagaggaggagagggccagagattgcagaggagaggggagcgagggtgggggtcaaaagaagaaggggcctggaggatatagttctggtccagctgggagacacgagggtcacaggcatggagaatggagatggagggggagcccggtccgtgggccccaagagccgagccggacgagggatggagtggggagacgcaggagggcggtgtctagggctggggaatggagtcgtgtctggcaccccggtggggactgtattggaaggcagcccagaatgggcagcggcgaggagtgaacacctggctgcaggtgacggcctgcaggaaggaggcgaagatggccccagggaaccaaagaggctttgccgacccccgggagaggaggaggtggactgggaacccctggccaaattccgagcagcctgcgggccagagctggcagacctggtggctgaggagttggcctttgctaggcagcatgggacccggggtttccactggaccggagctggctttgcccttaaggacggcacctcggacttcttcctggatggggccctgacacgctgcagctgctcaattcacgccgcccgccgtctgccctgcagacacctctttgcagcgcgcctcctcactggggctgccttattccacatggacctgctcagggattgctgggggagagccccagagccctgacccttcatgcctctgcccaccaccctccaccaggagggtcggagggcattcttcgatcccaaagataatagggctgaggccaaggagaccgttgcagtccccctggccaccttctgggtcatccagggacctcctcatggcagtttgcctctctgggtccaagggcaagctgtaagtggtctctgaggtcctggagccacagcttgggaaggtgttgatgggcagggtggattctgagggcttccctctggagaggaagcatgtgatgagaggtgtagacagggtcaggctgggacagaaggaaggaaaggggcagagctggggggagggggaggaagcgatcatatggggagtgtctggcaagagtagactggccagtctagggagtgcagcggggagaggggaaagggagaaagtacagaagacagatgaaggagaggaggtaagcgagaaaaaatggaaaggggagccggaaatggaggagagaggacaagcaaagagacagaaatgaagacatgaggaaaagctgggggaagcaggagaggaagggacgggatgtaggagggggaagaaaaatcggagatgagacaaaagaaatgtgtgggagacgggtagagacgaaatgcaaggggcgtggttttggtttttctccaagacctggagacatcgacccccatcgccttctgaagagagagggagggcgggcactgggggtcaggagagtctccagcaggggaggggaattgtttggactattgttcttcaggattggaataaaacaatcttattttgg

SEQ ID NO: 118733 - DNA, 896 bp, Homo sapiens
  Payload ID: 3240
  Gene Symbol: C19orf70
  Gene Name: chromosome 19 open reading frame 70
  Uniprot ID: Q5XKP0
  ENST ID: ENST00000309324
  CDS Start-End: 411-767
ccgggcccttggtcccccgcgcgggcgcgggtggatctctcgggctctgacttgttttcgggtcaccttcaggcttcagccaggcacctgacgcctctttcccctcacggtgccagggccgggccgaactacatttcccaggaggctccgcggccaggtgcaaacagcgccgtgctgactacatttcccagacagccttgcggcggcccgggccttaaagcgtccatttcccagcggccctccgctgcgagaccgcagcccttctctggagtctcagagccgcaagacaccacgactcccagaggaccttgcgtcgggcaagaaagactacaccttccagaggcctctgcggcgccgcgacaggaagcggcgggcgagccgagtgtccttgcgcgtggatccgagcgaccatggtggcccgggtgtggtcgctgatgaggttcctcatcaagggaagtgtggctgggggcgccgtctacctggtgtacgaccaggagctgctggggcccagcgacaagagccaggcagccctacagaaggctggggaggtggtcccccccgccatgtaccagttcagccagtacgtgtgtcagcagacaggcctgcagataccccagctcccagcccctccaaagatttactttcccatccgtgactcctggaatgcaggcatcatgacggtgatgtcagctctgtcggtggccccctccaaggcccgcgagtactccaaggagggctgggagtatgtgaaggcgcgcaccaagtagcgagtcagcaggggccgcctgccccggccagaacgggcagggctgccactgacctgaagactccggactgggaccccactccgagggcagctcccggccttgccggcccaataaaggacttcagaagtg

SEQ ID NO: 118734 - DNA, 577 bp, Homo sapiens
  Payload ID: 3240
  Gene Symbol: C19orf70
  Gene Name: chromosome 19 open reading frame 70
  ENST ID: ENST00000587589
  CDS Start-End: 3-269
ccatggtggcccgggtgtggtcgctgatgaggttcctcatcaagggaagtgtggctgggggcgccgtctacctggtgtacgaccaggagctgctggggcccagcgacaagagccaggcagccctacagaaggctggggaggtggtcccccccgccatgtaccagttcagccagtacgtgtgtcagcagacaggcctgcagataccccagctcccagcccctccaaagatttactttcccatccgtgactcctggaatgcagggatctaaaagggaaaggaggccgagcacagtggctcacgcctgtaatcccagcactttgggaggctgaggtgggcggatcatctgaagtcaggagttcgagaccagcctgggcaacatggtgaaaccccatctctactaaaaatacaaaaattaaccgtgcgtggtggtgcacacctgtaatcccagctgctgcttgagaggctgaagcaggagaattgcttgaacccaggaggcagaggttgcagtgagccgaggttgcaccactgcactccagcctgggcgacagggcgagactccatctcaaaaaaataaaa

SEQ ID NO: 118735 - DNA, 769 bp, Homo sapiens
  Payload ID: 3240
  Gene Symbol: C19orf70
  Gene Name: chromosome 19 open reading frame 70
  ENST ID: ENST00000590389
  CDS Start-End: 46-378
ttctctgtgaggtgggaatgccggtgaatcctgccgctggcgtggatgagaagtgaatgcgtgctcggagctgcgagtgacagcgggcaggaggcgcccagggacacttggtttctccagggctggaaggcttctagaaggttcctcatcaagggaagtgtggctgggggcgccgtctacctggtgtacgaccaggagctgctggggcccagcgacaagagccaggcagccctacagaaggctggggaggtggtcccccccgccatgtaccagttcagccagtacgtgtgtcagcagacaggcctgcagataccccagctcccagcccctccaaagatttactttcccatccgtgactcctggaatgcagggatctaaaagggaaaggaggccgagcacagtggctcacgcctgtaatcccagcactttgggaggctgaggtgggcggatcatctgaagtcaggagttcgagaccagcctgggcaacatggtgaaaccccatctctactaaaaatacaaaaattaaccgtgcgtggtggtgcacacctgtaatcccagctgctgcttgagaggctgaagcaggagaattgcttgaacccaggaggcagaggttgcagtgagccgaggttgcaccactgcactccagcctgggcgacagggcgagactccatctcaaaaaaataaaatacaaaaattagcctggtatggtggcgcacttgtagtcccagctacttgggaggctgaggcaagagaatcgcttgaacccagg

SEQ ID NO: 118736 - DNA, 655 bp, Homo sapiens
  Payload ID: 3240
  Gene Symbol: C19orf70
  Gene Name: chromosome 19 open reading frame 70
  ENST ID: ENST00000587950
  CDS Start-End: 104-526
agcgagcccttggcgttcagttcgcggtgtcagcctccgcctccgagcctcagttgtcttctctgtgaggtgggaatgccggtgaatcctgccgctggcgtggatgagaagtgaatgcgtgctcggagctgcgagtgacagcgggcaggaggcgcccagggacacttggtttctccagggctggaaggcttctagaaggttcctcatcaagggaagtgtggctgggggcgccgtctacctggtgtacgaccaggagctgctggggcccagcgacaagagccaggcagccctacagaaggctggggaggtggtcccccccgccatgtaccagttcagccagtacgtgtgtcagcagacaggcctgcagataccccagctcccagcccctccaaagatttactttcccatccgtgactcctggaatgcaggcatcatgacggtgatgtcagctctgtcggtggccccctccaaggcccgcgagtactccaaggagggctgggagtatgtgaaggcgcgcaccaagtagcgagtcagcaggggccgcctgccccggccagaacgggcagggctgccactgacctgaagactccggactgggaccccactccgagggcagctcccggccttgccggcccaataaaggacttcagaagtg

SEQ ID NO: 118737 - DNA, 674 bp, Homo sapiens
  Payload ID: 3241
  Gene Symbol: C19orf71
  Gene Name: chromosome 19 open reading frame 71
  Uniprot ID: A6NCJ1
  ENST ID: ENST00000329493
  CDS Start-End: 25-654
ggagcccgggggatccaggcagacatgcaaaccctcaggcaagaggctgcacggccctgtatcccctcggggaccctcgaggccagcttcccagcaccgctgtacagcgatgactacctgtccctggagggttcccgctggccaccagccatcaggcaggccacacgctggaagtacacgcccatgggacgggacgcagccggccagctgtggtacacaggcctgaccaactcggacgcctgggaagcctggtacaacctgccacgggccccggccagccccttccgcgaggcctacaaccgctggcacagctgctaccaacaccgtgagtgcagcatgccatcggcctacacccagcacctgcgggagaccgcctggcatgaccccatcgtccctgcccagtaccaggcccccagcacccggtgggggagcgcgctgtggaaagacaggccaatccggggcaaggaatacgtgctcaacaggaaccggtacggggtggagccactgtggagggcatcagactacgtgccctccctgtcggcaccccagcgcccgcccggcaccacccagaactaccgggagtgggtcctggaaccatactgcccctccacctgccagcggtccccgccttccctcacacccactccccgataaaggcatgctaccaggatgca

SEQ ID NO: 118738 - DNA, 744 bp, Homo sapiens
  Payload ID: 3242
  Gene Symbol: C19orf73
  Gene Name: chromosome 19 open reading frame 73
  Uniprot ID: Q9NVV2
  ENST ID: ENST00000408991
  CDS Start-End: 119-508
gatgtcacctggagcgagtagcgcgcggcgtggaacgcgagtcgcgaccccggctcccggcagtggcgcgcactagccctcgcgccgcacgggacacgagggctgggcgggcagcgggatgaggctaaaggttggatttcaaggcgggggctgcttccggaaagacgcgctgtgtttggaaggtggagtgagcgcccggtgggcgagggcacctcattctgcacccctgcgcccgcctcgggaactgcacgcggcacccccacccgcgactcccacgcagacagtagtgcggcctgcagggttcccccggcggacgaggctaatggttcgctccgccccgcccacacagaggccgcccactggctccggctgcgtttcaggactctggaggaagggacttggccttcgccctcagacgctcttaagggtaggcagcgttgtcctcagttctgccccagcactcagacccagactgggtccctgcctccgccctccgccctcggactagtctcttggaagccggcctgtctccgccttcagacctagggagaggtcttaacctctgttctcagactctggaaaaggcttctcaacggcttggcctgacctcagctcctcgcattccctccacatctcaagacaccaacccagggatgcaggacagacacacagacactcagtgagggtcaaatatctttaaataaagtgccaggaacaataaatactgtacaggaagagagtgca

SEQ ID NO: 118739 - DNA, 872 bp, Homo sapiens
  Payload ID: 3243
  Gene Symbol: C19orf80
  Gene Name: chromosome 19 open reading frame 80
  Uniprot ID: Q6UXH0
  ENST ID: ENST00000252453
  CDS Start-End: 20-616
ataccttagaccctcagtcatgccagtgcctgctctgtgcctgctctgggccctggcaatggtgacccggcctgcctcagcggcccccatgggcggcccagaactggcacagcatgaggagctgaccctgctcttccatgggaccctgcagctgggccaggccctcaacggtgtgtacaggaccacggagggacggctgacaaaggccaggaacagcctgggtctctatggccgcacaatagaactcctggggcaggaggtcagccggggccgggatgcagcccaggaacttcgggcaagcctgttggagactcagatggaggaggatattctgcagctgcaggcagaggccacagctgaggtgctgggggaggtggcccaggcacagaaggtgctacgggacagcgtgcagcggctagaagtccagctgaggagcgcctggctgggccctgcctaccgagaatttgaggtcttaaaggctcacgctgacaagcagagccacatcctatgggccctcacaggccacgtgcagcggcagaggcgggagatggtggcacagcagcatcggctgcgacagatccaggagagactccacacagcggcgctcccagcctgaatctgcctggatggaactgaggaccaatcatgctgcaaggaacacttccacgccccgtgaggcccctgtgcagggaggagctgcctgttcactgggatcagccagggcgccgggccccacttctgagcacagagcagagacagacgcaggcggggacaaaggcagaggatgtagccccattggggaggggtggaggaaggacatgtaccctttcatgcctacacacccctcattaaagcagagtcgtggcatctca

SEQ ID NO: 118740 - DNA, 504 bp, Homo sapiens
  Payload ID: 3243
  Gene Symbol: C19orf80
  Gene Name: chromosome 19 open reading frame 80
  ENST ID: ENST00000591200
  CDS Start-End: 74-373
actgggagacagaaggggccggtcctcaggcgcccgtgctgcagcagtgggatccactggggagaggctggagatggaggaggatattctgcagctgcaggcagaggccacagctgaggtgctgggggaggtggcccaggcacagaaggtgctacgggacagcgtgcagcggctagaagtccagctgaggagcgcctggctgggccctgcctaccgagaatttgaggtcttaaaggctcacgctgacaagcagagccacatcctatgggccctcacaggccacgtgcagcggcagaggcgggagatggtggcacagcagcatcggctgcgacagatccaggagagactccacacagcggcgctcccagcctgaatctgcctggatggaactgaggaccaatcatgctgcaaggaacacttccacgccccgtgaggcccctgtgcagggaggagctgcctgttcactgggatcagccagggcgccgggccccacttctgagcaca

SEQ ID NO: 118741 - DNA, 432 bp, Homo sapiens
  Payload ID: 3243
  Gene Symbol: C19orf80
  Gene Name: chromosome 19 open reading frame 80
  ENST ID: ENST00000587543
  CDS Start-End: 1-176
cagcccaggaacttcgggcaagcctgttggagactcaggctcacgctgacaagcagagccacatcctatgggccctcacaggccacgtgcagcggcagaggcgggagatggtggcacagcagcatcggctgcgacagatccaggagagactccacacagcggcgctcccagcctgaatctgcctggatggaactgaggaccaatcatgctgcaaggaacacttccacgccccgtgaggcccctgtgcagggaggagctgcctgttcactgggatcagccagggcgccgggccccacttctgagcacagagcagagacagacgcaggcggggacaaaggcagaggatgtagccccattggggaggggtggaggaaggacatgtaccctttcatgcctacacacccctcattaaagcagagtcgtggcatctca

SEQ ID NO: 118742 - DNA, 1223 bp, Homo sapiens
  Payload ID: 3243
  Gene Symbol: C19orf80
  Gene Name: chromosome 19 open reading frame 80
  Uniprot ID: Q6UXH0
  ENST ID: ENST00000616433
  CDS Start-End: 371-967
acatacatcgggtgtgagcacggaatagctgggcggcggctggtccacagacactgggagacagaaggggccggtcctcaggcgcccgtgctgcagcagtgggatccactggggagaggctggagaccaccggtgtgaaggcctcgcgggtaaattcactgcagctggacttgccaaagatgacctgggagagtggattcatgagggacccatgggggatgccctaccccccttccctggggcacagccactgaccggcagagcctggctggggtcctcgcctgtcatgtactgcactcgcacagcaaggttgcgcacggagccctggcggctgctgaagttgaggctgttataccttagaccctcagtcatgccagtgcctgctctgtgcctgctctgggccctggcaatggtgacccggcctgcctcagcggcccccatgggcggcccagaactggcacagcatgaggagctgaccctgctcttccatgggaccctgcagctgggccaggccctcaacggtgtgtacaggaccacggagggacggctgacaaaggccaggaacagcctgggtctctatggccgcacaatagaactcctggggcaggaggtcagccggggccgggatgcagcccaggaacttcgggcaagcctgttggagactcagatggaggaggatattctgcagctgcaggcagaggccacagctgaggtgctgggggaggtggcccaggcacagaaggtgctacgggacagcgtgcagcggctagaagtccagctgaggagcgcctggctgggccctgcctaccgagaatttgaggtcttaaaggctcacgctgacaagcagagccacatcctatgggccctcacaggccacgtgcagcggcagaggcgggagatggtggcacagcagcatcggctgcgacagatccaggagagactccacacagcggcgctcccagcctgaatctgcctggatggaactgaggaccaatcatgctgcaaggaacacttccacgccccgtgaggcccctgtgcagggaggagctgcctgttcactgggatcagccagggcgccgggccccacttctgagcacagagcagagacagacgcaggcggggacaaaggcagaggatgtagccccattggggaggggtggaggaaggacatgtaccctttcatgcctacacacccctcattaaagcagagtcgtggcatctca

SEQ ID NO: 118743 - DNA, 493 bp, Homo sapiens
  Payload ID: 3244
  Gene Symbol: C19orf81
  Gene Name: chromosome 19 open reading frame 81
  ENST ID: ENST00000458538
  CDS Start-End: 22-493
cttctcctaggagccctccttatggacctggagaccccagaggagatgcaggctcggagcctgggcaggcccatcaaatcctcaaagcagtacctgcggcaggtcattgcagagtacgaggcactggaccgagaactcccgtgcatccggaagttccccacaccaccagcttcccagcccctctgcctctgcatggagaccttgcccgaggaggattttacccacctggaggtgctgcaagccctggaggcccagttaccaggggccatggagagcgggcgcgtgagcagcatccgctttgagaacatgaacgtcatctgtgggactgctgggcgccggaaccggtggctcatcgcggtcacggacttccagacgcgctcgcgcttgctgcgctccgggctcagtccccgcgggcttgcgcaccagatcgtgcgccacgacgacctcctgctgggcgactaccgcctgcacctgcgccgctccctggtccggc

SEQ ID NO: 118744 - DNA, 765 bp, Homo sapiens
  Payload ID: 3244
  Gene Symbol: C19orf81
  Gene Name: chromosome 19 open reading frame 81
  Uniprot ID: C9J6K1
  ENST ID: ENST00000425202
  CDS Start-End: 1-597
atgcagccagaggtggagcccgtgtgcttccctgccatgggcagccccaccatgcacaggaaggcaggagccctccttatggacctggagaccccagaggagatgcaggctcggagcctgggcaggcccatcaaatcctcaaagcagtacctgcggcaggtcattgcagagtacgaggcactggaccgagaactcccgtgcatccggaagttccccacaccaccagcttcccagcccctctgcctctgcatggagaccttgcccgaggaggattttacccacctggaggtgctgcaagccctggaggcccagttaccaggggccatggagagcgggcgcgtgagcagcatccgctttgagaacatgaacgtcatctgtgggactgctgggcgccggaaccggtggctcatcgcggtcacggacttccagacgcgctcgcgcttgctgcgctccgggctcagtccccgcgggcttgcgcaccagatcgtgcgccacgacgacctcctgctgggcgactaccgcctgcacctgcgccgctccctggtccggcggcgcatgctcgaggccctgggggcggagccgaacgaggaggcctgacgcccgggcgggccccggcagcgcttgcgcaccgccccgcgggctggggccacccacccggagccccggaggacagggggcgttgccttcccaggaaggaggcggggccggctcgagggggtggatactgtgagtttaattataaagaatgacctggtacaaaagcca

SEQ ID NO: 118745 - DNA, 1318 bp, Homo sapiens
  Payload ID: 3245
  Gene Symbol: C19orf84
  Gene Name: chromosome 19 open reading frame 84
  Uniprot ID: I3L1E1
  ENST ID: ENST00000574814
  CDS Start-End: 63-623
gggcccccgaaggatctcggaggcgaagttgctagaagatacgtaagagggccccagtggagatggaacaaccaaaggacggggctgggcctgaagggaacaacctgtccctgccgtcatctgggaccgagccatggccccctgcgcctctcccagcccctccacccttgctcctgaactccacagaccccacccacctggggctcccggagagcgtggcctctgtcaccgtgcccatacgcctggacaccctctcctgcctcctgcacagcgccctgctgggggcctacaccttccaacaggccttgccctcttgcccctgctgctcccaggcaggccactcccagccgggggcagttaggaggcctcccaggggacgcggaggctgggaagtcaggcacaggccaggctggggccgaggcctgcatcgacggggccttgggagagctgagcagccagagaggggccgggcggggggccctggggctggccccaggaccccaccaatgacactgccatcaccaccaacactgcctgcccaggatgggaagaaagaagctcgaggtccagagccacccctggaaacaccactggctgctgaggactgggagacagagtactaggaccttggagggtcaggcacctgagattgcagtcacccaggagggttttcctggggcccagagtgatctcagccctgtcagaagaaccccaagaaacatcttccatcctcccctctccccaaaaccacaatcccaggagtagctcctgtgaggcacttggtgaacctgacctaagtcacctgaatcccaagtgagaagaaaatcctaaacctcgtacccaaacctgtctccttgatggcctcaaccccattcccaatgccatccccaaccacaaccacaatccttacctcattctcaacccccagggctcctccaaccccattccctatcctctccctaatcccaaagccactcctacctgcctctctcttccccactctcaataccctgttcccaaacccattcattcccatccctgtcaccagtcccagctccacttctgcgcctcaaccctaacccaccctctttaccaacccctttctcctcattgcctgtgtacctcagcccatctttaatgtcctctgaatctacagccccaaagagctccatcctcaacctcagccacagccctgtgtccatccccacaaagaaccgcattggccccacatacccagacacctgtgactccccaccccactgcctgctcttcaggtagaaagccctggttgaacaataaacgcatgactctccctgaa

SEQ ID NO: 118746 - DNA, 788 bp, Homo sapiens
  Payload ID: 3245
  Gene Symbol: C19orf84
  Gene Name: chromosome 19 open reading frame 84
  ENST ID: ENST00000570516
  CDS Start-End: 625-741
ggatctcggaggcgaagttgctagaagatacgtaagagggccccagtggagatggaacaaccaaaggacggggctgggcctgaagggtgagacaaacaaagacctcctgagagggggacagagacccagagagaggaggggacagagaaaacgagagagaaagggcgcgctgaacagacctgcatagagaatcaggaaaaacaaaaaaggctcaggaacaacctgtccctgccgtcatctgggaccgagccatggccccctgcgcctctcccagcccctccacccttgctcctgaactccacagaccccacccacctggggctcccggagagcgtggcctctgtcaccgtgcccatacgcctggacaccctctcctgcctcctgcacagcgccctgctgggggcctacaccttccaacaggccttgccctcttgcccctgctgctcccaggcaggccactcccagccgggggcagttaggaggcctcccaggggacgcggaggctgggaagtcaggcacaggccaggctggggccgaggcctgcatcgacggggccttgggagagctgagcagccagagaggggccgggcggggggccctggggctggccccaggaccccaccaatgacactgccatcaccaccaacactgcctgcccaggatgggaagaaagaagctcgaggtccagagccacccctggaaacaccactggctgctgaggactgggagacagagtactaggaccttggagggtcaggcacctgagattgcagtcacccaggagggtt

SEQ ID NO: 118747 - DNA, 1667 bp, Homo sapiens
  Payload ID: 3246
  Gene Symbol: C2orf15
  Gene Name: chromosome 2 open reading frame 15
  Uniprot ID: Q8WU43
  ENST ID: ENST00000302513
  CDS Start-End: 637-1014
gagcgacgcgtacgtctacctgcctgccttacagggcacctaggagggaccccttcctggcccatccgcgccgcgcaggcgcacgcccacgcagcgcctagacgcccgagccgagcgtcccgtctcctagtaaccagccgctagcccccttttccacgactcatttcttaatctctgcctgaggctgccgcacctggatggaacgcgcatgcgcaaggctgtctctcgcagccccgccttccctcagcttgaaacacctgctgcttcgcggcggtggctttgtgccacttttcccagggcttgggcatcattctggacccatgttcggtgaaccggttactctcagagctgctttcgggcgcagctcctgctgcagccagggcccgttttaagagaggcttccaggtccagccctcccgctgcagcctgcagggagcgagccggcctgtcccgatgacatagacactaggtttttacagcaattctctgatgaccttgatatggtagaacgctgtgtatttcaagagtaagctctcgtttgaggagactaacaattcctgttttcgccagatttcttcttgaatggcaacctaaatgccagtccaaagaggcccccaatagacttgttcacccttcatgtcctcaactctggggaagttaagtaatcaagttgaagaaacacttccactacttaaaaaggtacctgcaaattactttcacatttgttcagctatcctaatgggattttcacttagtaaatctgctactcaggtatctgctatacatatggattcaaaagtggatgatcacttaatacgagggactgaaaaaagcaggttggaaccagcgactcagttatttcaaaacaccaagaaaataagattagaagacacaaatcaagaaaactttacaaggattgaagggactggcacaggatctctttctgggaaagccttgggttcagtggtatatgtcaaagaaagtgatggactagaaatgacagatgtggaatgaagcaatttgtacgtattaccaaagaaaccaaaaactgcctttgactaaggggggtgttgaaagagaacttaaccttattaggaaaccctgacaaaatgatggaagactattgccttattttgcactatttgtgaatcatcttacactgcatttttttatgatgcttattcaaaaggcagttgctttagggtgaaaaagccttccaagattcaaagcagatttctctggtattatattatatccttcttaaaaaccagagtttttaagtaacagtatttgaatggcatcaaaacattttcattttaatgtatttctttaacaagtggttaaaaaaagtgtccaagcagccgggcgcagtggctcacacctgtaatcccagcactttgggaggccaaggcgggtcaatcacctgaggtcaggagttcgcaaccagcctggccaatatggtgagaccccatctctactaaaaatgcaaaaagttagccaggcatggtggtgggcacctgtgatcccagctacctgggaggctgaggaaggagaatcgcttgaaccctggaggcggaggctgcactgagctgaggtcatgccattgtactccagcctgggcaacaagagcaaaactccgtctcaaaaaaaaaaaaaaaaaaaaaaaa

SEQ ID NO: 118748 - DNA, 1058 bp, Homo sapiens
  Payload ID: 3246
  Gene Symbol: C2orf15
  Gene Name: chromosome 2 open reading frame 15
  Uniprot ID: Q8WU43
  ENST ID: ENST00000409684
  CDS Start-End: 468-845
tcgcggcggtggctttgtgccacttttcccagggcttgggcatcattctggacccatgttcggtgaaccggttactctcagagctgctttcgggcgcagctcctgctgcagccagggcccgttttaagagaggcttccaggtccagccctcccgctgcagcctgcagggagcgagccggcctgtcccgatgacatagacactaggtttttacagcaattctctgatgaccttgatatggtagaacgctgtgtatttcaagagtaagctctcgtttgaggagactaacaattcctgttttcgccagtgccacctgtgatatatgtgaagttcctgaaatacctaagtccaagttacagctctgtcatattctactgattatttgttcctgtacctgtacaagatttcttcttgaatggcaacctaaatgccagtccaaagaggcccccaatagacttgttcacccttcatgtcctcaactctggggaagttaagtaatcaagttgaagaaacacttccactacttaaaaaggtacctgcaaattactttcacatttgttcagctatcctaatgggattttcacttagtaaatctgctactcaggtatctgctatacatatggattcaaaagtggatgatcacttaatacgagggactgaaaaaagcaggttggaaccagcgactcagttatttcaaaacaccaagaaaataagattagaagacacaaatcaagaaaactttacaaggattgaagggactggcacaggatctctttctgggaaagccttgggttcagtggtatatgtcaaagaaagtgatggactagaaatgacagatgtggaatgaagcaatttgtacgtattaccaaagaaaccaaaaactgcctttgactaaggggggtgttgaaagagaacttaaccttattaggaaaccctgacaaaatgatggaagactattgccttattttgcactatttgtgaatcatcttacactgcatttttttatgatgcttattcaaaaggcagttgctttagggtgaaaaagccttccaagattcaa

SEQ ID NO: 118749 - DNA, 6199 bp, Homo sapiens
  Payload ID: 3247
  Gene Symbol: C2orf16
  Gene Name: chromosome 2 open reading frame 16
  Uniprot ID: Q68DN1
  ENST ID: ENST00000408964
  CDS Start-End: 52-6006
gttaaatctgtggcctttgcatcgaagccatgctttcaagatgtaaaacctatggagctgacaccaggggcccaacagcaaggtataaattatcaagagttgacttcaggatggcaagatgtgaaatcaatgatgttggtaccagagccaactaggaagttcccatcaggaccactgttgactagtgtcagattttcaaatttgtctccagaatcacagcaacaggatgtgaaatctttggagtttactgtagagccaaagttgcaaagcgtaaaacatgtgaaattatcttcagtgtctctgcagcaaactataaaatctgtggaattagcaccagggtcactgcctcaaagagtgaaatatggggagcaaactccaagaacaaattatcaaatcatggaatcctctgaactaatccctagaccagggcatcagtttgcaaaatatgcagagatgatcccacagccaaagtatcaaatccctaaatctgcaaatttgatttcaataccaatttatcacgccacagaatcttcagaaatggcacaaggattggcatataaaggcatagatactgtagagaaatctgtggggttgaccccaaagctaacaggtagagctaaggaatccttagggatgctgctgcagccagatcttcaggtaccaaaatttgttgatctgactccaatggtaagggatcaaggctcaaaattcttaggattaactccagagaaaagctaccaaatcctagaaactatggaattgctctctcagtcacggccccgagttaaggatgtgggggagttatatatgaagccactgcagcaaactgtggaatatgaagggattactccggaactcaagcattactttacagaagctatggggttgaccgctgaggcaaggatacaagcaaatgaattctttggaatgaccccaaagccaacaagtcaagccactggatttgcagagagatccccaaggctctgtcctcaaaacttagaatgtgtggaggtgatctctgagaaaagactgcaaggggaagaatctgtggtattgattccaaagtcattacatcacgtcccagattctgcttcagggatgacacctgggttaggacatcgagttcctgaatctgtggagttgacttctaagtcaggagtgcaggtagagaaaactttgcaattaacccccaaaccacagcatcatgtgggatctccagggataatatcagggttaggacatcaagtcccagaatctgtaaatctgacctgtaagcaatggctacaaatggaggaatctttagaggtgcccctgaagcaaacaagtcaagttataggacatgaagaatctgtagagctcacctctgaggcacggcagcacagggaggtatcaatggggctaacaaagtcaaagaatcaaagtatgaaatctccagggacaaccccaggaccactgggtcgaattgtagaatttatgaggattagtccagagccactagatcaagtcacagaatctgcaaggacacagcttcaagttgctcaatctgaagaggtaatcctcatagatgtcccaaaagttgttcaatctgtgaaagtgacccctggaccaccatttcaaattgtaaagtctgtgacgataccaaggccaacccctcaaatggtagaatatattgagttgactccaaaactgcaatatgtgagaccttcagagcaccacacagggccatgtttgcaagatgtgaaatctacaaaattaatcacaaagccaaaacaccagattttggaaacagtggagttgacagggtttcaaattgtaaaaactatgttaatcccagggccatcccttcaaatcgtaaaatctgaggagttagcaccaggaccaattcctcaggttgtagaaccaataggagtagccctagaatcaggaattgaagcaataaattgtgtggatttacttccaaggccacatcttcaagaactgatagtacctgcagaattaactccaagtccatgtactcaagtgaagtctgcagaattaacctcaccgcaaacatctccatttgaggaacatacaatattgactcataaacaagggcttcaggctgtgaaatctacagtgataaaaacagagcctcctaaagttatggaaactgaggatttgaatctaggacacgtgtgtcagaatagggactgtcagaagttaacatcagaagagttacaagtagggactgacttctctaggttcctacaaagctcttcaaccacactcatttcaagctctgtcagaacagcatctgaattaggaggactttgggattctgggatacaggaagtatccagagctttggatataaaaaaccctgggacagatattttgcagcctgaagagacctatatagaccctactatgatacaatctttaacttttcctttggcccttcataatcaaagctccgataagacagctaacattgtggaaaacccatgtcctgagattctaggagtggatgtaatatctaaagagacaactaagaggaagcaaatggaggagctagagaactcacttcagagacatctaccacaaagctggagatcacgatctaggacattccaggcagaatcaggggttcagaaaggtctcatcaagtctttcccgggcagacaacacaatgtctgggagagtcatgcctggaggcagcgactaccaagaaaatatctctccactatgctaatgctggggaatattttagggaccactatggaaaggaagctttgttctcaaacatctttagcagaaagagccactgcagatacctgtcaatctattcagaatttatttgggattccagctgaactgatggaaccttcccagagcctgccagagaagggtccagttactatttctcagccttctgtggtcaaaaactatattcagagacatactttttatcatggtcataagaaaagaatggccttaaggatatggacacgtggctccacatcttccataatacagcaatactctgggactagagtgagaataaagaagacaaactcaacgttcaatggtatatcccaagaagtcattcaacatatgcctgtctcatgtgcagggggccagcttcctgtcctggtaaagtcagagtcttccctcagcatattttacgatagagaagatcttgttccaatggaagaaagtgaggactcacagagtgattcccagacaaggatttctgagtcccaacactccctcaagccaaattatctttcccaggccaagactgacttctcagaacagttccagttgctagaagatctgcagctaaaaatagcagcaaaactcttaaggagtcaaataccccccgatgtgcctccacctctagcttcaggtctagtcctaaaataccctatctgcctacagtgtggccgatgttcaggacttaattgccatcataaattacagaccacttcggggccttatcttcttatctatccacagctccaccttgtacgcactcctgaaggccatggtgaggttcggttgcatcttggctttaggctgagaattgggaaaagatcccaaatctcaaagtatcgtgaaagagatagacccgtcatacggagaagccctatatcaccatcacaaaggaaagctaaaatctatactcaagcttccaagagtcctacttccacaatagatttgcagtctgggccttcccagtcccctgctcctgtacaagtctacatcaggcgaggacaacgcagcaggcctgacttagtagaaaagacaaaaactagagcacctgggcactatgaattcactcaagttcacaacctaccagagagtgactctgaaagcactcagaatgaaaaacgggctaaagtgagaaccaaaaagacctctgattcaaaatatccaatgaagagaatcaccaagcgacttagaaaacacagaaagttctacacaaacagtagaaccacaatagagagtccttctagggaattagcagcccatttaagaaggaagaggattggagcaactcagacaagtactgcctctttaaaaagacaacctaagaaaccttcccaacccaagttcatgcaactgctttttcagagcctaaagcgggcattccaaacagcacacagagttatagcttctgttgggcggaagcctgtggacgggacaaggccagacaatttgtgggcaagcaaaaactattatccaaaacaaaatgccagggactattgcttaccaagcagtatcaaaagagacaagaggtcagctgacaagctaacgccagcaggctcaaccattaagcaggaggacatattgtggggaggaacggtccagtgcagatcagctcaacagccaagaagagcttactctttccaacccagacctcttcgactgcccaagcccacagattcccaaagtggtattgctttccaaactgcctcagtggggcagcctctgagaactgttcaaaaggacagtagtagcagatcaaagaaaaacttctatagaaatgaaacctccagccaggagtctaagaacttgtccacaccaggaaccagagttcaggcccgaggaagaatcctacctggttcccctgtgaagagaacctggcaccgacatcttaaagacaaactcacacacaaggagcataaccaccccagcttctatagggagagaaccccacgcggtccttctgagagaacccgtcataacccctcttggagaaaccatcgcagtccctctgagagaagccaacgcagttccttggagagaagacatcacagtccctctcagaggagccactgcagtccctctaggaaaaaccattccagtccttctgagagaagctggcgcagtccgtctcagagaaatcactgcagtccccccgagaggagctgtcacagtctctctgaaaggggccttcacagtccctctcagaggagccatcgcggtccctctcagagaagacatcacagtccctcagagagaagccatcgcagtccctcagagagaagccatcgcagttcctctgagagaagacatcgcagtccctcccagaggagccatcgcggtccctcagagagaagccattgcagtccctctgagagaagacatcgcagtccctctcagaggagccatcgtggtccctctgagagaagacatcacagtccctctaagagaagccatcgcagtcccgctcggaggagccatcgcagtccctcagagagaagccatcacagtccctctgagagaagccatcacagtccctctgagagaagacatcacagtccctctgagagaagccattgcagtccctctgagagaagccattgcagtccctctgagagaagacatcgcagtccctctgagagaagacatcacagtccctcagagaaaagccatcacagtccctctgagagaagccatcacagtccctctgagagaagacgtcacagtcccttggagaggagccgtcacagtctcttggagaggagccatcgcagtccctctgagaggagatctcacaggtcctttgagaggagccatcgtaggatttctgagagaagtcacagtccctcagagaagagccacctcagtcccttggaaagaagccgttgcagtccctctgagaggagaggacacagttcctctgggaaaacctgtcacagtccctctgagagaagccatcgcagtccctccgggatgaggcaagggaggacctctgagaggagccatcgcagttcctgtgagagaacccgtcacagtccctctgagatgaggccagggaggccctctgggaggaaccattgcagtccctctgagaggagccgacgcagtccccttaaggagggactcaagtacagtttccctggagagaggcccagccatagtttgtctagagatttcaagaatcaaacaactctcctcgggaccacacataaaaatcccaaagcagggcaagtgtggaggcctgaagctactcgatgaggcgaggtccgcccctattattcattgtcctaagtcttcatcgtgctgccctttccaggcttctttcctgctcagccactgcctccaattcctgcgcccccagcgtggaaaggcttccatttctctctaccgggggggaggcgggtgagaatgggtctgtaatttctctaagatgaataaaggggcagtaaat

SEQ ID NO: 118750 - DNA, 789 bp, Homo sapiens
  Payload ID: 3248
  Gene Symbol: C2orf40
  Gene Name: chromosome 2 open reading frame 40
  Uniprot ID: Q9H1Z8
  ENST ID: ENST00000238044
  CDS Start-End: 110-556
gggataacccgcggccgcgcctgcccgctcgcacccctctcccgcgcccggttctccctcgcagcacctcgaagtgcgcccctcgccctcctgctcgcgccccgccgccatggctgcctcccccgcgcggcctgctgtcctggccctgaccgggctggcgctgctcctgctcctgtgctggggcccaggtggcataagtggaaataaactcaagctgatgcttcaaaaacgagaagcacctgttccaactaagactaaagtggccgttgatgagaataaagccaaagaattccttggcagcctgaagcgccagaagcggcagctgtgggaccggactcggcccgaggtgcagcagtggtaccagcagtttctctacatgggctttgacgaagcgaaatttgaagatgacatcacctattggcttaacagagatcgaaatggacatgaatactatggcgattactaccaacgtcactatgatgaagactctgcaattggtccccggagcccctacggctttaggcatggagccagcgtcaactacgatgactactaaccatgacttgccacacgctgtacaagaagcaaatagcgattctcttcatgtatctcctaatgccttacactacttggtttctgatttgctctatttcagcagatcttttctacctactttgtgtgatcaaaaaagaagagttaaaacaacacatgtaaatgccttttgatatttcatgggaatgcctctcatttaaaaatagaaataaagcattttgttaaaaagaaaagtct

SEQ ID NO: 118751 - DNA, 799 bp, Homo sapiens
  Payload ID: 3248
  Gene Symbol: C2orf40
  Gene Name: chromosome 2 open reading frame 40
  ENST ID: ENST00000409944
  CDS Start-End: 232-570
aatctgctggggccttagtcttgaatttccagcctccataactgtgcaaaatccatttctgttgcttataagctacccagcttatgggattttgtttagcagcccaaatggactaagacactcaatgttagaagacttctttctccttcctgctggagaaattcaactgcattgcatggagagctaattatatggagagacagtggcataagtggaaataaactcaagctgatgcttcaaaaacgagaagcacctgttccaactaagactaaagtggccgttgatgagaataaagccaaagaattccttggcagcctgaagcgccagaagcggcagctgtgggaccggactcggcccgaggtgcagcagtggtaccagcagtttctctacatgggctttgacgaagcgaaatttgaagatgacatcacctattggcttaacagagatcgaaatggacatgaatactatggcgattactaccaacgtcactatgatgaagactctgcaattggtccccggagcccctacggctttaggcatggagccagcgtcaactacgatgactactaaccatgacttgccacacgctgtacaagaagcaaatagcgattctcttcatgtatctcctaatgccttacactacttggtttctgatttgctctatttcagcagatcttttctacctactttgtgtgatcaaaaaagaagagttaaaacaacacatgtaaatgccttttgatatttcatgggaatgcctctcatttaaaaatagaaataaagcattttgttaaaaagaaaa

SEQ ID NO: 118752 - DNA, 602 bp, Homo sapiens
  Payload ID: 3248
  Gene Symbol: C2orf40
  Gene Name: chromosome 2 open reading frame 40
  ENST ID: ENST00000437659
  CDS Start-End: 176-602
cctgaccgggctggcgctgctcctgctcctgtgctggggcccagaccccctggagcctgtccatggaaggagaggctaagaaccctgctgagaaagtggtcaccattacctccatcctggggcctgactccagttccttacacccgaagttgctctactcactacttacgatgtcatgcaacagttaagggtcagaggctcctataggtctgcaagccagttcgctgggtggaggcgtgtgttctatcaggccagacaaggtggcataagtggaaataaactcaagctgatgcttcaaaaacgagaagcacctgttccaactaagactaaagtggccgttgatgagaataaagccaaagaattccttggcagcctgaagcgccagaagcggcagctgtgggaccggactcggcccgaggtgcagcagtggtaccagcagtttctctacatgggctttgacgaagcgaaatttgaagatgacatcacctattggcttaacagagatcgaaatggacatgaatactatggcgattactaccaacgtcactatgatgaagactctgcaattggtccccggagcccctacggctttaggcatggag

SEQ ID NO: 118753 - DNA, 2581 bp, Homo sapiens
  Payload ID: 3249
  Gene Symbol: C2orf42
  Gene Name: chromosome 2 open reading frame 42
  Uniprot ID: Q9NWW7
  ENST ID: ENST00000264434
  CDS Start-End: 381-2105
acttgccgcgcgtgggcggctctgaccaataacgattgtcgttacagcgaacagtttggccccgtttgtaaaaggccgcggcaggcgaagagagaagagactatcaagatctccacttagggaagtgggaatcttatttgcggaacattgggcagaagctttgccattggctggtggagaaggaggaggcagaatgtctgcattgttacaccatacagctcaaacttcagaagattttgggttaagcagttatcattagtctgcaaatgatcgtgttttcacctgatcattagaaactaatgaaacaccttttaagtcttatgaattcaggttacactgttttccagatgccttggcagctggtacagggcctctgaaaaatggaaccaaattctctgaggactaaagtcccagctttcttatctgatttggggaaggccacattgaggggaatcagaaagtgtccccgatgtggcacatacaatggaacccggggactgagctgtaagaacaagacatgtggaaccatattccgctacggtgcacgcaagcagcctagtgttgaagctgtcaaaatcattacaggctctgatcttcaggtctactcagtgcggcaaagagaccggggccctgattaccgatgctttgtggagctcggggtttcagagacaacaatccagacagtggatgggacgatcatcactcagctgagctctggacggtgttatgtcccctcatgcctgaaagctgccactcaaggcgttgtggaaaaccagtgccagcacatcaagctggcggtgaactgccaggcagaggccacccctctgaccctgaagagctcggtcctgaatgcaatgcaggcctccccggaaaccaaacagaccatctggcagttggccacggaacccacaggtcctctggtgcagagaattactaaaaacatcttggtggtgaaatgcaaggcaagccagaagcacagtttggggtatttgcatacatcttttgtgcagaaagtcagtggcaaaagcttgcctgagcgccgcttcttctgctcctgtcagactctgaaatcgcacaagtcaaatgcctccaaggatgagacagcccagagatgcattcatttctttgcttgcatctgtgcctttgccagtgatgagacactggctcaggaattctcagacttcctaaattttgattccagcggtcttaaagagattattgtaccccagttaggttgccattcagaatcaacagtatctgcttgtgagtctactgcctctaagtcaaagaagaggagaaaggatgaagtatctggtgcacagatgaacagttcactactgcctcaagatgcagtgagcagtaatctaaggaaaagtggcctgaaaaagcctgtggttgcttcctcgttaaaaaggcaggcctgtggtcagctgttagatgaggcacaagtgactttatccttccaagactggctggccagtgtcacagaacgcatccatcaaaccatgcactatcagtttgatggcaaaccagaaccattggtgttccacattcctcagtcattttttgatgccctgcaacaaagaatatctataggaagtgcaaaaaaacggctccccaactccaccacagcttttgttcggaaagatgccttgccactgggaaccttttccaagtatacttggcatatcactaatatcctgcaagttaaacaaatcttagataccccagagatgcccttggaaatcacccgtagctttatccagaaccgagatgggacttatgagctatttaaatgccctaaagtggaagtagaaagcatagcagaaacctacggtcgtatagaaaaacaaccagtgctgcgacccttggaactaaaaacttttctcaaagttggcaacacttccccagatcaaaaggagccaacacctttcatcatcgagtggatcccagatatccttccccaatctaagattggcgagctgcggatcaagtttgagtatggccaccaccggaatgggcatgtggcggagtaccaagaccagcggccccccttggaccagcccttggaactggcccctctgaccactattactttcccttaaagcaaaacaagataataatcttttgctgcttaatttgcacatccccaccccttgacaactttaaatgctagttaggcacttagatggccctgttccttggtaaactgctcttagctaagatgcaaattctcagtgctttcaagtggattctgttgaagaaaatctcttgtaaatagcctttttgatgctgctgtgtacagtcttcattatgcattgggcagtatttctggctagagttttaaaaggaacagaaagaaaaccagcttattttccttcttacggactcatctttagcgtttatttcaaccttttgctaattctctgagaaatctgcagcactcagccatacaccaacagtgttggaaagttaacaccctggttagggcagaatgttaaagaccatcttggcagagttccagccacgctctttattctgttctcaaataaagcagtgtcactagtttttcctaattata

SEQ ID NO: 118754 - DNA, 578 bp, Homo sapiens
  Payload ID: 3249
  Gene Symbol: C2orf42
  Gene Name: chromosome 2 open reading frame 42
  ENST ID: ENST00000425268
  CDS Start-End: 402-578
agcaaggaccggggcggcggtggggcaggggtgtagagctcgggttcccagcggaaagcatgtccaaggagcggctgccggcgaggtgatgcttctgcctgggcctacttgggaccggaaactatcaagatctccacttagggaagtgggaatcttatttgcggaacattgggcagaagctttgccattggctggtggagaaggaggaggcagaatgtctgcattgttacaccatacagctcaaacttcagaagattttgggttaagcagttatcattagtctgcaaatgatcgtgttttcacctgatcattagaaactaatgaaacaccttttaagtcttatgaattcaggttacactgttttccagatgccttggcagctggtacagggcctctgaaaaatggaaccaaattctctgaggactaaagtcccagctttcttatctgatttggggaaggccacattgaggggaatcagaaagtgtccccgatgtggcacatacaatggaacccggggactgagctgtaagaacaagacatgtggaaccatattccgctacggtgcacgcaagcagcct

SEQ ID NO: 118755 - DNA, 536 bp, Homo sapiens
  Payload ID: 3249
  Gene Symbol: C2orf42
  Gene Name: chromosome 2 open reading frame 42
  ENST ID: ENST00000419381
  CDS Start-End: 154-536
actatcaagatctccacttagggaagtgggaatcttatttgcggaacattgggcagaagctttgccattggctggtggagaaggaggaggcagaatgtctgcattgttacaccatacagctcaaacttcagaagattttggggcctctgaaaaatggaaccaaattctctgaggactaaagtcccagctttcttatctgatttggggaaggccacattgaggggaatcagaaagtgtccccgatgtggcacatacaatggaacccggggactgagctgtaagaacaagacatgtggaaccatattccgctacggtgcacgcaagcagcctagtgttgaagctgtcaaaatcattacaggctctgatcttcaggtctactcagtgcggcaaagagaccggggccctgattaccgatgctttgtggagctcggggtttcagagacaacaatccagacagtggatgggacgatcatcactcagctgagctctggacggtgttatgtcccctcatgcctgaaagctgccactcaaggcgt

SEQ ID NO: 118756 - DNA, 1133 bp, Homo sapiens
  Payload ID: 3249
  Gene Symbol: C2orf42
  Gene Name: chromosome 2 open reading frame 42
  ENST ID: ENST00000457952
  CDS Start-End: 798-1133
ggccgggaggtgagcgtcccggagtcgggcggccgctccgttgactgcagggccccggcggtcttcctccgctgttccgaggccgttgagggctgatgtgctccatcctcccacttgtggtttggcaagccatccagccgactacaaacccacgtttgtgagttacctgctggctgtgacgcttccgtcaaatctgagtaacagtttcctcatctctaagatgggtaacatagtatctacctcacaggatcgtgtgggcagtacatgcatagaaaggatttaacacgcagtgtactcagctagttttattatttatccgtaatgatcatttgttcttttcccctaactgtgcctcacaagcatgaaacagaatccaccaaacatttaggtctgggtagtggttggatggaaacccatcgcgggttaacgcttccaacaccagtcccttgacactctcccgccgaggaggctgatttgtaaacttgctgagaagagaatacccagcagatctttcagactatcaagatctccacttagggaagtgggaatcttatttgcggaacattgggcagaagctttgccattggctggtggagaaggaggaggcagaatgtctgcattgttacaccatacagctcaaacttcagaagattttgggttaagcagttatcattagtctgcaaatgatcgtgttttcacctgatcattagaaactaatgaaacaccttttaagtcttatgaattcaggttacactgttttccagatgccttggcagctggtacagggcctctgaaaaatggaaccaaattctctgaggactaaagtcccagctttcttatctgatttggggaaggccacattgaggggaatcagaaagtgtccccgatgtggcacatacaatggaacccggggactgagctgtaagaacaagacatgtggaaccatattccgctacggtgcacgcaagcagcctagtgttgaagctgtcaaaatcattacaggctctgatcttcaggtctactcagtgcggcaaagagaccggggccctgattaccgatgctttgtggagctcggggtttcagagacaacaatccagacagtggatgggacgatcatcactcagctgagctct

SEQ ID NO: 118757 - DNA, 548 bp, Homo sapiens
  Payload ID: 3249
  Gene Symbol: C2orf42
  Gene Name: chromosome 2 open reading frame 42
  ENST ID: ENST00000428010
  CDS Start-End: 369-548
gtaaaaggccgcggcaggcgaagagagaagaggtgagggcggtcgtcagctaagggccccggggctcgcggggggtgcgcagggcagactatcaagatctccacttagggaagtgggaatcttatttgcggaacattgggcagaagctttgccattggctggtggagaaggaggaggcagaatgtctgcattgttacaccatacagctcaaacttcagaagattttgggttaagcagttatcattagtctgcaaatgatcgtgttttcacctgatcattagaaactaatgaaacaccttttaagtcttatgaattcaggttacactgttttccagatgccttggcagctggtacagggcctctgaaaaatggaaccaaattctctgaggactaaagtcccagctttcttatctgatttggggaaggccacattgaggggaatcagaaagtgtccccgatgtggcacatacaatggaacccggggactgagctgtaagaacaagacatgtggaaccatattccgctacggtgcacgcaagcagcctagt

SEQ ID NO: 118758 - DNA, 563 bp, Homo sapiens
  Payload ID: 3249
  Gene Symbol: C2orf42
  Gene Name: chromosome 2 open reading frame 42
  ENST ID: ENST00000447804
  CDS Start-End: 58-563
tttggccccgtttgtaaaaggccgcggcaggcgaagagagaagagggcctctgaaaaatggaaccaaattctctgaggactaaagtcccagctttcttatctgatttggggaaggccacattgaggggaatcagaaagtgtccccgatgtggcacatacaatggaacccggggactgagctgtaagaacaagacatgtggaaccatattccgctacggtgcacgcaagcagcctagtgttgaagctgtcaaaatcattacaggctctgatcttcaggtctactcagtgcggcaaagagaccggggccctgattaccgatgctttgtggagctcggggtttcagagacaacaatccagacagtggatgggacgatcatcactcagctgagctctggacggtgttatgtcccctcatgcctgaaagctgccactcaaggcgttgtggaaaaccagtgccagcacatcaagctggcggtgaactgccaggcagaggccacccctctgaccctgaagagctcggtcctgaatgcaatgcaggcctccccggaaaccaaacagaccat

SEQ ID NO: 118759 - DNA, 551 bp, Homo sapiens
  Payload ID: 3249
  Gene Symbol: C2orf42
  Gene Name: chromosome 2 open reading frame 42
  ENST ID: ENST00000417203
  CDS Start-End: 485-551
aaaaggccgcggcaggcgaagagagaagagacccatcccggaagccggccgggaggtgagcgtcccggagtcgggcggccgctccgttgactgcagggccccggcggtcttcctccgctgttccgaggccgttgagggctgatgtgctccatcctcccacttgtggtttggcaagccatccagccgactacaaacccacgtttactatcaagatctccacttagggaagtgggaatcttatttgcggaacattgggcagaagctttgccattggctggtggagaaggaggaggcagaatgtctgcattgttacaccatacagctcaaacttcagaagattttgggttaagcagttatcattagtctgcaaatgatcgtgttttcacctgatcattagaaactaatgaaacaccttttaagtcttatgaattcaggttacactgttttccagatgccttggcagctggtacagggcctctgaaaaatggaaccaaattctctgaggactaaagtcccagctttcttatctgatttggggaaggccacattga

SEQ ID NO: 118760 - DNA, 2193 bp, Homo sapiens
  Payload ID: 3249
  Gene Symbol: C2orf42
  Gene Name: chromosome 2 open reading frame 42
  Uniprot ID: Q9NWW7
  ENST ID: ENST00000420306
  CDS Start-End: 11-1735
cctctgaaaaatggaaccaaattctctgaggactaaagtcccagctttcttatctgatttggggaaggccacattgaggggaatcagaaagtgtccccgatgtggcacatacaatggaacccggggactgagctgtaagaacaagacatgtggaaccatattccgctacggtgcacgcaagcagcctagtgttgaagctgtcaaaatcattacaggctctgatcttcaggtctactcagtgcggcaaagagaccggggccctgattaccgatgctttgtggagctcggggtttcagagacaacaatccagacagtggatgggacgatcatcactcagctgagctctggacggtgttatgtcccctcatgcctgaaagctgccactcaaggcgttgtggaaaaccagtgccagcacatcaagctggcggtgaactgccaggcagaggccacccctctgaccctgaagagctcggtcctgaatgcaatgcaggcctccccggaaaccaaacagaccatctggcagttggccacggaacccacaggtcctctggtgcagagaattactaaaaacatcttggtggtgaaatgcaaggcaagccagaagcacagtttggggtatttgcatacatcttttgtgcagaaagtcagtggcaaaagcttgcctgagcgccgcttcttctgctcctgtcagactctgaaatcgcacaagtcaaatgcctccaaggatgagacagcccagagatgcattcatttctttgcttgcatctgtgcctttgccagtgatgagacactggctcaggaattctcagacttcctaaattttgattccagcggtcttaaagagattattgtaccccagttaggttgccattcagaatcaacagtatctgcttgtgagtctactgcctctaagtcaaagaagaggagaaaggatgaagtatctggtgcacagatgaacagttcactactgcctcaagatgcagtgagcagtaatctaaggaaaagtggcctgaaaaagcctgtggttgcttcctcgttaaaaaggcaggcctgtggtcagctgttagatgaggcacaagtgactttatccttccaagactggctggccagtgtcacagaacgcatccatcaaaccatgcactatcagtttgatggcaaaccagaaccattggtgttccacattcctcagtcattttttgatgccctgcaacaaagaatatctataggaagtgcaaaaaaacggctccccaactccaccacagcttttgttcggaaagatgccttgccactgggaaccttttccaagtatacttggcatatcactaatatcctgcaagttaaacaaatcttagataccccagagatgcccttggaaatcacccgtagctttatccagaaccgagatgggacttatgagctatttaaatgccctaaagtggaagtagaaagcatagcagaaacctacggtcgtatagaaaaacaaccagtgctgcgacccttggaactaaaaacttttctcaaagttggcaacacttccccagatcaaaaggagccaacacctttcatcatcgagtggatcccagatatccttccccaatctaagattggcgagctgcggatcaagtttgagtatggccaccaccggaatgggcatgtggcggagtaccaagaccagcggccccccttggaccagcccttggaactggcccctctgaccactattactttcccttaaagcaaaacaagataataatcttttgctgcttaatttgcacatccccaccccttgacaactttaaatgctagttaggcacttagatggccctgttccttggtaaactgctcttagctaagatgcaaattctcagtgctttcaagtggattctgttgaagaaaatctcttgtaaatagcctttttgatgctgctgtgtacagtcttcattatgcattgggcagtatttctggctagagttttaaaaggaacagaaagaaaaccagcttattttccttcttacggactcatctttagcgtttatttcaaccttttgctaattctctgagaaatctgcagcactcagccatacaccaacagtgttggaaagttaacaccctggttagggcagaatgttaaagaccatcttggcagagttccagccacgctctttattctgttctcaaataaagcagtgtcac

SEQ ID NO: 118761 - DNA, 662 bp, Homo sapiens
  Payload ID: 3249
  Gene Symbol: C2orf42
  Gene Name: chromosome 2 open reading frame 42
  ENST ID: ENST00000428751
  CDS Start-End: 569-662
aagaggtgagggcggtcgtcagctaagggccccggggctcgcggggggtgcgcagggcaggtaagggggtagtgctgagcaaggaccggggcggcggtggggcaggggtgtagagctcgggttcccagcggaaagcatgtccaaggagcggctgccggcgaggtgatgcttctgcctgggcctacttgggaccggaagtgagcgctcgcgcggggaggatgccgggaagcaggtcccaggggatatgtgtgtgtcgctgcagacccatcccggaagccggccgggagactatcaagatctccacttagggaagtgggaatcttatttgcggaacattgggcagaagctttgccattggctggtggagaaggaggaggcagaatgtctgcattgttacaccatacagctcaaacttcagaagattttgggttaagcagttatcattagtctgcaaatgatcgtgttttcacctgatcattagaaactaatgaaacaccttttaagtcttatgaattcaggttacactgttttccagatgccttggcagctggtacagggcctctgaaaaatggaaccaaattctctgaggactaaagtcccagctttcttatctgatttggggaaggccacattgaggggaatcagaaagtgtccccgatgtg

SEQ ID NO: 118762 - DNA, 576 bp, Homo sapiens
  Payload ID: 3249
  Gene Symbol: C2orf42
  Gene Name: chromosome 2 open reading frame 42
  ENST ID: ENST00000417865
  CDS Start-End: 100-576
gtaaaaggccgcggcaggcgaagagagaagaggtgagggcggtcgtcagctaagggccccggggctcgcggggggtgcgcagggcagggcctctgaaaaatggaaccaaattctctgaggactaaagtcccagctttcttatctgatttggggaaggccacattgaggggaatcagaaagtgtccccgatgtggcacatacaatggaacccggggactgagctgtaagaacaagacatgtggaaccatattccgctacggtgcacgcaagcagcctagtgttgaagctgtcaaaatcattacaggctctgatcttcaggtctactcagtgcggcaaagagaccggggccctgattaccgatgctttgtggagctcggggtttcagagacaacaatccagacagtggatgggacgatcatcactcagctgagctctggacggtgttatgtcccctcatgcctgaaagctgccactcaaggcgttgtggaaaaccagtgccagcacatcaagctggcggtgaactgccaggcagaggccacccctctgaccctgaagagctcggtcctgaatgcaatg

SEQ ID NO: 118763 - DNA, 3817 bp, Homo sapiens
  Payload ID: 3250
  Gene Symbol: C2orf44
  Gene Name: chromosome 2 open reading frame 44
  Uniprot ID: Q9H6R7
  ENST ID: ENST00000295148
  CDS Start-End: 59-2224
acagagagattggtgtttttgtgaggcagtgagacctaaggtaacctttatcaaaaggatggagttgggaaaaggaaaactactcaggactggactgaatgcgttgcatcaagcagtgcatccgatccatggccttgcctggaccgatgggaatcaagttgtcctaactgatttgcggcttcacagtggagaggtcaagtttggggactccaaagtcattggacagtttgaatgtgtctgtgggttgtcctgggccccacctgttgcagatgatacacctgttctactcgctgtccagcatgagaagcatgtcactgtgtggcagctgtgtcccagccctatggagtcaagcaaatggctgacgtctcagacttgtgagattagaggatcactacctatccttccccagggctgtgtgtggcacccaaaatgtgctattctgactgtgttgactgctcaggatgtctccattttccctaatgttcactctgatgattcccaggtaaaggcagacatcaacacccagggccgcattcactgtgcatgttggacccaggatggcctgaggctggtggtggcagtaggcagcagcctgcattcttatatttgggacagcgctcagaagactcttcacaggtgctcctcctgcctggtgtttgatgtggacagccacgtctgctccatcacagcaactgtggactcacaggttgctatagctactgagcttccattggataagatctgtggcttaaatgcatctgaaacctttaatatcccacctaacagtaaagacatgactccgtatgctttaccagttattggtgaagtacgctctatggataaagaggcaactgattctgaaacaaattctgaagtatcagtttcttcttcctatttagaacctctggatctaactcacatacatttcaatcaacataagtctgagggtaattctcttatttgtctaagaaaaaaggactacttgacaggaactggccaagattcttcacatttggtccttgtgacctttaagaaggcagttaccatgacgagaaaagtcactattccaggcattctggttcctgatctgatagcatttaatcttaaagcccacgtagtggcagtggcttccaacacttgtaatataattttgatctactctgtcattccatcttcagtcccaaacatccagcaaattcgattagagaacactgaaagaccaaaagggatatgtttcttgacagaccaactattactaattttggtaggaaaacaaaaactcactgatacaacatttcttccttcttcaaagtctgatcagtatgccattagcttgattgttagagaaataatgttggaagaagaaccttcaataacatcaggtgaaagccagactacctactctactttcagtgctccgttaaataaagcaaatagaaaaaagttaattgaaagtctttccccagatttttgtcaccaaaacaaagggctgttgctgacagttaataccagtagtcagaatggaaggcctggaagaacacttattaaagaaatccagagtcctctgtctagtatctgtgatggctccatagctctagatgctgagcctgttacccagccagcatcgctgcccagacacagcagcacaccagaccacaccagcacactggagcctcctcgtttgcctcaaagaaagaacttacaaagtgaaaaggaaacttatcagctgtctaaggaagtggaaattttatctaggaacctggttgaaatgcaacggtgtctttctgaacttacaaaccgtctgcataatgggaagaaatcctcttcagtgtatccactctctcaagatcttccttatgttcacatcatttaccagaaaccttattatctaggtcctgttgttgaaaaaagagcggtgcttctctgtgatggtaaactaaggctcagtacagttcagcagacttttggcctttctctcattgaaatgctacatgattcccactggattcttctctctgctgacagtgagggctttatcccgttaaccttcacagccacacaggaaataatcataagagatggcagcctgtccaggtcagatgtcttcagagactctttttctcacagtccaggtgctgtttcttctcttaaagtctttacaggccttgctgcccccagtttagataccactggctgttgtaaccatgtagatggcatggcttgatatctgcagtgtccttgctgtgtagctcttcagatgagaccattacaaacaaggcctgcttgacactggacactcgccaatgagactcccactgcactcaggcgaagcgcttgccatggtcggctctcctggtttccccctgtttcccctgagctgaggctcgctgctgtgtagcagagctcagtctttattagatggctccgaaagtggtgtttatgtattcatgactgtgtggttttgactaagggcagaattctcagaacaaaacaatattatggtgccatatggatggtgttttatggtttctctgaggctttgtgtcccttgtccaaagctgcattgaagctgtcttaggagcacttaaaagataccttggcattgttataggtctttttcttggcttcaagaggaggttgaggagtctgctggggggcatgtgctctagcatattaacctcaaaccagcaagaattagcagagctccaaggaggaccagagacccactggcttctgctctcaggaacaggaagtggctctgatgttgcctggacctcccagaatttaaaccaaaccctcttgcttccttaacaaattctggctgacgaaggtccaggtactcttaaaaactggccctgggaaaattttgaatgaaatttcaagggaatttgtcccctctgggttccacttgaggttgtgccgatgctgctaccacactgtcgagcccaggtaagtcctactgcaggattttgtgctgtggccactcatgagtgtccctgaaataactttttttttttttaaatccagttttgggatcacgcaactttcctatttttctcccagtagtcagctcccttagttaacttgtcactttaatttgatatttttattttctctccttttaagtcttagagaccagcagagaatctgtgagagaaagtatttcaggaagttagaaattcaaccgaatctgaggtagtcctaaaaagtgccattttgtttcacttatgggctaaagtaccagcttagtcaggtaagagccctgacccacttcagatggtaacaccacttctcactgccttcagatggaatcacagatttcagtcacggcgcataacaaattgatcagtgagtggctaggcatctgcagataaattgtttcagccatagaagctccattagcacatatgcttccttttccccccttcctttaaaatcatctggaaagaaactattttgtgcccttggggactcctgtctgtctgttacagtttaccaagatggagctgggttaggaaagaagtgagggcccattttgtggttcaagtgcactagacagctgctggggtaggaagcacaggcaatgtctgtaatcagctgtgggagagcagtgactgagaacagtctgaggcctggctccacttggaagtatctggggtgcgatgaaatcacaattatcttgaagcctaaagagggaactacaagactgttaactaagatcaatgtgggcacctaaaagggtatgttaaaatcaccatttctcaggtcaaaatactgtgaataagtcttcaataaaatcactaatggttattgtggc

SEQ ID NO: 118764 - DNA, 3700 bp, Homo sapiens
  Payload ID: 3250
  Gene Symbol: C2orf44
  Gene Name: chromosome 2 open reading frame 44
  Uniprot ID: Q9H6R7
  ENST ID: ENST00000406895
  CDS Start-End: 67-1935
gggcggccacagagagattggtgtttttgtgaggcagtgagacctaaggtaacctttatcaaaaggatggagttgggaaaaggaaaactactcaggactggactgaatgcgttgcatcaagcagtgcatccgatccatggccttgcctggaccgatgggaatcaagttgtcctaactgatttgcggcttcacagtggagaggtcaagtttggggactccaaagtcattggacagtttgaatgtgtctgtgggttgtcctgggccccacctgttgcagatgatacacctgttctactcgctgtccagcatgagaagcatgtcactgtgtggcagctgtgtcccagccctatggagtcaagcaaatggctgacgtctcagacttgtgagattagaggatcactacctatccttccccagggctgtgtgtggcacccaaaatgtgctattctgactgtgttgactgctcaggatgtctccattttccctaatgttcactctgatgattcccaggtaaaggcagacatcaacacccagggccgcattcactgtgcatgttggacccaggatggcctgaggctggtggtggcagtaggcagcagcctgcattcttatatttgggacagcgctcagaagactcttcacaggtgctcctcctgcctggtgtttgatgtggacagccacgtctgctccatcacagcaactgtggactcacaggttgctatagctactgagcttccattggataagatctgtggcttaaatgcatctgaaacctttaatatcccacctaacagtaaagacatgactccgtatgctttaccagttattggtgaagtacgctctatggataaagaggcaactgattctgaaacaaattctgaagtatcagtttcttcttcctatttagaacctctggatctaactcacatacatttcaatcaacataagtctgagggtaattctcttatttgtctaagaaaaaaggactacttgacaggaactggccaagattcttcacatttggtccttgtgacctttaagaaggcagttaccatgacgagaaaagtcactattccaggcattctggttcctgatctgatagcatttaatcttaaagcccacgtagtggcagtggcttccaacacttgtaatataattttgatctactctgtcattccatcttcagtcccaaacatccagcaaattcgattagagaacactgaaagaccaaaagggatatgtttcttgacagaccaactattactaattttggtaggaaaacaaaaactcactgatacaacatttcttccttcttcaaagtctgatcagtatgccattagcttgattgttagagaaataatgttggaagaagaaccttcaataacatcaggtgaaagccagactacctactctactttcagtgctccgttaaataaagcaaatagaaaaaagttaattgaaagtctttccccagatttttgtcaccaaaacaaagggctgttgctgacagttaataccagtagtcagaatggaaggcctggaagaacacttattaaagaaatccagagtcctctgtctagtatctgtgatggctccatagctctagatgctgagcctgttacccagccagcatcgctgcccagacacagcagcacaccagaccacaccagcacactggagcctcctcgtttgcctcaaagaaagaacttacaaagtgaaaaggaaacttatcagctgtctaaggaagtggaaattttatctaggaacctggttgaaatgcaacggtgtctttctgaacttacaaaccgtctgcataatgggaagaaatcctcttcagtgtatccactctctcaagatcttccttatgttcacatcatttaccagattcccactggattcttctctctgctgacagtgagggctttatcccgttaaccttcacagccacacaggaaataatcataagagatggcagcctgtccaggtcagatgtcttcagagactctttttctcacagtccaggtgctgtttcttctcttaaagtctttacaggccttgctgcccccagtttagataccactggctgttgtaaccatgtagatggcatggcttgatatctgcagtgtccttgctgtgtagctcttcagatgagaccattacaaacaaggcctgcttgacactggacactcgccaatgagactcccactgcactcaggcgaagcgcttgccatggtcggctctcctggtttccccctgtttcccctgagctgaggctcgctgctgtgtagcagagctcagtctttattagatggctccgaaagtggtgtttatgtattcatgactgtgtggttttgactaagggcagaattctcagaacaaaacaatattatggtgccatatggatggtgttttatggtttctctgaggctttgtgtcccttgtccaaagctgcattgaagctgtcttaggagcacttaaaagataccttggcattgttataggtctttttcttggcttcaagaggaggttgaggagtctgctggggggcatgtgctctagcatattaacctcaaaccagcaagaattagcagagctccaaggaggaccagagacccactggcttctgctctcaggaacaggaagtggctctgatgttgcctggacctcccagaatttaaaccaaaccctcttgcttccttaacaaattctggctgacgaaggtccaggtactcttaaaaactggccctgggaaaattttgaatgaaatttcaagggaatttgtcccctctgggttccacttgaggttgtgccgatgctgctaccacactgtcgagcccaggtaagtcctactgcaggattttgtgctgtggccactcatgagtgtccctgaaataactttttttttttttaaatccagttttgggatcacgcaactttcctatttttctcccagtagtcagctcccttagttaacttgtcactttaatttgatatttttattttctctccttttaagtcttagagaccagcagagaatctgtgagagaaagtatttcaggaagttagaaattcaaccgaatctgaggtagtcctaaaaagtgccattttgtttcacttatgggctaaagtaccagcttagtcaggtaagagccctgacccacttcagatggtaacaccacttctcactgccttcagatggaatcacagatttcagtcacggcgcataacaaattgatcagtgagtggctaggcatctgcagataaattgtttcagccatagaagctccattagcacatatgcttccttttccccccttcctttaaaatcatctggaaagaaactattttgtgcccttggggactcctgtctgtctgttacagtttaccaagatggagctgggttaggaaagaagtgagggcccattttgtggttcaagtgcactagacagctgctggggtaggaagcacaggcaatgtctgtaatcagctgtgggagagcagtgactgagaacagtctgaggcctggctccacttggaagtatctggggtgcgatgaaatcacaattatcttgaagcctaaagagggaactacaagactgttaactaagatcaatgtgggcacctaaaagggtatgttaaaatcaccatttctcaggtcaaaatactgtgaataagtcttcaataaaatcactaatggtta

SEQ ID NO: 118765 - DNA, 562 bp, Homo sapiens
  Payload ID: 3250
  Gene Symbol: C2orf44
  Gene Name: chromosome 2 open reading frame 44
  ENST ID: ENST00000443232
  CDS Start-End: 41-562
aacccactgaccagggagcgtggtaacctttatcaaaaggatggagttgggaaaaggaaaactactcaggactggactgaatgcgttgcatcaagcagtgcatccgatccatggccttgcctggaccgatgggaatcaagttgtcctaactgatttgcggcttcacagtggagaggtcaagtttggggactccaaagtcattggacagtttgaatgtgtctgtgggttgtcctgggccccacctgttgcagatgatacacctgttctactcgctgtccagcatgagaagcatgtcactgtgtggcagctgtgtcccagccctatggagtcaagcaaatggctgacgtctcagacttgtgagattagaggatcactacctatccttccccagggctgtgtgtggcacccaaaatgtgctattctgactgtgttgactgctcaggatgtctccattttccctaatgttcactctgatgattcccaggtaaaggcagacatcaacacccagggccgcattcactgtgcatgttggacccaggatggcctgaggctggtggtggca

SEQ ID NO: 118766 - DNA, 1495 bp, Homo sapiens
  Payload ID: 3251
  Gene Symbol: C2orf47
  Gene Name: chromosome 2 open reading frame 47
  Uniprot ID: Q8WWC4
  ENST ID: ENST00000295079
  CDS Start-End: 323-1198
agttcccagctgtccgaaaggtcttcggaacttcggctctaaagcgttcctcagcgccatccgcccggaaacacgagcgacagagaaaaggtccgcgaggccggcagactccagagtggctgggtccgagcgcggggcgggttgccgaagggcctcggcctgggctgcgtgctggagagcggggacggggccgactcaccagaggctgcagcaacaggtccactttgctctccagtctctttctccgacaccgctgaggcggtttcccaccgacttcctttccatacagcaccggcaggcaccggtgtgaagggtcataaaaatggcgctggccgctcgtttgctaccccagttcctgcactctcggtcgctgccctgcggggccgtccgactccggactcctgctgtggccgaggtgaggctgccgtcggccacactttgctacttctgccgctgtcgcctcggcttgggagcggcgttatttccacgaagcgctagggccttggcagcctcggcgctacctgcccagggctcccggtggccagtgctcagcagcccgggactccccgcagccttcgcttctttccctgcctgccctcagcgcagctacagcacggaggagaagccccagcagcaccagaaaaccaagatgatcgtcctgggattctccaaccccatcaactgggttaggactcgaattaaggccttccttatctgggcctatttcgacaaagagttcagcatcacagagttctccgagggagcgaagcaggcttttgctcatgtatccaagttgctgtcacagtgtaaatttgatctgttggaagaacttgtggccaaagaggtgctacatgcattgaaagaaaaggttacttcactacctgacaaccataaaaatgcccttgctgctaacatagatgaaattgtatttacatcaacaggagacatctccatttactatgatgagaaaggaaggaagtttgttaacatcctgatgtgcttttggtatctaaccagtgccaacatccccagtgaaactttaagaggagccagtgtattccaggttaagttggggaatcagaatgtggaaactaaacaacttcttagtgcaagctatgagtttcagagggagttcacacaaggagtaaagcctgactggaccattgcacggattgaacactcaaaattattagaataattttcttggaaaaatcagcttatggactttagcagttgctgtgaaaaactaaggaagaaaaattttggggtcatttgatcttcacttaatctaagtctgtgaattacttttatattattttgaaatactccttgcagtatattggcatgatacagtaaaagcattttccacagattgttatcaccttctttaaaagaagtcaaaatttaaaaaatacaatagcacgttgttggtgtcatattcaataacatttccaatgctacatataattttatagacataataaagaaggtattg

SEQ ID NO: 118767 - DNA, 1386 bp, Homo sapiens
  Payload ID: 3251
  Gene Symbol: C2orf47
  Gene Name: chromosome 2 open reading frame 47
  Uniprot ID: Q8WWC4
  ENST ID: ENST00000392290
  CDS Start-End: 197-1072
cgagcgcggggcgggttgccgaagggcctcggcctgggctgcgtgctggagagcggggacggggccgactcaccagaggctgcagcaacaggtccactttgctctccagtctctttctccgacaccgctgaggcggtttcccaccgacttcctttccatacagcaccggcaggcaccggtgtgaagggtcataaaaatggcgctggccgctcgtttgctaccccagttcctgcactctcggtcgctgccctgcggggccgtccgactccggactcctgctgtggccgaggtgaggctgccgtcggccacactttgctacttctgccgctgtcgcctcggcttgggagcggcgttatttccacgaagcgctagggccttggcagcctcggcgctacctgcccagggctcccggtggccagtgctcagcagcccgggactccccgcagccttcgcttctttccctgcctgccctcagcgcagctacagcacggaggagaagccccagcagcaccagaaaaccaagatgatcgtcctgggattctccaaccccatcaactgggttaggactcgaattaaggccttccttatctgggcctatttcgacaaagagttcagcatcacagagttctccgagggagcgaagcaggcttttgctcatgtatccaagttgctgtcacagtgtaaatttgatctgttggaagaacttgtggccaaagaggtgctacatgcattgaaagaaaaggttacttcactacctgacaaccataaaaatgcccttgctgctaacatagatgaaattgtatttacatcaacaggagacatctccatttactatgatgagaaaggaaggaagtttgttaacatcctgatgtgcttttggtatctaaccagtgccaacatccccagtgaaactttaagaggagccagtgtattccaggttaagttggggaatcagaatgtggaaactaaacaacttcttagtgcaagctatgagtttcagagggagttcacacaaggagtaaagcctgactggaccattgcacggattgaacactcaaaattattagaataattttcttggaaaaatcagcttatggactttagcagttgctgtgaaaaactaaggaagaaaaattttggggtcatttgatcttcacttaatctaagtctgtgaattacttttatattattttgaaatactccttgcagtatattggcatgatacagtaaaagcattttccacagattgttatcaccttctttaaaagaagtcaaaatttaaaaaatacaatagcacgttgttggtgtcatattcaataacatttccaatgctacatataattttatagacataataaagaaggtattgaaaaaactacttacaaa

SEQ ID NO: 118768 - DNA, 737 bp, Homo sapiens
  Payload ID: 3251
  Gene Symbol: C2orf47
  Gene Name: chromosome 2 open reading frame 47
  ENST ID: ENST00000435773
  CDS Start-End: 1-677
taccccagttcctgcactctcggtcgctgccctgcggggccgtccgactccggactcctgctgtggccgaggtgaggctgccgtcggccacactttgctacttctgccgctgtcgcctcggcttgggagcggcgttatttccacgaagcgctagggccttggcagcctcggcgctacctgcccagggctcccggtggccagtgctcagcagcccgggactccccgcagccttcgcttctttccctgcctgccctcagcgcagctacagcacggaggagaagccccagcagcaccagaaaaccaagatgatcgtcctgggattctccaaccccatcaactgggttaggactcgaattaaggccttccttatctgggcctatttcgacaaagagttcagcatcacagagttctccgagggagcgaagcaggcttttgctcatgtatccaagttgctgtcacagtgtaaatttgatctgttggaagaacttgtggccaaagaggtgctacatgcattgaaagaaaaggttacttcactacctgacaaccataaaaatgcccttgctgctaacatagatgaaattgtatttacatcaacaggagacatctccatttactatgatgagaaaggtaaatatctaagtgtggaattgctggattatgagaggaagaggccatgagccaaggagagtgggtggcctctagaagatggaaaagacaaggaaatggattcttcccca

SEQ ID NO: 118769 - DNA, 4768 bp, Homo sapiens
  Payload ID: 3252
  Gene Symbol: C2orf49
  Gene Name: chromosome 2 open reading frame 49
  Uniprot ID: Q9BVC5
  ENST ID: ENST00000258457
  CDS Start-End: 230-928
gacacgccatttgtttctacgtctgacatcctcctcttttctctggtccgtgggagcttttgcaagcgggaccaggccccaacacccgaaccagcagcgagagaaggagcccggcatgcggcgactcagagtgacgacacacgcgagtctccgcccgagtacgtcacttccgcaacgcttccttcgcggggctttgtgggtagccgactggggtctcctggcgacgaccatggcgggggatgtgggcggtcgcagctgcacggactcggaactgctgctgcacccggagctgctgtcccaggagttccttctcctcactctggagcagaagaacatagctgttgaaactgatgtaagagtaaacaaagacagtcttactgacctttatgtccaacatgcaataccattgcctcagagggatttgccgaagaatagatgggggaaaatgatggaaaagaaaagagaacaacatgagattaaaaatgagactaaaaggagtagcactgtagatgggttaaggaaaagacccctcatcgtatttgatggaagttcaacaagtacaagcataaaagtgaaaaagacagagaatggagataatgatcgactgaagcctcccccgcaggcaagctttaccagtaatgcctttagaaaattatcaaattcctcttcgagtgtttcacccctaattttgtcttccaatttgcctgtgaacaataaaacggaacacaataataatgacgctaaacagaaccatgacttaacgcataggaaaagtccttcaggccctgtgaagtcgccaccattgtcccctgttggaactactccagtgaagttaaagagagctgctcctaaagaagaggcagaggccatgaataacctgaagcccccacaagcaaaaaggaagatacaacatgttacttggccctgaagaaaagtttccaaaaatgtaaatatactgtaactgtagtttttcaaatatgttcatatatattgacaatatttacagaaatcctgattattgtggaattttcttaagaggtttcaaataggtttaaaaaaataaaggatttattttccttcccttcttccctccctcccttccttttttaaaattcttgcctgtcttgccctgattaggaaagaatatctttttaaaccaatggcttagtatatgtcatttatattgaccctactgaaattattagctacaaatgtgctataaagcatccattgaattggccaggcgcagtggctcacgcctataatcccagcactttgagagactgaggtgggcagatcacctgaggtcaggagtttgagaccagcctgaccaacatggagaaaccccgtctctactaaaaaatacaaaattagctgggcatagtggtgcatgcctgtaatcccagctattcaggaggctgagacaggagaatcgcttgaacctgagaggcggaggttgcggggagccaagatcgcaccattgcactccagcctgggcaacaagagcgaaactccatctcaaaaaaaaaaaagcattcagtgaattttcggagttactctcattagccttgttcagagtctttgggggaaatttgagatttttgagattttttttaaaaactcaaatattttactagtttgcctgccattttatttcttttacaaagcagaagcatataccaatttatcacagtattttagtaaatactgcaacattcatccttaaatgttcaccaagaaaagcatctttgtagtagtgctggaaaactattcagaatatacagataaaaatgctgttctttaattgcttacattgcttcttcccataaaaagcaaaaaggaatcagtgcttgctattgctcctttccttgaagttgtaacaattgatacatatattatgagttgactggtcgattctgtacctggcccatcctttagaatgttcttgtcatgtagcagtcctacgtactcttttcatgagcagtctgtgatctcactctgtgagttcagctattactcgctcgtgggagcttaatcttttcaaaatgaagttgatttaaaaagtcttcaggcagagtaatcatgttagaggtggtattcgatggaagaaagtttagagagttaggagtgggggtagaattctagaatttataagagtccaggaagcatagcagtcaggggcaaaaattagcgtaatatggagtaggcaatagaggagctactggagtcagaagtcactgcagagtgcaacataggaagatggactcctagcttacatgagattccctgcagctgtaatatagacaattcccacatggctgttctacacagaattacctgctaagattttttgtttatttttgtttgagtggtattttcactccaattgtataatggaaatcagtgggaaaatagggtttaccttatattcatgagttctagtttctactgttctgctatgtgtttctaagcaagagcaaaggatacttcatacttttttcgttatatgattgatcttcaaattgggatttacctttttcaatatgttttaaagtagtcttattcctcttttgatttgttaaacaagcattttagttcagctattgaatagccttccaaaaaattaattcagccttgcaggtaagtaccatactaagactttaacccaatagtttttaatcattctgcctttattccaaactgtaaatctgtacacataagataaaacatactaagtattgcataaattgttaacgttacagtaaattgttatctgcagggctgacagacataatgttggtgggcaactgtgatcctatacatacatatatgcaaaaggggattttaaaagtgcagattatagagtagattgacaaattttattttatattcagttgtcctctctgcttccatctgtgttgctctcttagttgagagagagttagccatttgacgattttaagtcagtgggaacttatttttagttactcaataaaattaatattttatttgtattttaacttacagagtaggttggtaataacagctgaactgtgtaacattgttgcttcaaattgaagtttatattatgaacattcagaatcaatgctcatgtagcagcatattattgagctattttgagtttgaaatgtggagaaacgctaaaccatgtactatgtgttaacataatcccaccttcttagagctttgttccttctgaaggtgtatagatacagcttgtcttgaaatgtctttctccacataatgaagcatgctgaatgctgggaatctggagcagcagccctgggagccctgagttttgaagtgttttggtttgcttcaaaggttagaagaacttgatatgtatggcaaacaactttagaatactagttactcactaacatgaggcgggtaatgttgctctagattctatattccagtaaagccagcttttcttattattggagtaggcaaatgaatggcattagaattagtgggtggcttgtaagttgtagttataggcactttaccacttcctgccattagcaggcatccttgttttttcttttccctctttgttccttcttttccctttctccttatacattttctttctctactttaattctccttcctccttactgtagatcccaagcttctagcttaggtttgcaagtcatattgcttggccctccacattcactgagaggtgaagataggctgaccccctgtcctcttacatttgagggatcatagactgctgtgtgaattctggaaagtctcaggtccctaccagggcactgaatggcttctcaatggctgtagagacagtacagttttccaaagcagcctaattcatctggacagctaccaggcactttggaaagttggttcagttactactatgaggccataatatatttgctggtattaaaattcttcagaattggaattactatttgaaataatattttggttgacttaagttttgagagacaattctaaaattgatctagagactcattcaatagcaatgtgaccttttaaatacttacattaagtaaaactgccagtagattaaatcatatatatatatatatatatatatatatatgtaagagcttcctctatttactactgttgaacttcagtaatttttagaggctaaataatggtcagaatgtttttaagtgtgctcttttattacatgcttgtgcaggttttgtaattcagtacagaaaagtttaaccttgtacatttttgtatgtaaaaagtcttttaagtagtcttatccttatttaaataaacagaataaaattaccttgagtaggtctgttattcttattaaaatggaaaaatgctctgtaatgacttgatctgtttttatttgagtgaacaattttggaaagtattctttatagtacaactttctatacctggattgattaagatcagatgtgattcgagtagtccagccatatcttgtagcccttctttgaatgagagggtggctggagtggtctggtgctgggatatcacggtgctacagagcctgacatgttgactgtcactacatgttgagggatggaaatagaagtctctgaacttcccatgtaatattaaagctcttaacaaaatgagacaaactagagattcagttgagagattttatgttagagtgatctgaaaaaaagttaatttctaaactgctatcttaatattattatatttggagactgatgctgtaaattaaataacttggaaaaga

SEQ ID NO: 118770 - DNA, 854 bp, Homo sapiens
  Payload ID: 3252
  Gene Symbol: C2orf49
  Gene Name: chromosome 2 open reading frame 49
  ENST ID: ENST00000410049
  CDS Start-End: 57-629
aacgcttccttcgcggggctttgtgggtagccgactggggtctcctggcgacgaccatggcgggggatgtgggcggtcgcagctgcacggactcggaactgctgctgcacccggagctgctgtcccaggagttccttctcctcactctggagcagaagaacatagctgttgaaactgatgtaagagtaaacaaagacagtcttactgacctttatgtccaacatgcaataccattgcctcagagggatttgccgaagaatagatgggggaaaatgatggaaaagaaaagagaacaacatgagattaaaaatgagactaaaaggagtagcactgtagatgggttaaggaaaagacccctcatcgtatttgatggaagttcaacaagtacaagcataaaagtgaaaaagacagagaatggagataatgatcgactgaagcctcccccgcagaaccatgacttaacgcataggaaaagtccttcaggccctgtgaagtcgccaccattgtcccctgttggaactactccagtgaagttaaagagagctgctcctaaagaagaggcagaggccatgaataacctgaagcccccacaagcaaaaaggaagatacaacatgttacttggccctgaagaaaagtttccaaaaatgtaaatatactgtaactgtagtttttcaaatatgttcatatatattgacaatatttacagaaatcctgattattgtggaattttcttaagaggtttcaaataggtttaaaaaaataaaggatttattttccttcccttcttccctccctcccttccttttttaaaattcttgcctgtcttgccctgattaggaaagaatatcttttt

SEQ ID NO: 118771 - DNA, 2684 bp, Homo sapiens
  Payload ID: 3253
  Gene Symbol: C2orf50
  Gene Name: chromosome 2 open reading frame 50
  Uniprot ID: Q96LR7
  ENST ID: ENST00000381585
  CDS Start-End: 283-771
cctttcctaggagctgtccgttcccaggacaacagtcaacacagcacaggcgggagttcaaaacgaaactgggctcaaatgctctccccagcccggagagccctgtccccatcggccactctgagctcgaggcctaaagggacagtgaggaggaccctgcccaggctctcccggggttaggagggacagagtgttccaggaggaggtttgagctgagctcaggcacaggtctctctctctctctctctgacacaagcgcacacacacacacacacttgcaccatggggagccaccccacccctgggctccagagaaccacatcagctgggtaccgattgccccccaccaggccaccagcctcggtctccccagctgcccggggtggccctatggccagcaggggtcttgctggtggctgccaggccccccaggctctgaaggcgcagcgggtggctcagggagctgcctgcgatggcgtgcagcaggaccagctgtggcgggagctcctggaggccgagcggcggggccagcagcgctggattcagaactggagtttcctgaaagactatgacccaatgggcaacaagaaggagcctgagaagttgccagaccatgtgcctctcttttcggacacagttcccagttccacgaaccaggttgtgggcagcaggctggacacacccctgggacagactctcatccgcatggacttcttcttcacagaaggggcccggaagaagaagctggaggaccagatgcagcccatctaggagcaaggagggctgggctggccttccccaggtgggtgtgggtggggacaagagacccagcccacaacagcaccagtcagctccccacacaaggcagcttgggtctgcactgtctgtaagctgcaggacactcttccaggggacccaaggggtcactcttacacactttttacacgtaagattcagaggagtcagtaactggtccacggccgtacaatccccagcccttccagcttgggaactcatgggtgccccatgaaagggaccctgcattgtggtcaggagcactgaatgcctgggttcaaatccagcttgtgaccctgatgagctgtgggaccttgagctggctgctgcaacactctgtgcctccgtctcccctcctgcgattcagtgtgttcactccttgcagctgctgtgacaagtgagcacaaactgcatagcttaaaacaacacaaacgtatcatcttacagctctgaagatcacaactctgacatgggtgacatgttgcagagctgtgctcttttaggagtatctggggaagaatctatttccacattttttccagtttctcaaggcagcctgtattccttagttggcagctccttactccgtctttgaagccagcatcctagcatcttcaaatcagtctctatcgcttgctctctcctgcctcactccttcatcttttctttctttctctctctctctcttttttttttagagacagtgtcttactctgtcacctaggctagagggcagtgatgcaattataaatcattgtagccttgaactcccgggctcaagcaatcctcccacctcagcctcccaagtagctagggatacagacacatggcaacatgcctggctaattttttttttatttttattccagacagagtctcgcactgtcgcctaggctggagtgcaacagtgtgatcttggctcaccgcaacctccgcctcctaggtccaggcaattctcctgcttctgcctcctgagtagctggaattacaggcatgtgccgccatgcctggctaattttttgtatttttagtagagatggggtttctccatgttggtcaggctggtctgaaactcccaacttcaggtgatccgcctgcctcagcctcccaaagtgctgggattacaggtgtgagccactgcgcccggccatgcctggctaatttttaaaattttatgtagagatagggtctcactatgttgaccaggctggtcttgaacttttgggctcaaatgatcctcccaccttggcctcccaaagcactgggattacaggcatctggtttcacttcctccaccttttaaggacccttgtgattatatcacaacctttatatttaagcaaaaaaatgcagaaaaggcttagttcctctttgttggttaaaacacaaatggattcattctttcaaacatccgcattctcctcttcttcctgggtgctctgccaggctgtggtttcccttggtttgggtggagcatgtgacagagccatggccagtggaatgggagcaaaaaccctaggtctcccttccaggcctggtccatgagacactccaggtattggcttgttctcctttccccatcagctgaagaagggagaggacttggaggatgcagggaagagaggggcacaagatggagggagcatgtcaggaccaagcctggagccctgagtgagctcgtggagcagaatctcccgacacccacactgacacacaaacaaaataaacaaaaactggccaaaacaaaaacaatagcccacacttctagggtaaagcattttaaatttattttctcaacaacccaagagaatcaacaggcagggatttcgtattcatttaatacaggcaaaacctgagattcagagaggtgaaataaaatcccgaacata

SEQ ID NO: 118772 - DNA, 980 bp, Homo sapiens
  Payload ID: 3253
  Gene Symbol: C2orf50
  Gene Name: chromosome 2 open reading frame 50
  Uniprot ID: Q96LR7
  ENST ID: ENST00000405022
  CDS Start-End: 207-695
aaatgctctccccagcccggagagccctgtccccatcggccactctgagctcgaggcctaaagggacagtgaggaggaccctgcccaggctctcccggggttaggagggacagagtgttccaggaggaggtttgagctgagctcaggcacaggtctctctctctctctctctgacacaagcgcacacacacacacacacttgcaccatggggagccaccccacccctgggctccagagaaccacatcagctgggtaccgattgccccccaccaggccaccagcctcggtctccccagctgcccggggtggccctatggccagcaggggtcttgctggtggctgccaggccccccaggctctgaaggcgcagcgggtggctcagggagctgcctgcgatggcgtgcagcaggaccagctgtggcgggagctcctggaggccgagcggcggggccagcagcgctggattcagaactggagtttcctgaaagactatgacccaatgggcaacaagaaggagcctgagaagttgccagaccatgtgcctctcttttcggacacagttcccagttccacgaaccaggttgtgggcagcaggctggacacacccctgggacagactctcatccgcatggacttcttcttcacagaaggggcccggaagaagaagctggaggaccagatgcagcccatctaggagcaaggagggctgggctggccttccccaggagttacacaggacaggacacgttatttccatgcaacagcccctgtgtttcatgccataccctggccctgagcgactgtgtgatggagcagaccaggcccagtgtgacttggccaggaagaggcccaacccttcctacttggatctggaggccaccgccttctttctcagtgtctgacatggaagctgggctccctctccactctgagatcatcagctgggtaaaggtcagtggccaggacagccaggggtcct

SEQ ID NO: 118773 - DNA, 2017 bp, Homo sapiens
  Payload ID: 3254
  Gene Symbol: C2orf54
  Gene Name: chromosome 2 open reading frame 54
  Uniprot ID: Q08AI8
  ENST ID: ENST00000307486
  CDS Start-End: 100-996
atcactggtgctgcaagtcgctgagctgacagttgtgccgaggactgtcaccattgggcaggcatggtggccagctcctcacttggctgaggtccagggatggacacaggtgtctggggttggggagctgcagcctgcaggtgggggccagcagagagggctgcaggttcgctgaacgcggccagcctgagggaggagcagctccacctgtccttgctggtgtccagcggctggagaacaatcagcttccacgtggtgcccgtggtgagaaggaagcttggggcgcctgccctggagggggtgcagcagatgcccggattccctgagggcagcttgagaaggatcctcagccaaggggtggacctggtgccggccagcgcccagctctggaggacctccactgactacctgctcacgaggctgctgggggagctgggctccctgcagggtcatcgcctggacagcctctccatcctcgaccgggtcaaccacgagagctggcgtgacagtggccagactgacggcctgacctttggccacctgaagatggtgctgctgtgggcctctgtgctcttcctggcgcccgaggactgggcagaactgcagggcgccgtgtaccgcctgctggtggtgctgctctgttgcctggccacgcggaagctgccccacttcctccacccgcagcgcaacctgctgcagggcagcggcctggaccttggtgccatctaccagcgcgtggagggcttcgccagccagcccgaggcggccctgcgcatccacgccacccacctgggccgcagccccccgccgcgcatcggctccgggctcaaggcgctcctgcagctgccagccagtgaccccacttactgggccactgcctacttcgacgtcctgctggacaagttccaggtcttcaacatccaggataaggaccggatctctgccatgcagagcatcttccagaagaccaggactctgggaggcgaggagagctgagctgggccacctggtctcagccacctgttcttggctccccaacagactctgcactgcaccatgggaggctcctgggatgtttggaagaagaaacgggcttctccttgagggggtagtggagggattttgtccccagcagtggcctctgagagtctttcagtgcctggtggggcagggcaggcctcttggagcacctcctccctgggtcagggcctggatgcaggtgccaagctctccatgtggtgcatgttgacccagccacgtggtgttgtcaagcaaacagcatcggcaggagacctggagctgaggacttggccctgcctgcactgtatgccattccttggtgacgaaatgctgtatatttggttttgaaaaaatgaatgtgctgggtatacacagcagaaagggtactgtccactttttgtatatcagtgtggaaaatatttcccctagaagtagaaaaggctcatgtgctgatggataattttgagtcttctccattctctgtgaatgacccccttccccaggcatccccacctcctacctcgttcttagagcaaactaaagccaactgagggtgcacacacagccatgagcccacctgcccaggactactcccatctgcttcttcccgtccccgtggaagtggcccctgatatggattgtatctgtatccccacccaaatctcaggtagaattggatctgtgtccccacccaagtctcaggtagacttgtaatccccagtgttggaggaggggcccagtgggaggtgattggatcatgggggtggatttctcccttactgttctcatgatagtgagtgagttctcatgagatctggttttttgagtgtgtggcccctccccctctccttttgctctcttcctctttctccggccatgtaagatatgcctccttctccttcaccttccaccatgattgtcagtttcctgaggcctcccagccatgcttcctgtatagcctgcgggactgtgagtcaattaaacctctttattcatt

SEQ ID NO: 118774 - DNA, 1911 bp, Homo sapiens
  Payload ID: 3254
  Gene Symbol: C2orf54
  Gene Name: chromosome 2 open reading frame 54
  Uniprot ID: Q08AI8
  ENST ID: ENST00000388934
  CDS Start-End: 160-1503
actgtgctgtcactctggaattctgctgtgtgggagctgaggccccacctgcagacctgctgctcacctgggcaggtgcctcctcacagcccatctgcacagctggcctgcggagtcctcctcaggggccactggccctcacctgccactgttgaagggatgcctgcccctgctctccccacctcagccatggccgtgcaggtgcccctgtggcaccactacctgcaggccatccggtcccgggaggcgccgcgtgcccaggacttccagcgcgcagagaacgtgctgctcacggtgctggagcgcgtgcatgccctggacccccgcttcatcgtggactactcccgtggcctggaggccttccagttcgccctgcgctcctctgaggacccaatggacatggaggtgcccctgtgggtggatgccgaggctctactgattgaggaaccagaggccacccagccggaggatggccttgaattatgccacctgggtgtgcccagggaaggggctggcctggagcggtggaccaccgaggataccttcactgcctcctcggagggtgacgccaagtgccgtggacacattgtgcccagcaaggtcctgtgtgtcctcaaggacctgctggtagcagccatcgtacactgcaagcaccacagtctcatcgcaccaggttcgctgaacgcggccagcctgagggaggagcagctccacctgtccttgctggtgtccagcggctggagaacaatcagcttccacgtggtgcccgtggtgagaaggaagcttggggcgcctgccctggagggggtgcagcagatgcccggattccctgagggcagcttgagaaggatcctcagccaaggggtggacctggtgccggccagcgcccagctctggaggacctccactgactacctgctcacgaggctgctgggggagctgggctccctgcagggtcatcgcctggacagcctctccatcctcgaccgggtcaaccacgagagctggcgtgacagtggccagactgacggcctgacctttggccacctgaagatggtgctgctgtgggcctctgtgctcttcctggcgcccgaggactgggcagaactgcagggcgccgtgtaccgcctgctggtggtgctgctctgttgcctggccacgcggaagctgccccacttcctccacccgcagcgcaacctgctgcagggcagcggcctggaccttggtgccatctaccagcgcgtggagggcttcgccagccagcccgaggcggccctgcgcatccacgccacccacctgggccgcagccccccgccgcgcatcggctccgggctcaaggcgctcctgcagctgccagccagtgaccccacttactgggccactgcctacttcgacgtcctgctggacaagttccaggtcttcaacatccaggataaggaccggatctctgccatgcagagcatcttccagaagaccaggactctgggaggcgaggagagctgagctgggccacctggtctcagccacctgttcttggctccccaacagactctgcactgcaccatgggaggctcctgggatgtttggaagaagaaacgggcttctccttgagggggtagtggagggattttgtccccagcagtggcctctgagagtctttcagtgcctggtggggcagggcaggcctcttggagcacctcctccctgggtcagggcctggatgcaggtgccaagctctccatgtggtgcatgttgacccagccacgtggtgttgtcaagcaaacagcatcggcaggagacctggagctgaggacttggccctgcctgcactgtatgccattccttggtgacgaaatgctgtatatttggttttgaaaaaatgaatgtgctgggtatacacagcagaaaggg

SEQ ID NO: 118775 - DNA, 1958 bp, Homo sapiens
  Payload ID: 3254
  Gene Symbol: C2orf54
  Gene Name: chromosome 2 open reading frame 54
  Uniprot ID: Q08AI8
  ENST ID: ENST00000402775
  CDS Start-End: 97-936
actggtgctgcaagtcgctgagctgacagttgtgccgaggactgtcaccattgggcaggcatggtggccagctcctcacttggctgaggtccagggatggacacaggttcgctgaacgcggccagcctgagggaggagcagctccacctgtccttgctggtgtccagcggctggagaacaatcagcttccacgtggtgcccgtggtgagaaggaagcttggggcgcctgccctggagggggtgcagcagatgcccggattccctgagggcagcttgagaaggatcctcagccaaggggtggacctggtgccggccagcgcccagctctggaggacctccactgactacctgctcacgaggctgctgggggagctgggctccctgcagggtcatcgcctggacagcctctccatcctcgaccgggtcaaccacgagagctggcgtgacagtggccagactgacggcctgacctttggccacctgaagatggtgctgctgtgggcctctgtgctcttcctggcgcccgaggactgggcagaactgcagggcgccgtgtaccgcctgctggtggtgctgctctgttgcctggccacgcggaagctgccccacttcctccacccgcagcgcaacctgctgcagggcagcggcctggaccttggtgccatctaccagcgcgtggagggcttcgccagccagcccgaggcggccctgcgcatccacgccacccacctgggccgcagccccccgccgcgcatcggctccgggctcaaggcgctcctgcagctgccagccagtgaccccacttactgggccactgcctacttcgacgtcctgctggacaagttccaggtcttcaacatccaggataaggaccggatctctgccatgcagagcatcttccagaagaccaggactctgggaggcgaggagagctgagctgggccacctggtctcagccacctgttcttggctccccaacagactctgcactgcaccatgggaggctcctgggatgtttggaagaagaaacgggcttctccttgagggggtagtggagggattttgtccccagcagtggcctctgagagtctttcagtgcctggtggggcagggcaggcctcttggagcacctcctccctgggtcagggcctggatgcaggtgccaagctctccatgtggtgcatgttgacccagccacgtggtgttgtcaagcaaacagcatcggcaggagacctggagctgaggacttggccctgcctgcactgtatgccattccttggtgacgaaatgctgtatatttggttttgaaaaaatgaatgtgctgggtatacacagcagaaagggtactgtccactttttgtatatcagtgtggaaaatatttcccctagaagtagaaaaggctcatgtgctgatggataattttgagtcttctccattctctgtgaatgacccccttccccaggcatccccacctcctacctcgttcttagagcaaactaaagccaactgagggtgcacacacagccatgagcccacctgcccaggactactcccatctgcttcttcccgtccccgtggaagtggcccctgatatggattgtatctgtatccccacccaaatctcaggtagaattggatctgtgtccccacccaagtctcaggtagacttgtaatccccagtgttggaggaggggcccagtgggaggtgattggatcatgggggtggatttctcccttactgttctcatgatagtgagtgagttctcatgagatctggttttttgagtgtgtggcccctccccctctccttttgctctcttcctctttctccggccatgtaagatatgcctccttctccttcaccttccaccatgattgtcagtttcctgaggcctcccagccatgcttcctgtatagcctgcgggactgtgagtcaattaaacctctttattcatta

SEQ ID NO: 118776 - DNA, 549 bp, Homo sapiens
  Payload ID: 3254
  Gene Symbol: C2orf54
  Gene Name: chromosome 2 open reading frame 54
  ENST ID: ENST00000414499
  CDS Start-End: 152-549
gcgagtttctccacctgggtgaggtggagccacggagactgcttttctccagaaccagacgagctccagctcccaggctagcccatctgcacagctggcctgcggagtcctcctcaggggccactggccctcacctgccactgttgaagggatgcctgcccctgctctccccacctcagccatggccgtgcaggtgcccctgtggcaccactacctgcaggccatccggtcccgggaggcgccgcgtgcccaggacttccagcgcgcagagaacgtgctgctcacggtgctggagcgcgtgcatgccctggacccccgcttcatcgtggactactcccgtggcctggaggccttccagttcgccctgcgctcctctgaggacccaatggacatggaggtgcccctgtgggtggatgccgaggctctactgattgaggaaccagaggccacccagccggaggatggccttgaattatgccacctgggtgtgcccagggaaggggctggcctggagcggtggaccaccgaggataccttcactgcctcctc

SEQ ID NO: 118777 - DNA, 371 bp, Homo sapiens
  Payload ID: 3254
  Gene Symbol: C2orf54
  Gene Name: chromosome 2 open reading frame 54
  ENST ID: ENST00000454476
  CDS Start-End: 47-371
actgcttttctccagaaccagacgagctccagctcccaggctagccatggccgtgcaggtgcccctgtggcaccactacctgcaggccatccggtcccgggaggcgccgcgtgcccaggacttccagcgcgcagagaacgtgctgctcacggtgctggagcgcgtgcatgccctggacccccgcttcatcgtggactactcccgtggcctggaggccttccagttcgccctgcgctcctctgaggacccaatggacatggaggtgcccctgtgggtggatgccgaggctctactgattgaggaaccagaggccacccagccggaggatggccttgaattatgccacctgggtgtgcccagggaaggggctg

SEQ ID NO: 118778 - DNA, 1383 bp, Homo sapiens
  Payload ID: 3255
  Gene Symbol: C2orf57
  Gene Name: chromosome 2 open reading frame 57
  Uniprot ID: Q53QW1
  ENST ID: ENST00000313965
  CDS Start-End: 52-1239
tgaccacaggagagccctagggggaggccggctccaccagcagccccatacatggcactcccagggtaccccctgggcaacgtggatgacagcaggtctaaggacagcccagcaggagagccccaaggtcaggtcccactcacagcagatgtcttggcagtgagcagctctgtcgcatccactgactggcaggatatagatcaggcctccttcaagacggccacccccagggccatatcaacatctggagacaaagacaagagtgcagttgttccagaacacggccagaagacacccagaaaaatcacacctctgcttcccagccaaaatccaagtcccctgcaagtgtctatgagccttcagaatccagcgtgggacaggcaggttcaagacgcaaggacaagtcagagtctagtggttttcccaagtcacctcctgggtaaagacaagatgtcacaaatggcgagtgttcctgagagagagccggagtcagccccctctgccccgagtgctgagctacagtccacccagcacatggaggctcagcccgtcgagagtgatgctgaccatgtcacagcaggtgccaatggccagcatggccctcaggctgccagcaccaccaagtctgctgaggagaaagctgagcatccaaaggccccacaccctgaagctgaagctttaccatctgatgagtccccagtggcaatgggggcaaatgtggtggacagcttaggagacctgcagacttggttcttccctccacctccagcaggcagtgtgtccccgtcgcctggcccccacgaggtggccctggggagaaggcccctggactccagcctgtacacggccagtgaggagaacagctacatgcgctccatgaccagcctgctggacaggggcgagggctccatcagctccctggcagacatcctggtgtggtccgagaccaccatgggcatggccatagccacaggcttcctggattccggccacagcactgtggcagacctgctgcacagctcggggcccagcttgcgctcggtccccagcctggtgggaagcgtcagctcggccttctcctctgggctggtgtcagggaccagctcagccctgcgcaccatcacccgtgtgctggagacagtggagcagaggaccgtggagggcatccgctcagccatgcgctacctgaccagccacctcaccccacgccaggcccaggctgaccccaactatgattagagccctgcacagggacccccgaagggctggttcagtggcctccagagatccctgggaccctcacgccctgctcccttgcccattcttgctctggacggttcccccagcccatgcaataaatcaccagtgagcatttatttctaa

SEQ ID NO: 118779 - DNA, 1621 bp, Homo sapiens
  Payload ID: 3256
  Gene Symbol: C2orf61
  Gene Name: chromosome 2 open reading frame 61
  Uniprot ID: Q8N801
  ENST ID: ENST00000294947
  CDS Start-End: 37-570
gagctcaggttcagcctagagagagaggaggccaccatggaccagccagccgtcgccaccgcttccacctcaataagggaagacctggtgggtggagaatcattcatcacagcttcgaaaccagcccaaaagacttcctcttttgaaagagaaggatggtggagaatagcattaacagatactcctatacctggcacttaccacttgaaaacttttattgaagaatccctattaaatccagtgatagcaacctacaattttaaaaacgaaggaaggaaaaagccacctcttgtgcaaagaaacaatccagtcctaaatgatcttccgcagtatatgcctcctgacttcctggacctgttaaagaagcaagtggctacttactcattcaaagacaaaccacggccaagccccagcacactagttgacaaagatcagtcacttcagctttctccggggcaatacaacgtgcttcctgcaccagttcccaaatatgcttccaggagctgtgtatttcgctcaacagttcaaagattcccaacaacctattttattcccgtaagtataatgtagacagttaactcatgatgaatttgatgtttaaaatacgctgtgctttctggagtggagcaaggtggccacatagaaccctccagtgatcgttccccctagcaggaacaccattatccacacaattatccacacaagaaaacacctctgtaagaaccaaaaagcaagtgtgggatcgcaataccaggttttaacattgtatcaaggaaagaggcactgaagagggtagggtagaaaagacagtcttgaattactgacactaccctcccccatcccctggcagcagccacgtggcatgaagagagaatctgcccttggggaagagggaatgccgtgacggggggactttgcacgggaacaccgtgctgcctgtaacagggaaagcaacacaggacagaattcagctagtgcccatggagggagcatttagaccagcactagccagccaggaattgcccatcccagccgttcgatactgagttccagctctccctaccactgtgggctgaagtgctctgaggtcctaaataagcttgaaaggcagtctcggccacaaggactgcagttcctgggcaagttcaggtgctctgctgggctcagaggcagtggacttagggtacacaagacctagtgagacaccagctggggcagccaaaggagtgcttgtagcagccatcccccagccccaggcagcacagcttgcagcttcaagagagaggccttccttttgcttgagaggaggagaggggagagtaaagaggacttgtcttgaatctggataccagctcagccacagcagaatagggcacctcaggcagagtcctgaggcccccataccaggccctagctcccagacaacatttctagacacatctctggctggaagagaatccactgccttaaagagaaggacccagttctggcaagattcatcacctactgactaaagagcccttgggcttcgaataaacaccagcagtggccagacaacactcactgcaggccttagccagtgctgtgctgcttcaggtgtgatccagcactttcccagcta

SEQ ID NO: 118780 - DNA, 891 bp, Homo sapiens
  Payload ID: 3256
  Gene Symbol: C2orf61
  Gene Name: chromosome 2 open reading frame 61
  Uniprot ID: Q8N801
  ENST ID: ENST00000445927
  CDS Start-End: 128-874
agcactaaagacaaacctggcgggtcccccggagcggtcccaggcgcgcgcgctcgggagcccacgggccacacccgcctcctagcaaccggagctcaggttcagcctagagagagaggaggccaccatggaccagccagccgtcgccaccgcttccacctcaataagggaagacctggtgggtggagaatcattcatcacagcttcgaaaccagcccaaaagacttcctcttttgaaagagaaggatggtggagaatagcattaacagatactcctatacctggcacttaccacttgaaaacttttattgaagaatccctattaaatccagtgatagcaacctacaattttaaaaacgaaggaaggaaaaagccacctcttgtgcaaagaaacaatccagtcctaaatgatcttccgcagtatatgcctcctgacttcctggacctgttaaagaagcaagtggctacttactcattcaaagacaaaccacggccaagccccagcacactagttgacaaagatcagtcacttcagctttctccggggcaatacaacgtgcttcctgcaccagttcccaaatatgcttccaggagctgtgtatttcgctcaacagttcaaagattcccaacaacctattttattccccatgaaggccctggtccaggtcattataatgtgaaaatgcctccaacaagctctgtcacttcttgttttcaatccagagtccctcgattcttgcccagctgttcaaaaaccccaggcccaggagcatatacaactttaagacaattccctaagcagtctccgaccatagccaaaatgggccaagagcatagccttttcttcaacaacaacaattggcttttaaaataaagtgatcttggcaccaa

SEQ ID NO: 118781 - DNA, 403 bp, Homo sapiens
  Payload ID: 3256
  Gene Symbol: C2orf61
  Gene Name: chromosome 2 open reading frame 61
  ENST ID: ENST00000449846
  CDS Start-End: 1-386
cacggccaagccccagcacactagttgacaaagatcagtcacttcagctttctccggggcaatacaacgtgcttcctgcaccagttcccaaatatgcttccaggagctgtgtatttcgctcaacagttcaaagattcccaacaacctattttattccccatgaaggccctggtccaggtcattataatgtgaaaatgcctccaacaagctctgtcacttcttgttttcaatccagagtccctcgattcttgcccagctgttcaaaaaccccaggcccaggagcatatacaactttaagacaattccctaagcagtctccgaccatagccaaaatgggccaagagcatagccttttcttcaacaacaacaattggcttttaaaataaagtgatcttggcaccaa

SEQ ID NO: 118782 - DNA, 1669 bp, Homo sapiens
  Payload ID: 3257
  Gene Symbol: C2orf66
  Gene Name: chromosome 2 open reading frame 66
  Uniprot ID: Q6UXQ4
  ENST ID: ENST00000342506
  CDS Start-End: 890-1243
catatttccagctataatccatcatatttccaggtgtatcccttcccttaaaagtaaaaaaggagaaaatcactttgctgtgtggaagtgctttgtgtgttttataaaatccacataaaatgttcgtggttcaaggagtggctgccgcatttctaaggcaaataagcttatccctgaagaagcttgaagatctgactctcaagaatctttgtgttctggatgaaaaaggaatcattattttttaactcccctgctcaagtcagtgacttccactggcacccaatccattggttataagtacccatgaattgccttgccaattataggcaggataacctaggaggaccaaccaaaaccaaactcctggtaagctttattagccttttctacaatgtgtctcagtttctctttcacaccttggagtggaagacaatctctactcacactgttgtggtatgtgtctgtctgtctcagatgtgtgtataaggtgtatttctcagctcggtatctgaagtaatttctttttcttttcttttttttaaagactgctgtcttaaggcttaaaagtaatttaaggttttgttttttgttattttaagagttgcagtttctttggagacaacaaagtactttttttccaaagatgaaaaaggcatattcagactttctatgttatgttccataattgttttgcttatcactgtataacattctcattatcatgggctactttaagctaatcagttgcattttggggtcctcatttagaagtcaatctggaaaaaagatggctgtaaaacttagataaaccagtatgctatttctccttccttgtctgcctttacagatgtttcctctttctctctctcttccctgactatctctctcaatgatcattgacagctcccgcatcccctctttcactcagcttcactccaccatgaccagagcacctctcctgctactatgtgttgccctggtgctgcttgggcatgtgaatggagccacagtaagaaatgaggacaaatggaagccactcaacaaccccagaaacagagatctgtttttcagaaggcttcaggcatattttaagggcagaggtcttgatcttggaacatttccaaatcctttccccacgaatgaaaatcctagacctctctctttccagtcagaacttactgcttctgcatctgcagattatgaagagcagaaaaactcctttcacaattatctcaaaggctgaaagtttcttctgagctcaggtgtctggctattttaaaactacagatgaagcttctcattagaaaaattcaaccattgtcatagctaaactttcatggagtttctttccccctcacttttatttttcagtttgtaatgattttattccacatttccatatttacatataaatcgctggaactatgatttctatgcatatttatggagtttttttcctatgaaaccataaatattgatgtagagcaccgcatgtatttgtaggagttacaaaaacatcacaaactgaaaaaagattataatctaaattagatgtttctttaagcttgtttttaaaacttgtcttttatgtttattatcttttatcgaccaatatatttttttaaagggacatgctcacttttagtatagtaaaattcattatatgtga

SEQ ID NO: 118783 - DNA, 2837 bp, Homo sapiens
  Payload ID: 3258
  Gene Symbol: C2orf68
  Gene Name: chromosome 2 open reading frame 68
  Uniprot ID: Q2NKX9
  ENST ID: ENST00000306336
  CDS Start-End: 46-546
gttggggccgtcgaggcggcggcgactctgcgtccccggctcctgatggaggcggggccgcatccccggccggggcactgctgcaagcctggggggcggctggacatgaaccacggcttcgtgcaccatatccgacggaaccagatcgctcgggacgactatgacaagaaggtgaagcaggcggccaaggagaaggtgaggaggcggcacacgcccgcgccgacgcggccccgcaagccagacctgcaggtgtacctgccgcgacaccgagatgtctctgcccacccacgcaacccagactatgaagagtccggtgaaagcagcagtagtggaggctctgagctggagccttctggccatcagctcttctgcttagaatacgaggcagacagtggagaggtcacatcagttatcgtctatcagggtgatgacccaggaaaggtgagtgagaaggtgtcggcacacacgcctctggatccacccatgcgagaagccctcaagttgcgtatccaggaggagattgcaaagcgccagagccaacactgaccatgttgaaggcgttctctccaggctggattcactgcactcggaagaattctgcccagggaatttagtgtgggggtaccaggaccagtttgtctgatcttgagacccccagagctgctgcatccatagggtgttgcaggactacacctggcctgccttgcagtcattctttcttatatgttgacccatttgcccagcctgatattctggaattcttttttttttttttttttttttttttttgaggattttgtgtggctaatgtgttctagaagcagagactccagggagaaccagaatttatgaagcctcgtgcaacatggtgctttctcaccgaggtcatatgcctggctgctgctgttccactcagctccatgagccacgtttgttattttatgtttcttctgtgcttttgctcatttccacccatgtgtttatagaccttttttcagccctttttctttgttcctttccctcatctttttgcctcaggtagaatccatcagttttcctccccctccaaatgactgtgtacctccagctgctcaggactttggaggtgggggcggggcctggggatctacccttctaaaaaactctccaagtaattctgataccaataaagtgggagacctccatttttgaggcctatttgcaagcatgtctccctccctttccatggctttttcgtttctcgcatgttccactgctttgcactgtctagacaggaaacctaggaagatgttggtgctaaactgaaaagatttcttacagcaaaacctgcctcggccagggctacagaattccaactttcaacttgattcctagccgtgaacagactgtcctctgctcagactaaaagggaattataaacaagtgggaacttactctccagttgtgacttaacagttctgaacatacctacaaagggaaagtcaatattagcaataattgcctgattgacagcacgccagagggaatgaaatgaggccttctctcctacctcccaggagtatgtaactcagatccttagcataaagatccccaggaataccactgctctaacccggtgaacattttttctaatgcagggttaggcttacgtctgaattccacaagacatcctccccctccagtacggaagttccaaggcacttgttttccagcatatcagcctaacctcagtgccttgaaatatggctttaagcctttgagaactgagatttcctgaaaccataggcccttgccccaggggtttctccacatccgggtgttaagacacctgatggcactgttggtttgtcccctataccccagaaaatctatcctgcaaggtagctacttcaatcttgtcattaaaatgtgtcaagtcacagctcgcaatgccaaaggaatgctggggcagtaagtgaggtggataagtgagaagggcctggtggtgaaagcggccagggaccagaatgctccagacctacagagctggtcaaggttaagtgccttaaacttaccaatcctgggctcagttctcctttgaaaggagaaagtctttgtcctctacttaggcagctgggctagaagtgccttttgacttctaatgttaactaccctccaaagcctcctgggtcaagaaggctctcccaaactccacccctgttcttcctggtcagagaaccagtcagtcattctagtcttctagtccttaaactgatctgatgacttggaacataggatttcactgcaagtctggctttttagtctggaaatacatttgaggtctgttttcgcacagctggatcacctgtttcctggttttattacacaattcagaaggctagaagaggagtttgggggcttggcacctgaaaatttagaccgcattcttattaagtaaaggaagaggtagggaggccgaggcgggcggatcatgaaatcaggagatccagaccgtcctggctaacacagaaaccccgtctctactaaaaatacaaaaaattagctgggcatggtgacatgtgcctgtagtccatcccagctactcgggaggccgaggcaagagaatcacctaaacctggaaggcggaggttgcagtgagccgagatcacaccactgcacttcaggctgggcagcagagcgagactccatctcaaaaaaaaaaaaaaaaggaagaggtaaaaggcaaggcagcatttaataagtacctgttgtatccttttaagtgtttgttgtggtaatcctcacaaagaccgggactgatggaaactccttgctattaaactttttttcttgaggaa

SEQ ID NO: 118784 - DNA, 1722 bp, Homo sapiens
  Payload ID: 3258
  Gene Symbol: C2orf68
  Gene Name: chromosome 2 open reading frame 68
  Uniprot ID: Q2NKX9
  ENST ID: ENST00000409734
  CDS Start-End: 49-432
gttgttggggccgtcgaggcggcggcgactctgcgtccccggctcctgatggaggcggggccgcatccccggccggggcactgctgcaagcctggggggcggctggacatgaaccacggcttcgtgcaccatatccgacggaaccagatcgctcgggacgactatgacaagaaggtgaagcaggcggccaaggagaaggtgaggaggcggcacacgcccgcgccgacgcggccccgcaagccagacctgcaggtgtacctgccgcgacaccgaggtgaggccgcccgccccgcctgcctccagcccgcgcgctcttcctgcaacgcactccccttctctatagggaaaaaccacttcttactcctaaggttcagctcatctcgtctctttccggaacctccacctcagcgctcccaaatctccgctgaatgattctcaccaagaactgggacgactcataagcccccagttaagcatcgctgtcagagtatcggggagccagcaagaagtttatctgccggtttgccccaccgtgctgtattttagtaaggtgctccgctacctagcaaagagaaagtctggcacagcgatgagcgaccagcacataattgcggaatgaacccagtaaatggcctttccccagcttctctgctacctagagatcacactggttaatatatgacggtcaatttttgttaagcattattactttttttaaaatgtttttattttatttttgagactaggtctctgtcgcccaggctggagtgcaatggtgcgatctgggcttactgcagccttagcctcccgagtacctgggaccacaggcgtgtgccaccacaccggttaattttggtatttcttgtagagaaggggtttccccggctgggcgcggtggctctcgcctgtaatcccagcactttgggaggccgaggcgggcggatcacgaggtcaggagatcgagaccatcctggctaacatggtgaaacccccgtctctactaaaaatacaaaaaattagccgggcgtggtggtgggcgcctgtagtcccagctactcgggaggctgaggcaggagaatggcgtgaacccgggaggcggagcttgcagtgagccgagatcgcgccactgcactccagcctgggcaacacagcaagactcggtctcaaaaaaaaaaaaaaaagagagagagagaaggggtttctccacgttgtccaggctgatctcgaactcctgagctcaggtgatctgcccgcatcggcctcccaaagtgctgggattataggtgtgtgccactacctttgttaggcattagtgaaagtgcttttagatcttacgtatattaattcattgagtctttatacaacctcataagaaagcttctgtctgtttcacagtcaggaaacaggcacagagaggttaaacaacttgcccaagatctcagctagtaaatggcagagcctggatttgaacccaggcagagctctatccacccttctgctttccagtactttttgctagacaaatgtgcattgtgtacctactgtgtgacaggattgtgctggcctcagagcagggatgcaaaggtaaataagtccttgattggcagcacaccaaatgcttacactggtccgggcgcggtgattcatgcctgtgatcctagcagtttgggaggccgaggtgggcggatcccttgaggccaggagttcgaaattaacctggac

SEQ ID NO: 118785 - DNA, 976 bp, Homo sapiens
  Payload ID: 3258
  Gene Symbol: C2orf68
  Gene Name: chromosome 2 open reading frame 68
  ENST ID: ENST00000423181
  CDS Start-End: 83-259
aaggggcggcgcggagctctgtgggcgggtggctgttgttggggccgtcgaggcggcggcgactctgcgtccccggctcctgatggaggcggggccgcatccccggccggggcactgctgcaagcctggggggcggctggacatgaaccacggcttcgtgcaccatatccgacggaaccagatcgctcggtaccgccccgccctgcgccgccgccgccaccactcctggcctggcctggcccggcccgacagtccctgactcccgctcggctccccgcagggacgactatgacaagaaggtgaagcaggcggccaaggagaagatgtctctgcccacccacgcaacccagactatgaagagtccggtgaaagcagcagtagtggaggctctgagctggagccttctggccatcagctcttctgcttagaatacgaggcagacagtggagaggtcacatcagttatcgtctatcagggtgatgacccaggaaaggtgagtgagaaggtgtcggcacacacgcctctggatccacccatgcgagaagccctcaagttgcgtatccaggaggagattgcaaagcgccagagccaacactgaccatgttgaaggcgttctctccaggctggattcactgcactcggaagaattctgcccagggaatttagtgtgggggtaccaggaccagtttgtctgatcttgagacccccagagctgctgcatccatagggtgttgcaggactacacctggcctgccttgcagtcattctttcttatatgttgacccatttgcccagcctgatattctggaattcttttttttttttttttttttttttttttgaggattttgtgtggctaatgtgttctagaagcagagactccagggagaaccagaatttatgaagcctcgtgcaacatggtgctttctcaccgaggtcatatgcctggctgctgctgttccactcagctccatga

SEQ ID NO: 118786 - DNA, 1204 bp, Homo sapiens
  Payload ID: 3258
  Gene Symbol: C2orf68
  Gene Name: chromosome 2 open reading frame 68
  ENST ID: ENST00000420686
  CDS Start-End: 1-128
ggcggctggacatgaaccacggcttcgtgcaccatatccgacggaaccagatcgctcggtaccgccccgccctgcgccgccgccgccaccactcctggcctggcctggcccggcccgacagtccctgactcccgctcggctccccgcagggacgactatgacaagaaggtgaagcaggcggccaaggagaaggtgaggaggcggcacacgcccgcgccgacgcggccccgcaagccagacctgcaggtgtacctgccgcgacaccgagatgtctctgcccacccacgcaacccagactatgaagagtccggtgaaagcagcagtagtggaggctctgagctggagccttctggccatcagctcttctgcttagaatacgaggcagacagtggagaggtcacatcagttatcgtctatcagggtgatgacccaggaaaggtgagtgagaaggtgtcggcacacacgcctctggatccacccatgcgagaagccctcaagttgcgtatccaggaggagattgcaaagcgccagagccaacactgaccatgttgaaggcgttctctccaggctggattcactgcactcggaagaattctgcccagggaatttagtgtgggggtaccaggaccagtttgtctgatcttgagacccccagagctgctgcatccatagggtgttgcaggactacacctggcctgccttgcagtcattctttcttatatgttgacccatttgcccagcctgatattctggaattcttttttttttttttttttttttttttttgaggattttgtgtggctaatgtgttctagaagcagagactccagggagaaccagaatttatgaagcctcgtgcaacatggtgctttctcaccgaggtcatatgcctggctgctgctgttccactcagctccatgagccacgtttgttattttatgtttcttctgtgcttttgctcatttccacccatgtgtttatagaccttttttcagccctttttctttgttcctttccctcatctttttgcctcaggtagaatccatcagttttcctccccctccaaatgactgtgtacctccagctgctcaggactttggaggtgggggcggggcctggggatctacccttctaaaaaactctccaagtaattctgataccaataaagtgggagacctccatttttgaggcctatttgcaagca

SEQ ID NO: 118787 - DNA, 3728 bp, Homo sapiens
  Payload ID: 3259
  Gene Symbol: C2orf69
  Gene Name: chromosome 2 open reading frame 69
  Uniprot ID: Q8N8R5
  ENST ID: ENST00000319974
  CDS Start-End: 184-1341
cttcctttccttacgcacgctgcgcgcggacgtcggcctctgacgtcgtcgcctcagcgccggctcccggccgggccgcggccgccgaccgttgagccgccggctgagccgcctgctgaagtccctccctcaggaacccctccgccaccctccacctccgaaccgctctcgcggcggcgacccatgtgggggttcaggctcctgcggtcgccgccgttgctgctcctgctgccgcagctcggaatcggaaacgcctcgtcctgctctcaggccagaaccatgaacccgggcggcagcggcggcgcgcgatgctccctctcggccgaggtgcgccgccgtcagtgcctgcagctttccaccgtgcctggagccgatccgcagcgcagcaacgaattgctcctgttggcggcggccggggagggactggagcggcaggacctccccggggacccagcgaaggaggagccgcagccgccgccccagcatcacgtcctctatttccctggggatgtgcagaattaccatgaaattatgactcgtcatcctgagaattatcaatgggaaaactggagtctagaaaatgttgctaccattttagcccaccggttccccaatagttatatttgggtgataaaatgttcccgaatgcatttgcacaaattcagctgctatgacaattttgtgaaaagtaacatgtttggtgccccagaacacaatactgactttggagcttttaagcacctttatatgttattagttaatgcttttaatttaagtcagaatagtttatcaaagaaaagtttgaatgtttggaataaggactccatagcatctaactgtagatccagtccttctcatactacgaatggttgccagggagaaaaagtgaggacctgtgaaaaatctgatgagtctgccatgagtttttatccaccatcactaaatgacgcatcttttactttgattggattcagtaaaggttgtgttgttttgaatcagttgctttttgaattgaaagaagccaagaaagacaagaacatagatgcttttatcaaaagcataagaacaatgtattggctggatggtggtcattctggaggaagcaatacttgggttacttatccagaagtcttgaaagaatttgcacaaacaggaattatcgttcacactcatgtaacaccttaccaagtacgtgatccaatgagatcttggattggaaaggagcacaagaaatttgttcagatacttggggatcttggtatgcaggtgactagccaaattcattttacaaaggaagctccttccatagagaatcacttcagggttcatgaagtattttgagattacaggtatattaatgaacttgttcagtggaagaacataagcacttttgagtgttataaattcagataatgggatgtaattcatagctgcattgtcagttttggggtatggggggaagcacacattcctaaaatgtgagtgtaatgtgcaatagtattttttgcttgtgaatgtgagcagttattaatttggattgagttagaattagttaatttgaaatctaacaaggtggtttgtaataatgctgaggagatataagacccttaaaatgaaagttacaacattgttcttataaaaggtaactaaaattgttactgttggaaataactgattttctgagtaatgttttaaactaatttggtgacattttaacagtaattagctattttgagtggaaatattttcatttctcttcaaacaaaagcaaaggtacgatgctgttttctatcattttggaataactgcaccctgccttttgtgtttttgtaaactccttgactcattctttcatgtgtcaccaagtacttttctcatgagagtcaacatatatttgtttccaaatgtccacaagtgtacaatagtgtaaaggtggtttttaaaaacatagccaggtgtggtggcacgtgcctttagttccagctactcaggaggctaaggcaggaggattgcttgagcccaggctgtgtggttcaccataattgtgtttgtgactagctactgcactccaacctgggcaacatagtgggacttcatctctaaaacaaaacaaaacaaaattacacttaagcactattgtttaatttttaattgtcagtttatcattattttgggtaagacattctggggtttcttgaatcttgtccaaaaaccagttgttttggaaaattgctttaaattgagcatatttatgtatattggataaaaatgtactacagagcaaatttcaaatttttcattatatcagtctttttgaaaggatcaacttggataaaataaatatataatgctctatttgttagagctctattaaaaaggaaacagattccatagatctaagtcaatgtttctccagaagcatgattttgtctgccaaaagaaaatagctctctttggccaaaatgcaaaattacattgctataagaaaagttacaagggaaagtttgaagacacaaatgatttaattttggctcaaaaactgaatttgcttaacactgctacataatttgggtgaagtttccttctgcccgtttttcttgacctagataaatacactttgagaaatccagatctaataaatgtcaaccaacattgacattgtaattgggtgattacaataaaaggtgagcagtttgttgtttattaataattagcttttgcaggtaatgaaatagcagggaagtaacatgctgctttaggactaaaaaaaaaaaaaaaaaaaagacactgaagcttaataccttaatgacccagaagacctagatttataaagccatatagaataaaaatgttaatttcttggtttcttcccagaattatattttaatgactccataaatacattccaaatattcagagattcatgagaaaggattcttaacaaatgtttaaaaataacatttctttttggtgttttaacacttaattttataaactgcagaacagcatctctaaatggctttttttttttttttaaagacaaagtagtattatgttgcttcagtttctttaaatacctcgtttcttttgagaccaaaaattcccatcaaggaaataaatcagcctgattttaacattttacatattacattgcctttaagcactatgattggatggctttttttctatttgtttaataatccttggctaaattcacatgtatctaaaggaaaatagctgagttactgaattctataaggggaagaaaaagcatttattttcacatgattaactgaaatggaaaagtaagacatttagcagaataattcatttaaaaataattttaaaaaatcagacatatttaaaaatctaggttgtctatccagtatgtgaatgcttaattataattgttacatgttgaatgggtattaagagtaagtcaccaggtacacaaaactgccatcatagcaaaatgagacagtgttgaaaagacaaaatattttctggaatgaaaatatattcaagttgatccatattcagatgttttctgtttaatacttcagattggtcctttgtccacatttgtttaaaacttattgtaatgttaatttacacttttggattgtgcctttgtcatgagttgagaaaagtagtcctacaaataatgtgaaagttgttaccaccacagcatgaatgtataattgtattaaaattgatcatccacagaa

SEQ ID NO: 118788 - DNA, 731 bp, Homo sapiens
  Payload ID: 3260
  Gene Symbol: C2orf70
  Gene Name: chromosome 2 open reading frame 70
  Uniprot ID: A6NJV1
  ENST ID: ENST00000329615
  CDS Start-End: 32-637
gcgccaggctcgctgtactcgcgcacccaccatggcctcccgcagcgcgggcaccctactgaccgagttcaatgccgcctacgtgccccctggactcatgcccgggtaccagggccacgtccccactgtggccttctcctttggcgctccctacggcaccaccaccctcaagtacttccaggaccaccgcaacagagccatggagaagagccacactcccttcagccaaggcggccatttccccaccatcttctccaccaaccccaacctcctgctgatggagcgcgccagcacccgggaccgctggctgcacaagcccagctacactcgcttcaacctggacagccatcgctccacagagcttacgaatttctaccagatggtccagcagcatcggaagtactatcaagacaagacgggcacagtgcctcgagtcccctactttgcgatgcccgtgagggagccggaacggtaccccctccccaccgtcctgcctcctctgtgcccaaagaagaagtggcaccttttaagactagcccccgagaacctgaagacctaccagaccttcccatcagggaagagggtctctccacaggagcggaaaaagagagactgctactttgagttcagagcatgagacttttagttcagagcagagcctgatgcctgagatcctgggtcgtgaccagcctggcttgcttggaataaaatctttagccatgaccatgcta

SEQ ID NO: 118789 - DNA, 764 bp, Homo sapiens
  Payload ID: 3260
  Gene Symbol: C2orf70
  Gene Name: chromosome 2 open reading frame 70
  ENST ID: ENST00000409392
  CDS Start-End: 103-657
ccaggctcgctgtactcgcgcacccaccatggcctcccgcagcgcgggcaccctactgaccgagttcaatgccgcctacgtgccccctggactcatgcccggatgccatgggttgactctgatttaaagagattcttagtaccagggccacgtccccactgtggccttctcctttggcgctccctacggcaccaccaccctcaagtacttccaggaccaccgcaacagagccatggagaagagccacactcccttcagccaaggcggccatttccccaccatcttctccaccaaccccaacctcctgctgatggagcgcgccagcacccgggaccgctggctgcacaagcccagctacactcgcttcaacctggacagccatcgctccacagagcttacgaatttctaccagatggtccagcagcatcggaagtactatcaagacaagacgggcacagtgcctcgagtcccctactttgcgatgcccgtgagggagccggaacggtaccccctccccaccgtcctgcctcctctgtgcccaaagaagaagtggcaccttttaagactagcccccgagaacctgaagacctaccagaccttcccatcagggaagagggtctctccacaggagcggaaaaagagagactgctactttgagttcagagcatgagacttttagttcagagcagagcctgatgcctgagatcctgggtcgtgaccagcctggcttgcttggaataaaatctttagccatgaccatgcta

SEQ ID NO: 118790 - DNA, 471 bp, Homo sapiens
  Payload ID: 3260
  Gene Symbol: C2orf70
  Gene Name: chromosome 2 open reading frame 70
  ENST ID: ENST00000453368
  CDS Start-End: 1-385
gcttcaacctggacagccatcgctccacagagcttacgaatttctaccagatggtccagcagcatcggaagtactatcaagacaagacgggcacagtgcctcgagtcccctactttgcgatgcccgtgagggagccggaacggtaccccctccccaccgtcctgttgcctggccacttgcactgctgctgacagtttcacaacgaacgcaaagggccaaccaggtggttgggagaagagggcctcctctgtgcccaaagaagaagtggcaccttttaagactagcccccgagaacctgaagacctaccagaccttcccatcagggaagagggtctctccacaggagcggaaaaagagagactgctactttgagttcagagcatgagacttttagttcagagcagagcctgatgcctgagatcctgggtcgtgaccagcctggcttgcttggaataaaatctttagccatga

SEQ ID NO: 118791 - DNA, 7044 bp, Homo sapiens
  Payload ID: 3261
  Gene Symbol: C2orf71
  Gene Name: chromosome 2 open reading frame 71
  Uniprot ID: A6NGG8
  ENST ID: ENST00000331664
  CDS Start-End: 1-3867
atggggtgtacaccttcacacagtgaccttgtaaacagcgttgcaaagagtggcattcagttcttgaaaaagcccaaagcaattcggccaggatgtcagggcggaagtgaaagaggttccatccctttgctggttaaaaactccacctgctatgacgctggggagggcctggcagaggagcagccaagtcccaggaggaaccaaaccacagctaaaggtctttgtcagctcatgggagatcctgcttcaggcaaaaggaaagatatggaaggactgatcccaggaaccaaaacctcttcatcccagctgaacaaatcacaaagccacatggctaaggatattccgttcaagacacagggttcccatggatcacaaggggcagacttttctggagatgagagtgaggaaagtagtacccaagatacttccaaatggaaaaggacagcaaaatgtcacacgtcaagcacacagagccactgctaccaaaccatccaccctgctcatgagcctgaaggcaaagtggacttcccggagcctctggtaaaggcccaccagcaggcttacacctatctacactccagcctctccaaatatgaagcaattctgtgcatcatccatcaggccacccagacccgggagctgctgcagcccatggtcagcttcttgctgctgtgctttgaggagatcagccagctgttgggggagatctccaaggatggagaagtgctcctgcaggaagtcagggaggatctggcttggcctttgaagaaaagagagccccaggagcagccaaatctcctgcaacagctgctacagtacacagtcagcaagctgcaggtgctcaatggcacagtggcctcgctcaccggcagcttcctggagggctccagcagctacctccactccactgcaacccacttggaaaataagctgagcacaaaaaggaatgtggatgaacgcctcctgagggctctgaggcagctagagagcctggcgagtggctgtggcgaccctggggtgcagggtctccccttatgctctgaggacagtggcattggtgctgacaatgagtccgtgcagtcggtggacaagctgggcaagcaaaccagctgggaccttgcaccagagcccgaagaatggaagtcggtgacttcaccccacacagaggccaggcagtcaggacacacctggcagcaaagtccattctgtttgggctcaggcagaccccaggactgcctgctctcaggggctcctatggcaaaggttcagccacgagcacaggacgaagcaaggagcccatgcctctccagtacaagcccagaaaatatcacctccccacctttgaagctggggacaagcaccccatgtgattcctttgggattggggtctctgtggaaccacacctttccaaaacctccaggccgatggacgcttcatctcttagtgacagcgaggacagcagcccagaggaggaggaggaagacaaaatgagcagcatgagtctgtgtgcctggcaggaaaaaactccacattcaaggccacaatcttcacctgctgaccgggaaagcccatttcaggcccgcaccaggaggcttaggagcctccaggcccaggaaatgattctgaagatgaaggagtcaatcagcgaaaggatcaagtttgtccctgtgccctgtgggcaccaggactggtctgaggaggaggaggggaggacagtggtccccccaagacctagcacggtaagtggcagcaggagggcccctgagaggcagacgaggtcccagtcagagtcgtgtctccagagtcacgtggaggaccccacctttcaggagctgcgaagggtccagagggacctcagtcagaagctggaggcattttatgccctgggtgccaaagggcaggggcagagccaggagcaaattctgcagcccagagcagccgccgtgtggcccaatggcacctgcagggtcagtccaagcaacaccaccagcaggctcaaggcatccctcaccaagaacttcagtattttgcctagtcaggacaagagcatcttgcagaaatgcaatccccatcctgaggacgaacaaggcaaagctgggaagcttccaaatgccatcccatcaggagaggtcagtgaggctgccaaggccacagactggaatgtcagaggctgtcccaccagaacatccgtcaagaagcttattgaaactttcagtcccacggagagtctgaggatgctgggggactctaaggacgctggggcaagtccctgcctcaggaattgcatcatgccccccagatttcccaagtacacagggcttgcccctttgtatccgaagccccaaatttctccagcatcaggcagagaatctctcaaaatgggcataggctggaagcccttagcacctatctttccccctctgcctaaagcagaagcagccaagagtgaggagctcagctgtgaaatggaggggaacctcgagcacctccctccaccgcctatggaagttctgatggacaaatcattcgcttctctggagtccccagaaagcagcaagtccacagagaactcccccaaggaaacccaggagccagggccgggagaggctggccccaccaggagaacatgggcttccccaaagctgagggcctctgtgagccccctggacttgctgcccagcaagagcaccgccagcctgaccaagcctcacagcacagggccagggagtggcaggagcagctgccagcccaggaagccagccctggacctgagcagcccaccagccaccagccaaagccccgaggtgaagggtgggacttggagtcaggcagagaaggccaccagcctctacaggcagccccggaaggccatcgcctggcaccactccggccctccatctggacaaaacaggacctcagagtccagcctggccagaccaaggcagagccgagagagaagcccccctgtgggcagaaaggcctctcccacgaggacacactgggtgcctcaagcagacaagaggcgccggagccttccctcctcttacagacctgcccagccaagcccctctgctgtgcagacgccccccagcccacctgtgagccccagggtgctaagcccacccaccacaaagcggcgaacttccccaccgcaccagcccaagttgcccaaccctccccccgagagtgcacctgctcagtgcaaggtccccagccccccaacccagcacccagaagcaagcccccctttctcgattccctccccatcacccccaatgtccccttctcaggagcacaaggaaacaagagactctgaagacagccaagcagtcatagccaaagtgtctgggaacacacattccatattctgcccagctacctcctctctgtttgaagctaaaccgccactctcaacagcccacccactgaccccaccatcgctgccgccagaggctgggggccctctcgggaacccagcagaatgctggaagaacagctcagggccttggctgagagcagactcgcagcggagagcagctctgtgtgccctcaaccctctgcctttcctcaggaggacagcttctgaccgccagccaggtggccgaccgcagcctcccaccttggaccccaccagcacctcttatgaatcccagctcggccagaacagcagcagcgaggagagccctaagaaggacacagagccggggagcagcccctgttcccctgaactgcagggcggcaccaggcgtgcatctcccccagagttctgtgtgctgggccacgggctgcaaccggagcctcggaccggccacatccaggacaaatcccagccagaggcgcagccccagcaagaggaggtgtcctgacaggctgacgagggggccacactcacgcagtcaccccagaaggccaagtgtgacagccaagtgtccagcctgacccagagatgatgggcaaaccaaactcctactgaggtgtcctggaaaggcctggaaggtgcactgcccagtgggtctgctgaattttaaacaatcgccgttttcagtcccagatcttgctctgccttggggttcaaaggttaaccagaacttttagaccccacaatgacagtatttaatgcttcaagtgctggccttaatttggggtggggtggggggtggagaatgtatagttgcatgcttgatagggttttaactgggttcattccttgagatcacttaagcctcacaacagtgaatgaagcacatagcattcttcagttttgcgcatatgaaaaccgaaggtgtggggagaggccccctcaagtgtctggctgaaggtcatacagctaagaagagaatagagcaaaattttgcacagatgagtctggtgttagaatctctctgctctttttattacattccattgcccgtaactattgcgtcactccacctgcctaaagcagacatgggtgcgcaaatggtcgcaaagcttctttgttgtaaggttaagtagcggcacagcattgacaaagtccctattgagagctttgtttagaagtgcatggctcccaaaatgagaaggctgagtgagccaggattaaaacacacagccccacccgtcctctgtcctctcctccttcccaagctcagtttcaatgctgtaaacttaaagctgacagctcacaataccagccacgctgcctctcggcctaagcatgtagcaaatgctctcactgccctacgcattacatgcttctcgacggagtagggtaaaccaagcctcccaaacaaggcagcccattctccacatgccgtgggtgctggagctcagaagatagcgtgggtgaggcatacgtactcacacgccgatctcccctcggaggcttcttggccaactttattcccaggtcatcttgcagaacttctgctggagtcgaaatcaaagtgaaaaacagttgttcatgccaaaaacctgcttctgccaatgagctagatatttgctgcagatcttggaatgcttccactggaggctgtggtgtgcgttctatttagaaaagattttgcagtaattgagtgattcaatgccggctcaatgggttggcaaaagacaagaattcttacccactggggtacagcaaagggacgatcctccagatctgctgcaaagctgatttttaaagtttggggtaattatagacctcaaacccattcttgctgggactgtgggctcaaaaacttgttaaactgggtccctagggactatagcaacctcccccagagagaggctatgactctgagtaaatgaatcccaccttgacttgtccaattattattcaaaggcacccaaagaacagctgattaaactaccaagaggggccacaacccacccctctgctggaaagggacacacccagctgtctgctcgcatttgctcctgttgccgccctcatctcagagaagtgctcaggcagtgcccaggccagccgattctagagccaagccacacccactgctgggtggacacttaggagctgcctggactgcaggcaacgcagggaagtccagccacccaggcagggcaggggccaaggtaagcacgtgaggatggaccaggttcagcaaacttgcccgacagagatctgggcattctccctaaatggttgggcagaccaaccattgggtcaccatggggtgagccttaggtaagctgggcactgagctgagtgagcaggagacacacagtgtgagcggcctttgaggtctagctcacaagtaagtggcttcaggtgggactgctcagaaagtgggccctgcctgggctcagatttaggggcaggattcctggaggtccgaggaaacgaagctgttccccagctgcagggagactggagtgggacacagtgggtgaaactggggtaccatgaggggtggaaccccaggaattatacacattttcattactggaaccgggatatgaagtggagccactccagcagtgaggggaagcaaggctgagtctccagcccaggcctccttccgtaaagggcctcatcttaaaagtccagggctgggtagaaagtggaaagggtggccgagtgccccctgctgtggccatgcaagctagcggcagcagggagccaggcagattattccaccacagaaggggtcagtatcatggagaacacgcaggaagggtccggaatgaacaacggtgctttccgtgagcatgcatggcaggaggctgtctgagactagaggttgtccctcgccaggctaggctggcaagcagcaggaagtgcccacccaccatattgcaggcagcagacgaaggggtacagggcacccgggatcctgccatcagctgtggagatgcccatgatgcctccttgtccctctggaggacctccacgtttgcttggggccaacgtgtgccaggacagggcgaggctcctgccataggtccccacacacgatgtcataaaagcccccagctgccaccagacccaggcagccgggacagtgagctggtgacaccattgtgttgcccagtaaccttaggctactggaattccaagtcagcttcccccactccagggaagatggggaggggttgccaaggtgctgggggctgggggtcaattaggtcaaaggtgaagcagtgctgagccgacataggagcaggcgggtcaaagatgtgtttttggctaccataccaactaccagacttagctcaaattacatgtgaattagactttgtacaaaaggaattaaatccacaatggaacagttttgtggcatctggtcagttttgcctcctagagaccaggtcttccacaaacttgagtctgccttggagcacgcattgctggtggcaggaggggcaaacccagctgtacagcttctcagacaagggctgctcacgcccaccatctcccttctacccaagaatggtatccttgctgggccaaatccacttcctttgcccaagggggaagggaggacagtttttctttgttctgctttttgttttaataaaaattattaagccaatgaacccaactc

SEQ ID NO: 118792 - DNA, 3657 bp, Homo sapiens
  Payload ID: 3262
  Gene Symbol: C2orf72
  Gene Name: chromosome 2 open reading frame 72
  Uniprot ID: A6NCS6
  ENST ID: ENST00000373640
  CDS Start-End: 77-964
gggcgccaccgccccgagaggcgggcagcgggtgcgcccgggccgcggcggccgcagagggcgggcggcggccagcatggagcgcgagctggaggcgctggcggcccggcttgcgcgccctgccgagccgcccttccaggcgttggtggaagcggcggggggccgcgggcaggtgctgctggtgggcgagctgtgggagcgcgaacagagccgcgcgctgctgcgggacttcgcacgggcggtgttcccgccggagccaggcgcggccaagccgggcggcgcggcggcagagggcgcggggcccggggcggcgcgcggggcgcagagggcggcgagggcggctggggcggcgggggcggcggcggcggcggcgcgcgccatccgctcgccgctggtcttcgtgctgtgccgcgcgtcgtcgctggccgcccgggagccgcggcgccgcctgcgggagatgctgcgggacgtgcgcggccggcggcgggccggggcggcgctggtcggggtgctggtggccgaggccgggccagaggacgcggtggcgccggggctgcggctgctggaggcgctgttgcgcgccgtgttcggccgccaggcgggggggcccgtgcaggcggccgcctactgccccggcctcccggcctcctgcctggccgtccaggcggccgcctgcagggccctgcaagccgccggagccgggcaaccagtggaaggagcctgggagaggccaggcctccccggactgctagcctgcttttcctggggtccctggagccggaggaagaaccaggatgttgctgcctgcagaagctcagctcaggaagacttccaggaacctgaggaggagctgccactaacagccatatttcccaatggagactgtgatgaccttggaagggggtcaaaagcctgtgatggagtcgtacacactcctgctgagcccaccggagactcaagatgaaggctggacccttgcgctgtccctggctctaacctacagactggggcctggctccgtcttactggcccccaggtctccatggagactgcagaaacccccgcctgctggaggcctgccacactcacagttaccagctagacagtggggcttactaagacaagcaggacctaaaacagtgtctcccctgggaacctactccccacccagcatttgctaagtctgatcacagggaggttattttgtctctctgtctcggtttctctgagccactgagacagatggctgtccgctttgaggctctgcagagctgtggcaccccatggtgtgtctgcagtgttctgggcacatgcatgggcacccatcgttgagagtgcagctgggaagaactctgaaccagaagtcatcagagctgaggcatggccttgaacatgtcactcagtctctggggcttctgtttcacaaatgcatgagggggccaccagcccagtggctttaaaccaggggcaggttgtccctccaggcagcattggaaatgtgtgtgtgttgagggggtcacagtgactgtgggggcacccctggcatctagtgggcatcccacaatgtgcagaacagtctctgacagcaaagaattggtccattcaatgccaattgtagtacctttgagacattctggctgagccaatgccttctccctgtcagagtcccccagagcagagagggtcaggcttccctggaccttggctcccagagcaagccaaaataaagactacactgttgccttgggggcttgtcgggccagggccaagacggtctgcgtgctgcagggccaggacagaaatagccacacatgccggtgagaacaaagagcctctttctttctcatgttgacatcgactttctgtgccaagtcctttgggtataaggatgctagggaattcctataggcaccaaacagaaggaaagctaggggcttggactactgggtataggacttgctctagctctcaggtcctagcccaagctcaatgcaaacacagcccctccgggctctctgtttctgtgaggttctggaatcccttcctctgtgtccgtgagtctgacagaatcgatgatgttcccttagagctgggaaatccatgtgtttattcacggagggaactcaccattacctcccttgtcttctttgcctgccttggagaaatccagagtcttcggaatggcaaaggcagctcctggatttccctggaggggaggcactagctgagggaagtagctcccttcattcatgatgcacagtttacgcagcagacacacaactgcgcctactatttgctcggtgccctgcaaggtgctgcctaactttgatttgttatttcagctctctccaggatagtgccaaatggtgcaatgggaaacctgttttgctggggggctctagatcactggctccagaactcccggctgccagggtagcccctacccccagccccttgctcctggacagcagtgggtctcacctttagcctctgcccccagttctggtctgacccaacagaggggctctatgatattaagaaggggcccttcctgctctgtgcctcaacctattctccataatagggagtctaatcctattccttccctgcctgatgaggatggtgtgaggatgaggaggacggcatctcatttggggctttttggcagtgggcctcattttaatcctgcagggctgcctgccagtggatctatccagctgcttccttgtagccaagaatgagttcaatgaattgtgattcactgattttattgattttgttttaaaacagggagactggtatttttgaagctgctatcattttctatttctttattaatttctttgtaatcatcttattaaagttttcttatttagtgggagagggagctttgtttaagtttggaatttgcctaaggcagaagttataaggcttcataaccttttgtatgtattgccaatatttgaaacttgggagattacgtataaaaaatacctagttttctgggtggaggatggggcatgctgtcatctcaagtctgctgcggctcacccccaccacctttaccccctcccccgcccttcccatcccccactgcacttcactcatgtaagacgtctgcccggtgctggtccaggcgggcatgtgagtttgtagcctctgctccaaaggatggtttacacattattttttcattaccttcagtattcctgtgaatggttcaagagagaaagtcttcatttactaagatttgggttctgcctcccaagtgacaatacggggctgagatccctctcagcttctttgagatgtggccaccataagcatcatcgttgtagggacagtctcattgctgtcttctagcagacagaagagttaggtgccagaaaggacaatcttgatggtgggtcccctccctgaaggactttaagaaggcataaaggggttggggtggagggtggcgtgtgaaggaggaggcccttgattaggtcagtggtccctgggagccatcggcgagaggcctccagccgggtgacagtctgggctctcgggtactaatctttctaatatggcagtggttgtggcacttctgacttgaattgataattctcatatctaataaaaccaagaagtacctcgttgatatcttatagaaaa

SEQ ID NO: 118793 - DNA, 1713 bp, Homo sapiens
  Payload ID: 3263
  Gene Symbol: C2orf73
  Gene Name: chromosome 2 open reading frame 73
  ENST ID: ENST00000317627
  CDS Start-End: 43-222
tcttcccaggaggctcctcgctgcctggtgccgtagaggcccatggaggaaaaggaagataagcatcaggtgactggtggtcacatggtaaagcactggaacctgtcttcctaccaccttacgactctaagagcacccagaggagtgacttccaaaaaccatcgtgtccactggttttgccagtcaaacacagcaagatgcaaaagccttcttgtggaatagtaccacttgcctctcctggtacatcagcagaacttcaaaacaattttatagaatacatctcttttatacatcaatatgatgccagaaaaactccgaatgagcctctccagggaaagagacacggagcttttgtacagagagagataaaaccaggcagtaggccaacagttcctaaaggagcagaggtattactgaacactccagggtcacgttcatcagaacagtccaaaaaaacagagaaaggaaactcagcggaaagcagaatgatctcaccaggtctctgccaacaaaattctcaggagctgttagagcctaaaactcacttatcagaaacagacgtcagacaggcagccaaggcatgccccagcactcctgagagcagagaaaagacctcaggcgccactcaaacaactgtaggagatgctcttttcactaggcacaagcctttaaatccaccaattaaaaaatcagaataaattaccttcttcagataaaaatctaatccctggaatatagggaaatttcacaatcatcatcttggccctcacatttacttttctgttatcagtaacttcagaacatacaatttatgtaaatggaaaaagagaaaaaagacaattaaaatacaaccaaatgttattaataagagtggtctccaataagtggagtgagacattatttctatgtcacattctttatgaacacaactttgttttgcacaacacatgatcgtaattaacaaatataatacttttagaagagaggccctgttagacatgagtggacagctttggaatcaaacaaactagagttggaatgttggcttcacttcattccttgagctgtgtgaccttgggtaagtaacttaacctctctagacttcagttttctcaactgtaaaattaggaaaatagcaacttcgtaagattattgaggatgtgattatgcacattgatcagtaagtggtcaatgtaatcatatcatcactgctactataattcaattttcaatttaaggataatgttctcttatatatttaatttttcctcattattctaaaacttagaactcctccatatataattaaaagtgtgaaaatctaaaaatacttctgccagtacaagatgcacagacacatacacacttaattcaaagacatatgggtacttagaatattgaagtattttctaaattgttttctattttactcagatcatttctagcaccaactcaacctttgctttttggatgagtttggtaaggattaattctacttccaatttggtgtgtttggtgtgccaaaatgtatctattataagatatgttatattgcatacaagtggaagtaggtggagtattcctctgttataaagagtatttacaaatttccattgggaaatatcagctgctcactattatctgcagtattgataagactacagctatatctttatccatttattctccattaaagaaattgtgataaactgc

SEQ ID NO: 118794 - DNA, 1921 bp, Homo sapiens
  Payload ID: 3263
  Gene Symbol: C2orf73
  Gene Name: chromosome 2 open reading frame 73
  Uniprot ID: Q8N5S3
  ENST ID: ENST00000398634
  CDS Start-End: 43-906
tcttcccaggaggctcctcgctgcctggtgccgtagaggcccatggaggaaaaggaagataagcatcaacagcataaaatagaggatgctgctataacatatgtaagtgaaaatgaagaaattaaacacgaagaaaaacctggaaaaagcatacatcattcaaaatcacatgttggaagaggacgtatatattatgctaaattcattaacacaaatgcaagaacatacaatgaaccatttccctacatagatcccaaaaaagggccagaaatacagggtgactggtggtcacatggtaaagcactggaacctgtcttcctaccaccttacgactctaagagcacccagaggagtgacttccaaaaaccatcgtgtccactggttttgccagtcaaacacagcaagatgcaaaagccttcttgtggaatagtaccacttgcctctcctggtacatcagcagaacttcaaaacaattttatagaatacatctcttttatacatcaatatgatgccagaaaaactccgaatgagcctctccagggaaagagacacggagcttttgtacagagagagataaaaccaggcagtaggccaacagttcctaaaggagcagaggtattactgaacactccagggtcacgttcatcagaacagtccaaaaaaacagagaaaggaaactcagcggaaagcagaatgatctcaccaggtctctgccaacaaaattctcaggagctgttagagcctaaaactcacttatcagaaacagacgtcagacaggcagccaaggcatgccccagcactcctgagagcagagaaaagacctcaggcgccactcaaacaactgtaggagatgctcttttcactaggcacaagcctttaaatccaccaattaaaaaatcagaataaattaccttcttcagataaaaatctaatccctggaatatagggaaatttcacaatcatcatcttggccctcacatttacttttctgttatcagtaacttcagaacatacaatttatgtaaatggaaaaagagaaaaaagacaattaaaatacaaccaaatgttattaataagagtggtctccaataagtggagtgagacattatttctatgtcacattctttatgaacacaactttgttttgcacaacacatgatcgtaattaacaaatataatacttttagaagagaggccctgttagacatgagtggacagctttggaatcaaacaaactagagttggaatgttggcttcacttcattccttgagctgtgtgaccttgggtaagtaacttaacctctctagacttcagttttctcaactgtaaaattaggaaaatagcaacttcgtaagattattgaggatgtgattatgcacattgatcagtaagtggtcaatgtaatcatatcatcactgctactataattcaattttcaatttaaggataatgttctcttatatatttaatttttcctcattattctaaaacttagaactcctccatatataattaaaagtgtgaaaatctaaaaatacttctgccagtacaagatgcacagacacatacacacttaattcaaagacatatgggtacttagaatattgaagtattttctaaattgttttctattttactcagatcatttctagcaccaactcaacctttgctttttggatgagtttggtaaggattaattctacttccaatttggtgtgtttggtgtgccaaaatgtatctattataagatatgttatattgcatacaagtggaagtaggtggagtattcctctgttataaagagtatttacaaatttccattgggaaatatcagctgctcactattatctgcagtattgataagactacagctatatctttatccatttattctccattaaagaaattgtgataaactgc

SEQ ID NO: 118795 - DNA, 576 bp, Homo sapiens
  Payload ID: 3263
  Gene Symbol: C2orf73
  Gene Name: chromosome 2 open reading frame 73
  ENST ID: ENST00000405749
  CDS Start-End: 75-416
gcacccttttcctggcagggctgcgtccctgttcttcccaggaggctcctcgctgcctggtgccgtagaggcccatggaggaaaaggaagataagcatcaacagcataaaatagaggatgctgctataacatatggtgactggtggtcacatggtaaagcactggaacctgtcttcctaccaccttacgactctaagagcacccagaggagtgacttccaaaaaccatcgtgtccactggttttgccagtcaaacacagcaagatgcaaaagccttcttgtggaatagatgaaaccttgagaaaaggagccaagactgtaacagtggtcctgtgccacagtgcaggaagaaaaggaacagagagatcacgggcatgtttttttaggtggtttcatgccatcttattttctccttgaaatacattcacaatgaggtgactggctctgtgggaagcctatggccatgttgtaatgacactcaatcagcccagtggagagggccacatggcaaggaactaaggcctcccaccaacagccagcaaagaactgagaccttctgcctacagtcatgagtcct

SEQ ID NO: 118796 - DNA, 656 bp, Homo sapiens
  Payload ID: 3263
  Gene Symbol: C2orf73
  Gene Name: chromosome 2 open reading frame 73
  ENST ID: ENST00000447328
  CDS Start-End: 22-656
tgcctggtgccgtagaggcccatggaggaaaaggaagataagcatcaacagcataaaatagaggatgctgctataacatatggtgactggtggtcacatggtaaagcactggaacctgtcttcctaccaccttacgactctaagagcacccagaggagtgacttccaaaaaccatcgtgtccactggttttgccagtcaaacacagcaagatgcaaaagccttcttgtggaatagtaccacttgcctctcctggtacatcagcagaacttcaaaacaattttatagaatacatctcttttatacatcaatatgatgccagaaaaactccgaatgagcctctccagggaaagagacacggagcttttgtacagagagagataaaaccaggcagtaggccaacagttcctaaaggagcagaggtattactgaacactccagggtcacgttcatcagaacagtccaaaaaaacagagaaaggaaactcagcggaaagcagaatgatctcaccaggtctctgccaacaaaattctcaggagctgttagagcctaaaactcacttatcagaaacagacgtcagacaggcagccaaggcatgccccagcactcctgagagcagagaaaagacctcaggcgccactcaaacaactgtaggaga

SEQ ID NO: 118797 - DNA, 560 bp, Homo sapiens
  Payload ID: 3263
  Gene Symbol: C2orf73
  Gene Name: chromosome 2 open reading frame 73
  ENST ID: ENST00000414747
  CDS Start-End: 1-247
ggaagataagcatcaacagcataaaatagaggatgctgctataacatatggtgactggtggtcacatggtaaagcactggaacctgtcttcctaccaccttacgactctaagagcacccagaggagtgacttccaaaaaccatcgtgtccactggttttgccagtcaaacacagcaagatgcaaaagccttcttgtggaatagagacacggagcttttgtacagagagagataaaaccaggcagtaggccaacagttcctaaaggagcagagatgaaaccttgagaaaaggagccaagactgtaacagtggtcctgtgccacagtgcaggaagaaaaggaacagagagatcacgggcatgtttttttaggtggtttcatgccatcttattttctccttgaaatacattcacaatgaggtgactggctctgtgggaagcctatggccatgttgtaatgacactcaatcagcccagtggagagggccacatggcaaggaactaaggcctcccaccaacagccagcaaagaactgagaccttctgcctacagtcatgagtcct

SEQ ID NO: 118798 - DNA, 802 bp, Homo sapiens
  Payload ID: 3263
  Gene Symbol: C2orf73
  Gene Name: chromosome 2 open reading frame 73
  ENST ID: ENST00000486488
  CDS Start-End: 133-802
ggacttttctttttccgttatccagggaaatgcgtgagttactatgacagatgccaaagacttttggctctggtagtggaaattgggaggcaatggtgaaatgaagtaagaaattccagggccagaaggtggatgcaagtcagcaacggcttttcccaggagcttgctctttttggacagcataaaatagaggatgctgctataacatatgtaagtgaaaatgaagaaattaaacacgaagaaaaacctggaaaaagcatacatcattcaaaatcacatgttggaagaggacgtatatattatgctaaattcattaacacaaatgcaagaacatacaatgaaccatttccctacatagatcccaaaaaagggccagaaatacagggtgactggtggtcacatggtaaagcactggaacctgtcttcctaccaccttacgactctaagagcacccagaggagtgacttccaaaaaccatcgtgtccactggttttgccagtcaaacacagcaagatgcaaaagccttcttgtggaatagtaccacttgcctctcctggtacatcagcagaacttcaaaacaattttatagaatacatctcttttatacatcaatatgatgccagaaaaactccgaatgagcctctccagggaaagagacacggagcttttgtacagagagagataaaaccaggcagtaggccaacagttcctaaaggagcagaggtattactgaacactccagggtcacgttcatcagaacagtccaaaaaaacagagaaaggaaactcagcggaaagcagaa

SEQ ID NO: 118799 - DNA, 1376 bp, Homo sapiens
  Payload ID: 3263
  Gene Symbol: C2orf73
  Gene Name: chromosome 2 open reading frame 73
  ENST ID: ENST00000615983
  CDS Start-End: 339-551
cgtagaggcccatggaggaaaaggaagataagcatcaggtgactggtggtcacatggtaaagcactggaacctgtcttcctaccaccttacgactctaagagcacccagaggagtgacttccaaaaaccatcgtgtccactggttttgccagtcaaacacagcaagatgcaaaagccttcttgtggaatagagacacggagcttttgtacagagagagataaaaccaggcagtaggccaacagttcctaaaggagcagaggtattactgaacactccagggtcacgttcatcagaacagtccaaaaaaacagagaaaggaaactcagcggaaagcagaatgatctcaccaggtctctgccaacaaaattctcaggagctgttagagcctaaaactcacttatcagaaacagacgtcagacaggcagccaaggcatgccccagcactcctgagagcagagaaaagacctcaggcgccactcaaacaactgtaggagatgctcttttcactaggcacaagcctttaaatccaccaattaaaaaatcagaataaattaccttcttcagataaaaatctaatccctggaatatagggaaatttcacaatcatcatcttggccctcacatttacttttctgttatcagtaacttcagaacatacaatttatgtaaatggaaaaagagaaaaaagacaattaaaatacaaccaaatgttattaataagagtggtctccaataagtggagtgagacattatttctatgtcacattctttatgaacacaactttgttttgcacaacacatgatcgtaattaacaaatataatacttttagaagagaggccctgttagacatgagtggacagctttggaatcaaacaaactagagttggaatgttggcttcacttcattccttgagctgtgtgaccttgggtaagtaacttaacctctctagacttcagttttctcaactgtaaaattaggaaaatagcaacttcgtaagattattgaggatgtgattatgcacattgatcagtaagtggtcaatgtaatcatatcatcactgctactataattcaattttcaatttaaggataatgttctcttatatatttaatttttcctcattattctaaaacttagaactcctccatatataattaaaagtgtgaaaatctaaaaatacttctgccagtacaagatgcacagacacatacacacttaattcaaagacatatgggtacttagaatattgaagtattttctaaattgttttctattttactcagatcatttctagcaccaactcaacctttgctttttggatgagtttggtaaggattaattctacttccaatttggtgtgtttggtgtgcca

SEQ ID NO: 118800 - DNA, 565 bp, Homo sapiens
  Payload ID: 3264
  Gene Symbol: C2orf74
  Gene Name: chromosome 2 open reading frame 74
  ENST ID: ENST00000398622
  CDS Start-End: 83-241
ttgacgtcgtccgagagtcttaaaatcctgctctggccggattccagactcgtgggggaaaggctggatttcaacagatcacatggatcaaggccttagggaggtggttggggattcacgtatgccctggaccatctggagcccaagttgctgcagatcctgtcaccacgagtggacaccctctggccaccatagcaaagaagtctgcaggcaggagatggagtctcgctctgttgcctaggctggagtgcagtggcacgatctcagctcactgcaacctctgccttcccagttcaagcaattctcctgcctcagcctcccaggtagctgggattacagtttccaaggcaggaaaggtaaagagacaaagaaagtgccttgtacagatgcaaacggaggtgtagactgtgcagctgccaaagtggtgacaagcaatccagaggaccatgaaaggatcttaatgcaagtcatgaacttgaatgtgccgatgaggcctggcattcttgtccagagacagagtaaggaagtgttggccacacccttagaaaacagaagggacatggag

SEQ ID NO: 118801 - DNA, 879 bp, Homo sapiens
  Payload ID: 3264
  Gene Symbol: C2orf74
  Gene Name: chromosome 2 open reading frame 74
  ENST ID: ENST00000426997
  CDS Start-End: 251-598
gcacacagatgttagggttcgggcgagctatttggagcctgcgcagtcagatccgaggacatgttgacgtcgtccgagagtcttaaaatcctgctctggccggattccagactcgtgggggaaaggctgtttccaaggcaggaaaggtaaagagacaaagaaagtgccttgtacagatgcaaacggaggtgtagactgtgcagctgccaaagtggtgacaagcaatccagaggaccatgaaaggatcttaatgcaagtcatgaacttgaatgtgccgatgaggcctggcattcttgtccagagacagagtaaggaagtgttggccacacccttagaaaacagaagggacatggaggcagaagaggagaaccaaataaatgagaagcaagagcctgagaatgctggagaaactggtcaagaagaggatgatggtttgcagaaaatacacacatctgtcactagaactccttcagttgttgaaagccaaaaaagacctttaaaaggagtgacattttctagggaggtaattgttgtggatcttgggaatgaataccctacacctcgaagctatactcgagaacataaagagaggaaatgaagctcaaaaaagggtaagagtgaaagaaaatgtaacgtttgactaacgttgaaagactgagggtacaaaatcatgttgaaacaacaaaacaatggggaattaagcaaataaagatattattttacctttgtgcagaaaggagtgagccatgtgcaaaattctgtaagtaaaatacttagagcttgaatataattttttaaaaattcaaatctgagttcaagaaattgattgtattgcccttaaaactatctactcaaacactgttctggcatgtgaataaa

SEQ ID NO: 118802 - DNA, 887 bp, Homo sapiens
  Payload ID: 3264
  Gene Symbol: C2orf74
  Gene Name: chromosome 2 open reading frame 74
  Uniprot ID: A8MZ97
  ENST ID: ENST00000432605
  CDS Start-End: 1-585
atgagtcttctagctaaacctatgagctttgaaaccacagcaatcactttcttcatcatccttctaatttgcctcatttgcatcctcctcttattggtggtttttttatataaatgtttccaaggcaggaaaggtaaagagacaaagaaagtgccttgtacagatgcaaacggaggtgtagactgtgcagctgccaaagtggtgacaagcaatccagaggaccatgaaaggatcttaatgcaagtcatgaacttgaatgtgccgatgaggcctggcattcttgtccagagacagagtaaggaagtgttggccacacccttagaaaacagaagggacatggaggcagaagaggagaaccaaataaatgagaagcaagagcctgagaatgctggagaaactggtcaagaagaggatgatggtttgcagaaaatacacacatctgtcactagaactccttcagttgttgaaagccaaaaaagacctttaaaaggagtgacattttctagggaggtaattgttgtggatcttgggaatgaataccctacacctcgaagctatactcgagaacataaagagaggaaatgaagctcaaaaaagggtaagagtgaaagaaaatgtaacgtttgactaacgttgaaagactgagggtacaaaatcatgttgaaacaacaaaacaatggggaattaagcaaataaagatattattttacctttgtgcagaaaggagtgagccatgtgcaaaattctgtaagtaaaatacttagagcttgaatataattttttaaaaattcaaatctgagttcaagaaattgattgtattgcccttaaaactatctactcaaacactgttctggcatgtgaataaagtgatttttgtttgtacaaat

SEQ ID NO: 118803 - DNA, 423 bp, Homo sapiens
  Payload ID: 3264
  Gene Symbol: C2orf74
  Gene Name: chromosome 2 open reading frame 74
  ENST ID: ENST00000489686
  CDS Start-End: 340-423
gttgacgtcgtccgagagtcttaaaatcctgctctggccggattccagactcgtgggggaaaggctggatttcaacagatcacatggatcaaggccttagggaggtggttggggattcacgtatgccctggaccatctggagcccaagttgctgcagatcctgtcaccacgagtggacaccctctggccaccatagcaaagaagtctgcaggcaggagtttccaaggcaggaaaggtaaagagacaaagaaagtgccttgtacagatgcaaacggaggtgtagactgtgcagctgccaaagtggtgacaagcaatccagaggaccatgaaaggatcttaatgcaagtcatgaacttgaatgtgccgatgaggcctggcattcttgtccagagacagagtaaggaagtgttggccacaccctta

SEQ ID NO: 118804 - DNA, 726 bp, Homo sapiens
  Payload ID: 3264
  Gene Symbol: C2orf74
  Gene Name: chromosome 2 open reading frame 74
  ENST ID: ENST00000464909
  CDS Start-End: 97-444
gcgcagtcagatccgaggacatgttgacgtcgtccgagagtcttaaaatcctgctctggccggattccagactcgtgggggaaaggctggatcttaatgcaagtcatgaacttgaatgtgccgatgaggcctggcattcttgtccagagacagagtaaggaagtgttggccacacccttagaaaacagaagggacatggaggcagaagaggagaaccaaataaatgagaagcaagagcctgagaatgctggagaaactggtcaagaagaggatgatggtttgcagaaaatacacacatctgtcactagaactccttcagttgttgaaagccaaaaaagacctttaaaaggagtgacattttctagggaggtaattgttgtggatcttgggaatgaataccctacacctcgaagctatactcgagaacataaagagaggaaatgaagctcaaaaaagggtaagagtgaaagaaaatgtaacgtttgactaacgttgaaagactgagggtacaaaatcatgttgaaacaacaaaacaatggggaattaagcaaataaagatattattttacctttgtgcagaaaggagtgagccatgtgcaaaattctgtaagtaaaatacttagagcttgaatataattttttaaaaattcaaatctgagttcaagaaattgattgtattgcccttaaaactatctactcaaacactgttctggcatgtgaataaag

SEQ ID NO: 118805 - DNA, 1070 bp, Homo sapiens
  Payload ID: 3264
  Gene Symbol: C2orf74
  Gene Name: chromosome 2 open reading frame 74
  ENST ID: ENST00000488469
  CDS Start-End: 209-772
tcctctctcctctgggtcctgatagtttttggggtgagggaggtgagctgcgtgatcacacatgtcccagctcagtctcccctctggccacctcagcccccaccacagttatggagagaaattagccagtaaaacttaaagaacaagagaactgcattcaaattgagctggaaaagaatatttggacagtctgtgattgtgagagtggatgagtcttctagctaaacctatgagctttgaaaccacagcaatcactttcttcatcatccttctaatttgcctcatttgcatcctcctcttattggtggtttttttatataaatgtttccaaggcaggaaaggtaaagagacaaagaaagtgccttgtacagatgcaaacggaggtgtagactgtgcagctgccaaagtggtgacaagcaatccagaggaccatgaaaggcgagtgtggtgcaggatgcctggcattcttgtccagagacagagtaaggaagtgttggccacacccttagaaaacagaagggacatggaggcagaagaggagaaccaaataaatgagaagcaagagcctgagaatgctggagaaactggtcaagaagaggatgatggtttgcagaaaatacacacatctgtcactagaactccttcagttgttgaaagccaaaaaagacctttaaaaggagtgacattttctagggaggtaattgttgtggatcttgggaatgaataccctacacctcgaagctatactcgagaacataaagagaggaaatgaagctcaaaaaagggtaagagtgaaagaaaatgtaacgtttgactaacgttgaaagactgagggtacaaaatcatgttgaaacaacaaaacaatggggaattaagcaaataaagatattattttacctttgtgcagaaaggagtgagccatgtgcaaaattctgtaagtaaaatacttagagcttgaatataattttttaaaaattcaaatctgagttcaagaaattgattgtattgcccttaaaactatctactcaaacactgttctggcatgtgaataaagtgatttttgtttgtac

SEQ ID NO: 118806 - DNA, 676 bp, Homo sapiens
  Payload ID: 3265
  Gene Symbol: C2orf76
  Gene Name: chromosome 2 open reading frame 76
  Uniprot ID: Q3KRA6
  ENST ID: ENST00000334816
  CDS Start-End: 52-432
gcaaacgccgggagtagccgaaggggacgccgggaacaggaatttcttcacatggctcctggagaagtgaccatcacagttcgcctcatccgttcctttgaacatcgcaatttcaaacctgtagtgtatcacggagtgaatttggaccaaactgtaaaggaatttatcgtatttctaaagcaagatatccctttaaggaccaacctgccaccaccattcagaaattataaatatgatgcactaaagattattcatcaagcacataaatcaaagacaaatgaacttgtgttgagtttggaagatgacgaaagactcctgctgaaagaagacagcactctgaaagcagctggaatcgccagtgaaactgaaattgcattcttctgtgaagaagattataagaactacaaagctaatcccatttcatcctggtgaaaacatctcgagggcttcctttttgcatacctgtattaagctctttattccactgctgaatttttgaaattgacaaacaaatcttaaaaaattaatcccaggctatactctttgagctaaaatctggttatttctttctcttcaggtctttccttctctctttctttttctttgttgttgtaaaataatatattatgagaaaaacatttgatctttttaaagggaaataaattgttattaaaaa

SEQ ID NO: 118807 - DNA, 1150 bp, Homo sapiens
  Payload ID: 3265
  Gene Symbol: C2orf76
  Gene Name: chromosome 2 open reading frame 76
  Uniprot ID: Q3KRA6
  ENST ID: ENST00000409466
  CDS Start-End: 523-903
tcgagagttgggttcagtcctggcccgttgtggggacggcacgcgggggaaggggaggggacggagaccgaagaacggaggtccttatgtttcttttctttccttaaatcttgcccggcctgaagaggccggaagttgcatctctggacaagtaaactctgagacctgggaatggcgggcgggacccgctcctcccttggggtctagaggagacccccggagatggtccctgatgagcagcgtgatggtggaaagctggactggtctcccgaaaggcgaagccgaggcttcttcctctgaacttttgggccagctgaggggcccacggacatagggcacccacaataggcgtgtgtctgctgtgtgtttgtgttcggccgtcctgcttctctgtttccacacgtacacatgcccctgtgttactttggttcatcttctgtactctgtcagttttctgctggtcagaacatctgtgactgtgacagagctgtccaggattgcagtggataggaatttcttcacatggctcctggagaagtgaccatcacagttcgcctcatccgttcctttgaacatcgcaatttcaaacctgtagtgtatcacggagtgaatttggaccaaactgtaaaggaatttatcgtatttctaaagcaagatatccctttaaggaccaacctgccaccaccattcagaaattataaatatgatgcactaaagattattcatcaagcacataaatcaaagacaaatgaacttgtgttgagtttggaagatgacgaaagactcctgctgaaagaagacagcactctgaaagcagctggaatcgccagtgaaactgaaattgcattcttctgtgaagaagattataagaactacaaagctaatcccatttcatcctggtgaaaacatctcgagggcttcctttttgcatacctgtattaagctctttattccactgctgaatttttgaaattgacaaacaaatcttaaaaaattaatcccaggctatactctttgagctaaaatctggttatttctttctcttcaggtctttccttctctctttctttttctttgttgttgtaaaataatatattatgagaaaaacatttgatctttttaaagggaaataaattgttattaaaaatta

SEQ ID NO: 118808 - DNA, 747 bp, Homo sapiens
  Payload ID: 3265
  Gene Symbol: C2orf76
  Gene Name: chromosome 2 open reading frame 76
  Uniprot ID: Q3KRA6
  ENST ID: ENST00000409523
  CDS Start-End: 339-719
acggagaccgaagaacggaggtccttatgtttcttttctttccttaaatcttgcccggcctgaagaggccggaagttgcatctctggacaagtaaactctgagacctgggaatggcgggcgggacccgctcctcccttggggtctagaggagacccccggagatggtccctgatgagcagcgtgatggtggaaagctggactggtctcccgaaaggcgaagccgaggcttcttcctctgaacttttggcacgttctttgacttgcttgtggccgtagtgtcaggcctgtattgcacatttatgtctgtggtgcatttctccatctggaatttcttcacatggctcctggagaagtgaccatcacagttcgcctcatccgttcctttgaacatcgcaatttcaaacctgtagtgtatcacggagtgaatttggaccaaactgtaaaggaatttatcgtatttctaaagcaagatatccctttaaggaccaacctgccaccaccattcagaaattataaatatgatgcactaaagattattcatcaagcacataaatcaaagacaaatgaacttgtgttgagtttggaagatgacgaaagactcctgctgaaagaagacagcactctgaaagcagctggaatcgccagtgaaactgaaattgcattcttctgtgaagaagattataagaactacaaagctaatcccatttcatcctggtgaaaacatctcgagggcttcctttttgcat

SEQ ID NO: 118809 - DNA, 950 bp, Homo sapiens
  Payload ID: 3265
  Gene Symbol: C2orf76
  Gene Name: chromosome 2 open reading frame 76
  Uniprot ID: Q3KRA6
  ENST ID: ENST00000409877
  CDS Start-End: 542-922
acggagaccgaagaacggaggtccttatgtttcttttctttccttaaatcttgcccggcctgaagaggccggaagttgcatctctggacaagtaaactctgagacctgggaatggcgggcgggacccgctcctcccttggggtctagaggagacccccggagatggtccctgatgagcagcgtgatggtggaaagctggactggtctcccgaaaggcgaagccgaggcttcttcctctgaacttttggcacgttctttgacttgcttgtggccgtagtgtcaggcctgtattgcacatttatgtctgtggtgcatttctccatctgggccagctgaggggcccacggacatagggcacccacaataggcgtgtgtctgctgtgtgtttgtgttcggccgtcctgcttctctgtttccacacgtacacatgcccctgtgttactttggttcatcttctgtactctgtcagttttctgctggtcagaacatctgtgactgtgacagagctgtccaggattgcagtggataggaatttcttcacatggctcctggagaagtgaccatcacagttcgcctcatccgttcctttgaacatcgcaatttcaaacctgtagtgtatcacggagtgaatttggaccaaactgtaaaggaatttatcgtatttctaaagcaagatatccctttaaggaccaacctgccaccaccattcagaaattataaatatgatgcactaaagattattcatcaagcacataaatcaaagacaaatgaacttgtgttgagtttggaagatgacgaaagactcctgctgaaagaagacagcactctgaaagcagctggaatcgccagtgaaactgaaattgcattcttctgtgaagaagattataagaactacaaagctaatcccatttcatcctggtgaaaacatctcgagggcttcctttttgcat

SEQ ID NO: 118810 - DNA, 509 bp, Homo sapiens
  Payload ID: 3265
  Gene Symbol: C2orf76
  Gene Name: chromosome 2 open reading frame 76
  ENST ID: ENST00000414534
  CDS Start-End: 254-509
agttttgctgccgggagttggtcgagagttgggttcagtcctggcccgttgtggggacggcacgcgggggaaggggaggggacggagaccgaagaacggaggtccttatgtttcttttctttccttaaatcttgcccggcctgaagaggccggaagttgcatctctggacaagtaaactctgagacctgggaatggcgggcgggacccgctcctcccttggggtctagaggagacccccggagatggtccctgatgagcagcgtgatggtggaaagctggactggtctcccgaaaggcgaagccgaggcttcttcctctgaacttttggaatttcttcacatggctcctggagaagtgaccatcacagttcgcctcatccgttcctttgaacatcgcaatttcaaacctgtagtgtatcacggagtgaatttggaccaaactgtaaaggaatttatcgtatttctaaagcaagatatccctttaaggaccaacctgccaccaccattca

SEQ ID NO: 118811 - DNA, 3045 bp, Homo sapiens
  Payload ID: 3266
  Gene Symbol: C2orf78
  Gene Name: chromosome 2 open reading frame 78
  Uniprot ID: A6NCI8
  ENST ID: ENST00000409561
  CDS Start-End: 122-2890
ccaccaaaccgaccaccacctggtagcatcttggggtttcctgggcgtggcctgtaaatttgtatcatcacaaggggccagtgaccagtaaccagtgaccagtggccttcatactggacacatgcactggttggcttcagccacccagacatccgctagtatcgtctcttcttcccttctatctgcagttgatgtttcttcttctctgaccatgtcagaatatttccaaaatacgtctttacctggaactgcaaattctcggcagttctctcttcctgtggtgagcaatgcagctttcttaacaggaagcatctccaacttctccagagcctctgctccagccatcagctcagcatggctacagccatcagcctctggcacctccttccagccactcatgggcagtgcctacctttaccaacattctagcacaactatgttgtctggggttactggccagagccatatctgtacttcagctgcctcttatccaggcgtttttgagtgggatagtacagcaagcacagtaaagaagtcatcctcactcagggacttcactgtgactgtcattgatcagaacacagctgtctcttccatgtctatgacagcccagtattataaaacttcagataccaatactatggtccctctgtatccatcactatctgccagccttgttcaggggacactaactcaaattccaaatcagcagggccataacctgtcacttccctgccagataggaagccaggtctattactataatcaaggcacactggggcctcaactatcctgcctgcaatcttatggctctgtgtcatacacaggatatagggcttctgcccatcaaccagaaatggtgatggtgctgaaggaggttcagcccacaaatgtcctaccaccagtctctacttctgggatgtattactctgtgtcttctcaacccatcacagaaaccagtgttcaagtgatggaaacttccctggggatggatacttccctgggattgcaatctccaagccagacattttgtctgccacaaactccagaattctccaagtccttcagtagcagaaatacccagacacttgagagtaacccatcacctgagcttggggacatttcaataactccagtccagagtcctactaatctcttgacactgtctccagctccaagccaggaaaaaaatgagaatgagaatttggatgagattaaaaccaacctttcaaagcctctagatgtccaccagatcctaataggaaatcaagatcctccactacttcctgtagaaatccccgatattcacccgcttctggcctgcattgatcctcttggccaagaggagcagcctggttctgaaaatgccaatctaagaaataagagcctgagtcttgaggaccaagggatatttgaaaatgggattgagtctagcagtgatttggcagacatcactacatgggtggaggatacttacctccccccgatcttcagttccttacaagatcttgaccaacctgaaagtccctcagcaaagaaagccaaagataccagtgccatcaaggtaaatcaggtgcaggaaaagtcatgtgtcataaagggtcactctgatcaagtcaggaagaacaagcataaagcttccgagcctatccagggtgctcccaaggccaaaatccagccaaagaacccagagtgcctattagagagagaagtggttgttggcagtgctacagtcagtaacagcgcttctgtgaacaaggccaagcattctagcaacaaacctcacaaggctgcatccagcaggatcagcaaaactaagagccatgggcaggaaaagaccaaagggaacagaaagaacagctccaagaaatctgaagagagtaagcagtcagggaaaaaagtcaaggtagaagagaagcaaaccattcccaatatgaaacggaagaaaaatcaacctgagcttagccaaaagacccttaaaaagccccgaagctccctaggcatgcacatgctagagtccgtgcaagttttccatgcactcgggaaaaagatcgatatgaaaactggattctcttcctccaggaccctgggaagctcaagcaacacccaaaaccgccagccattcccagctctcaaaccatggctggatatccaacatgagggtaaaggcccggagaaaattcaagtcaaggcccagaaactagatggtagtgctgaaaaagagtgtacatctccatcccactctgagttgccaccacctgggaaggtcaagttgatacctttgccctttctgaccctggaccaacctcaagctcgacatgtttctcggcggccaaaccctctagcctcacgtaggcctgctgtggcttaccctgctcgacctgattctactaactcagctcaatcgaatgcagtcaatccatcccgaccagctcctaccaacacatctttgacaggtcctgccacaccagctcagccaatttcagccaaagcaacccaacccagttcagccaaccctacccagcctactgtccctcaatctgctgcttctaggccatcagcctacaaaacatcatcttgttcttctctgcagcgggagcctgtttccactgctgtgaccagtctccggtcactgcccaagcctcaaaatcaatttctaatccaagacttcagcctccaaccccgtccatggaggaaacccactgttcctgagccagtaatgtcaacgcccatcacagaagagcagaggccagagcgtgaggccatgaagagaaaggctcaacaagagcgtgagaatgctgccaaatacacctctttggggaaagtgcagtttttcattgaaagggaaagagatatggaaattgctgaatactatggctacacaatctaagagctgagattgttggttttactttggataccgctggttttccacatatatagatagatactaatttatttattctgatatatttttaaaacataataaagaaatgtaatagaattgattaatagataagtaataaagaggccttttgagttttg

SEQ ID NO: 118812 - DNA, 1238 bp, Homo sapiens
  Payload ID: 3267
  Gene Symbol: C2orf80
  Gene Name: chromosome 2 open reading frame 80
  Uniprot ID: Q0P641
  ENST ID: ENST00000341287
  CDS Start-End: 197-778
agcaaccaggaaaaagcatgtgttcctgatgtctgtgagcaccagtctgagatgcgcggatgcttcagcatgcctccagaagcagagaaagaacaaaagcactggaaccggtctccggttgcctctagactcagagaagctgggtctaagtgtagtgttagctgcagatacctgctcagctggctaagcctttaacatggaaagaaggctcataaagaaggaaatgaaaaagctcttgggagattatattggcatcagacttcgggaaaatgaatttgacccaaaaggaagacggcaactcacctttctagatgatatggcacactatgacttggccatcagtgttgctttgcaatggctggatccctcagaagacttaacttggctggagtgggaggaactgaaaataccactccatggcagacccatatatccaaatcgtagagaacgagaagctatgattttatcatcttatgctggaatcttaatgaacagtatcccgattgaggaagtctttaaaatttatggggctgattcttctgccgattctggtaccatcaaggttccccgagtttcatctctctgcctctccttgcacccctttgccatgttaacagcacccaaagcagcagcatacgcccgcaaacagagtgtcaagtcaagaaaggtaacaacaaataaaaatgccaccagcatctctgcaaaggaagcaaatgccacagaatggaaatcatcacaaaggttttcagacacacagccaaagcacaaagtcacttagaaaattggaattgtaccatggaacttcataatagattctctgggagcagacgagaagcatcatcttaaaaccacagctcttgccagtacatttttctttacaactgtttttggtacaactgcactgaagtgttatttttgatgttgagctttcttcttttagaagcatattgcatggctacattttcttaaaaaaaaaaactgtgaccttatgctacttcattgtgactggaagactgctggagaattcagaaagtatatagtatttctgtgttagagcaagctggctttgtagcacattttacaaatgtgtggcattgaatattgcacagtgatggagtgggaggcagatttccaaagagttaatccaaaataaaattaatctgtcattgattgcctttactgtgttctcatatgaaaagaatgtttaaatcatttcaataaagcattaaaaaaatgaa

SEQ ID NO: 118813 - DNA, 816 bp, Homo sapiens
  Payload ID: 3267
  Gene Symbol: C2orf80
  Gene Name: chromosome 2 open reading frame 80
  ENST ID: ENST00000451342
  CDS Start-End: 1-420
agacccatatatccaaatcgtagagaacgagaagctatgattttatcatcttatgctggaatcttaatgaacagtatcccgattgaggaagtctttaaaatttatggggctgattcttctgccgattctggtaccatcaaggttccccgagtttcatctctctgcctctccttgcacccctttgccatgttaacagcacccaaagcagcagcatacgcccgcaaacagatagagacggggtttcaccgtggtctcgatctcctgacctcgcgatctgcccgccttggcctcccaaagcgctgggattacaggcttgagccaccgcgcccggcccaactcttgggtcacttagaaaattggaattgtaccatggaacttcataatagattctctgggagcagacgagaagcatcatcttaaaaccacagctcttgccagtacatttttctttacaactgtttttggtacaactgcactgaagtgttatttttgatgttgagctttcttcttttagaagcatattgcatggctacattttcttaaaaaaaaaaactgtgaccttatgctacttcattgtgactggaagactgctggagaattcagaaagtatatagtatttctgtgttagagcaagctggctttgtagcacattttacaaatgtgtggcattgaatattgcacagtgatggagtgggaggcagatttccaaagagttaatccaaaataaaattaatctgtcattgattgcctttactgtgttctcatatgaaaagaatgtttaaatcatttcaataaagcattaaaaaaatgaataca

SEQ ID NO: 118814 - DNA, 722 bp, Homo sapiens
  Payload ID: 3267
  Gene Symbol: C2orf80
  Gene Name: chromosome 2 open reading frame 80
  ENST ID: ENST00000453017
  CDS Start-End: 19-393
gctggctaagcctttaacatggaaagaaggctcataaagaaggaaatgaaaaagctcttgggagattatattggcatcagacttcgggaaaatgaatttgacccaaaaggaagacggcaactcacctttctagatgatatggcacactatgacttggccatcagtgttgctttgcaatggctggatccctcagaagacttaacttggctggagtgggaggaactgaaaataccactccatggcagacccatatatccaaatcgtagagaacgagaagctatgattttatcatcttatgctggaatcttaatgaacagtatcccgattgaggaagtctttaaaatttatggggctgattcttctgccgattctggtaccatcaaggtcacttagaaaattggaattgtaccatggaacttcataatagattctctgggagcagacgagaagcatcatcttaaaaccacagctcttgccagtacatttttctttacaactgtttttggtacaactgcactgaagtgttatttttgatgttgagctttcttcttttagaagcatattgcatggctacattttcttaaaaaaaaaaactgtgaccttatgctacttcattgtgactggaagactgctggagaattcagaaagtatatagtatttctgtgttagagcaagctggctttgtagcacattttacaaatgtgtggcattgaatattgcac

SEQ ID NO: 118815 - DNA, 386 bp, Homo sapiens
  Payload ID: 3267
  Gene Symbol: C2orf80
  Gene Name: chromosome 2 open reading frame 80
  ENST ID: ENST00000449053
  CDS Start-End: 188-386
aagaacaaaagcactggaaccggtctccggttggtgagcgattctcaaaggggaatttgttaagagcaggcacttaatagaacagcccgagagacctgtaccacgattgcagcctctagactcagagaagctgggtctaagtgtagtgttagctgcagatacctgctcagctggctaagcctttaacatggaaagaaggctcataaagaaggaaatgaaaaagctcttgggagattatattggcatcagacttcgggaaaatgaatttgacccaaaaggaagacggcaactcacctttctagatgatatggcacactatgacttggccatcagtgttgctttgcaatggctggatccctcagaagacttaacttggctggagtggg

SEQ ID NO: 118816 - DNA, 979 bp, Homo sapiens
  Payload ID: 3267
  Gene Symbol: C2orf80
  Gene Name: chromosome 2 open reading frame 80
  ENST ID: ENST00000451346
  CDS Start-End: 3-527
agatgcgcggatgcttcagcatgcctccagaagcagagaaagaacaaaagcactggaaccggtctccggcacactatgacttggccatcagtgttgctttgcaatggctggatccctcagaagacttaacttggctggagtgggaggaactgaaaataccactccatggcagacccatatatccaaatcgtagagaacgagaagctatgattttatcatcttatgctggaatcttaatgaacagtatcccgattgaggaagtctttaaaatttatggggctgattcttctgccgattctggtaccatcaaggttccccgagtttcatctctctgcctctccttgcacccctttgccatgttaacagcacccaaagcagcagcatacgcccgcaaacagagtgtcaagtcaagaaaggtaacaacaaataaaaatgccaccagcatctctgcaaaggaagcaaatgccacagaatggaaatcatcacaaaggttttcagacacacagccaaagcacaaagtcacttagaaaattggaattgtaccatggaacttcataatagattctctgggagcagacgagaagcatcatcttaaaaccacagctcttgccagtacatttttctttacaactgtttttggtacaactgcactgaagtgttatttttgatgttgagctttcttcttttagaagcatattgcatggctacattttcttaaaaaaaaaaactgtgaccttatgctacttcattgtgactggaagactgctggagaattcagaaagtatatagtatttctgtgttagagcaagctggctttgtagcacattttacaaatgtgtggcattgaatattgcacagtgatggagtgggaggcagatttccaaagagttaatccaaaataaaattaatctgtcattgattgcctttactgtgttctcatatgaaaagaatgtttaaatcatttcaataaagcattaaa

SEQ ID NO: 118817 - DNA, 748 bp, Homo sapiens
  Payload ID: 3267
  Gene Symbol: C2orf80
  Gene Name: chromosome 2 open reading frame 80
  ENST ID: ENST00000428015
  CDS Start-End: 1-385
tgttgctttgcaatggctggatccctcagaagacttaacttggctggagtgggaggaactgaaaataccactccatggcagacccatatatccaaatcgtagagaacgagaagctatgattttatcatcttatgctggaatcttaatgaacagtatcccgattgaggaagtctttaaaatttatggggctgattcttctgccgattctggtaccatcaaggttccccgagtttcatctctctgcctctccttgcacccctttgccatgttaacagcacccaaagcagcagcatacgcccgcaaacagagtcacttagaaaattggaattgtaccatggaacttcataatagattctctgggagcagacgagaagcatcatcttaaaaccacagctcttgccagtacatttttctttacaactgtttttggtacaactgcactgaagtgttatttttgatgttgagctttcttcttttagaagcatattgcatggctacattttcttaaaaaaaaaaactgtgaccttatgctacttcattgtgactggaagactgctggagaattcagaaagtatatagtatttctgtgttagagcaagctggctttgtagcacattttacaaatgtgtggcattgaatattgcacagtgatggagtgggaggcagatttccaaagagttaatccaaaataaaattaatctgtcattgattgcctttactgtgttctcatatgaaaagaatgtttaaa

SEQ ID NO: 118818 - DNA, 460 bp, Homo sapiens
  Payload ID: 3267
  Gene Symbol: C2orf80
  Gene Name: chromosome 2 open reading frame 80
  ENST ID: ENST00000423952
  CDS Start-End: 210-460
gatacctgctcagctggctaagcctttaacatggaaagaaggctcataaagaaggaaatgaaaaagctcttgcacactatgacttggccatcagtgttgctttgcaatggctggatccctcagaagacttaacttggctggagtgggaggaactgaaaataccactccatggcagacccatatatccaaatcgtagagaacgagaagctatgattttatcatcttatgctggaatcttaatgaacagtatcccgattgaggaagtctttaaaatttatggggctgattcttctgccgattctggtaccatcaaggttccccgagtttcatctctctgcctctccttgcacccctttgccatgttaacagcacccaaagcagcagcatacgcccgcaaacagagtgtcaagtcaagaaaggtaacaacaaataaaaatgccaccagcatctctgcaaagga

SEQ ID NO: 118819 - DNA, 2227 bp, Homo sapiens
  Payload ID: 3268
  Gene Symbol: C2orf81
  Gene Name: chromosome 2 open reading frame 81
  ENST ID: ENST00000290390
  CDS Start-End: 310-2076
gagggttcccctggtcttaaaaggggcccaagcccccattctggcacaccccactccactgtcctggcagcagcaggtgtggccaatggaggggggtgctggcccccaggattcccccagccaaactgtctttgtcaccacgtgaggctcacacctttcatccttccccaccttccctagtccctgcactaggttggacagcccccattggctacaggaaagcgggaggggtgtgagtcccctactccctctttgcagtggccccagcccccttaccgtctgcctgggatctgagtacatattgcagtgatggagatgcagtcacctattgtccagaggcaggagaggcaggtccgagaccgcggggtgacccggtccaaggcggaaaaagtgcggccgcccactgtgccagtgccgcaggtggatattgtgcctgggcggctcagtgaggccgagtggatggcgcttacagccctcgaggagggcgaggacgtcgtaggggacatcttggccgacttgctggctcgagtcatggactctgctttcaaagtctacctgactcagcagtgcattccattcaccatcagccaggcccgggaggccatgctgcagatcaccgagtggcgcttcctggcccgggacgagggagaatctgcagtagctgaggaccccacatggggtgaggacgaggagccttcggcatgcacgacggactcctgggctcagggttcagtgcccgtgctgcacgcgtccacctcggagggcctggagaacttccaaggcgaagaccctgggggcgtggaccggatccctttaggaaggtcgtggatgggtcgaggctcccaggagcagatggaatcttgggagccttctccgcagctgagagtcacgtcggcccctcctcccacatcagagctgtttcaggaggcagggcccggaggtcctgtagaggaagcggacggccagtctagaggcctctcctcggccgggtccttgagcgcgagcttccaactgtcggtggaggaggcgcctgccgacgatgccgacccttctctggatccgtacctggtagccagcccccaggcctcaactgggaggggacaccccctcggcttccatttgtcgttggaagacctctactgttgcatgcctcaactggacgcggctggggatcggctggaactcaggtcagagggggtgccctgcatcgcctcgggcgtgttggtgtcctacccctctgtgggcggcgccacccgcccctccgcgtcctgccagcagcagcgggccgggcactcggatgtgcggctgagcgcccaccaccacaggatgcgccgcaaggcggccgtgaaacgcctggaccctgcgaggctcccgtgccactgggtgcgccctctggctgaggtcctggtcccagactctcaaacacgccccttggaagcctaccgcggacgccagcggggcgagaagaccaaggcccgggccgaaccccaagccctcggccccggcacccgtgtctccccggcagcgttcttccctctccggccaggcattcctttccgtgacttggactcgggccccgcactcctgttccccactttaaatttaggcctatcgtcgccatccctcgagtcaaagctgccactcccaaactccaggatccgcttcctcaccacacacccggtgctccctgatgtggcccgcagccgcagccccaagctgtggcccagtgtcaggtggcccagcggttgggaggggaaggccgagctgctgggcgagctgtgggctggccggacccgcgtgcctccacagggtctggagctggcagacagggagggccaggatcctggcagatggcctcgaaccacacccccggtccttgaagccacttcccaggtgatgtggaagcccgtgttgctgccagaagccctgaagctggcccctggtgtgagcatgtggaaccggagcacccaggtgttgctcagctctggtgtgcctgaacaagaggacaaagaaggtagcacctttcctcccgttgagcaacatcccatccagacaggtgccccaaagcccaggtgaccgtagcacagctaatgaagaactcagcccccaaagtgtggtcacgctcctctaagcctgctgcctccctctgatccctgagcctctggcagtagtaactggtccctccctctgctagccagaaataaacacctgagttgccttaggaact

SEQ ID NO: 118820 - DNA, 883 bp, Homo sapiens
  Payload ID: 3268
  Gene Symbol: C2orf81
  Gene Name: chromosome 2 open reading frame 81
  ENST ID: ENST00000518863
  CDS Start-End: 400-883
aaacaccagcgttgctgcgaccgcgttggcgatggcgcacgaaggctcgaggcaggagaggcaggtccgagaccgcggggtgacccggtccaaggcggaaaaagtgcggccgcccactgtgccagtgccgcaggtggatattgtgcctgggcggctcagtgaggccgagtggatggcgcttacagccctcgaggagggcgaggacgtcgtaggggacatcttggccgacttgctggctcgagtcatggactctgctttcaaagtctacctgactcagcaggtgggccgggatccgggtccttcagactcgtctccctctcccgcccctccctgccgacctgagatcctctctcgcctccgcagtgcattccattcaccatcagccaggcccgggaggccatgctgcagatcaccgagtggcgcttcctggcccgggacgagggagaatctgcagtagctgaggaccccacatggggtgaggacgaggagccttcggcatgcacgacggactcctgggctcagggttcagtgcccgtgctgcacgcgtccacctcggagggcctggagaacttccaaggcgaagtacactcctcaggagcctctccggactcctctgccattgctcctgctctcccctttccgacatctcactgcccgagtgcatttccccaggaccctgggggcgtggaccggatccctttaggaaggtcgtggatgggtcgaggctcccaggagcagatggaatcttgggagccttctccgcagctgagagtcacgtcggcccctcctcccacatcagagctgtttcaggaggcagggcccggaggtcctgtagaggaagcggacggccagtctagaggcctctcctcggccgggtccttga

SEQ ID NO: 118821 - DNA, 427 bp, Homo sapiens
  Payload ID: 3268
  Gene Symbol: C2orf81
  Gene Name: chromosome 2 open reading frame 81
  ENST ID: ENST00000518401
  CDS Start-End: 101-427
caccgctgctcccggcaaaccggagcatgcaccgcaggccagcggccgagttcgcccatcccagccatcacttttccaactagtccttagagaagggaagatgagcgagtcgagctcgaagtccagccagcccttggcctccaagcagaaaaaggacggcactgagaagcggggccgtggcaggccgcgcaagcagcctccgaggcaggagaggcaggtccgagaccgcggggtgacccggtccaaggcggaaaaagtgcggccgcccactgtgccagtgccgcaggtggatattgtgcctgggcggctcagtgaggccgagtggatggcgcttacagccctcgaggagggcgaggacgtcgtaggggacatcttggccgacttgctggctcgagtcatggactctgctttcaaagtctacctgact

SEQ ID NO: 118822 - DNA, 898 bp, Homo sapiens
  Payload ID: 3268
  Gene Symbol: C2orf81
  Gene Name: chromosome 2 open reading frame 81
  ENST ID: ENST00000517896
  CDS Start-End: 310-898
gagggttcccctggtcttaaaaggggcccaagcccccattctggcacaccccactccactgtcctggcagcagcaggtgtggccaatggaggggggtgctggcccccaggattcccccagccaaactgtctttgtcaccacgtgaggctcacacctttcatccttccccaccttccctagtccctgcactaggttggacagcccccattggctacaggaaagcgggaggggtgtgagtcccctactccctctttgcagtggccccagcccccttaccgtctgcctgggatctgagtacatattgcagtgatggagatgcagtcacctattgtccagaggcaggagaggcaggtccgagaccgcggggtgacccggtccaaggcggaaaaagtgcggccgcccactgtgccagtgccgcaggtggatattgtgcctgggcggctcagtgaggccgagtggatggcgcttacagccctcgaggagggcgaggacgtcgtaggggacatcttggccgacttgctggctcgagtcatggactctgctttcaaagtctacctgactcagcagtgcattccattcaccatcagccaggcccgggaggccatgctgcagatcaccgagtggcgcttcctggcccgggacgagggagaatctgcagtagctgaggaccccacatggggtgaggacgaggagccttcggcatgcacgacggactcctgggctcagggttcagtgcccgtgctgcacgcgtccacctcggagggcctggagaacttccaaggcgaagtacactcctcaggagcctctccggactcctctgccattgctcctgctctcccctttccgacatctcactgcccgagtgcatttccccaggaccctgggggcgtggaccgga

SEQ ID NO: 118823 - DNA, 2407 bp, Homo sapiens
  Payload ID: 3268
  Gene Symbol: C2orf81
  Gene Name: chromosome 2 open reading frame 81
  ENST ID: ENST00000517883
  CDS Start-End: 693-2255
ttttttttttttttttttgagacgcagtcttgctctgtcgccaggctggggtgcagtggcgcagtctctgctcactgcaacctccatctcccgggttcaagtgactctccttcctcagcctccccacttcagtttctttatctgtcaattgtggttagtgggctgttaatgaaaattattaggtcaaacatctactaagtatctgtcacatagtaggctcttcgtcaattggcccttttccttcccactagacaacttgagaaagcttcctcctagcctatagctactcttccgttccacttcttggtttcctgctctgattgccatgttttgttctcacagaggcaggagaggcaggtccgagaccgcggggtgacccggtccaaggcggaaaaagtgcggccgcccactgtgccagtgccgcaggtggatattgtgcctgggcggctcagtgaggccgagtggatggcgcttacagccctcgaggagggcgaggacgtcgtaggggacatcttggccgacttgctggctcgagtcatggactctgctttcaaagtctacctgactcagcaggtgggccgggatccgggtccttcagactcgtctccctctcccgcccctccctgccgacctgagatcctctctcgcctccgcagtgcattccattcaccatcagccaggcccgggaggccatgctgcagatcaccgagtggcgcttcctggcccgggacgagggagaatctgcagtagctgaggaccccacatggggtgaggacgaggagccttcggcatgcacgacggactcctgggctcagggttcagtgcccgtgctgcacgcgtccacctcggagggcctggagaacttccaaggcgaagtacactcctcaggagcctctccggactcctctgccattgctcctgctctcccctttccgacatctcactgcccgagtgcatttccccaggaccctgggggcgtggaccggatccctttaggaaggtcgtggatgggtcgaggctcccaggagcagatggaatcttgggagccttctccgcagctgagagtcacgtcggcccctcctcccacatcagagctgtttcaggaggcagggcccggaggtcctgtagaggaagcggacggccagtctagaggcctctcctcggccgggtccttgagcgcgagcttccaactgtcggtggaggaggcgcctgccgacgatgccgacccttctctggatccgtacctggtagccagcccccaggcctcaactgggaggggacaccccctcggcttccatttgtcgttggaagacctctactgttgcatgcctcaactggacgcggctggggatcggctggaactcaggtcagagggggtgccctgcatcgcctcgggcgtgttggtgtcctacccctctgtgggcggcgccacccgcccctccgcgtcctgccagcagcagcgggccgggcactcggatgtgcggctgagcgcccaccaccacaggatgcgccgcaaggcggccgtgaaacgcctggaccctgcgaggctcccgtgccactgggtgcgccctctggctgaggtcctggtcccagactctcaaacacgccccttggaagcctaccgcggacgccagcggggcgagaagaccaaggcccgggccgaaccccaagccctcggccccggcacccgtgtctccccggcagcgttcttccctctccggccaggcattcctttccgtgacttggactcgggccccgcactcctgttccccactttaaatttaggcctatcgtcgccatccctcgagtcaaagctgccactcccaaactccaggatccgcttcctcaccacacacccggtgctccctgatgtggcccgcagccgcagccccaagctgtggcccagtgtcaggtggcccagcggttgggaggggaaggccgagctgctgggcgagctgtgggctggccggacccgcgtgcctccacagggtctggagctggcagacagggagggccaggatcctggcagatggcctcgaaccacacccccggtccttgaagccacttcccaggtgatgtggaagcccgtgttgctgccagaagccctgaagctggcccctggtgtgagcatgtggaaccggagcacccaggtgttgctcagctctggtgtgcctgaacaagaggacaaagaaggtagcacctttcctcccgttgagcaacatcccatccagacaggtgccccaaagcccaggtgaccgtagcacagctaatgaagaactcagcccccaaagtgtggtcacgctcctctaagcctgctgcctccctctgatccctgagcctctggcagtagtaactggtccctccctctgctagccagaaataaacacctgagttgccttaggaacta

SEQ ID NO: 118824 - DNA, 1902 bp, Homo sapiens
  Payload ID: 3268
  Gene Symbol: C2orf81
  Gene Name: chromosome 2 open reading frame 81
  ENST ID: ENST00000612891
  CDS Start-End: 1-1749
atggcgcacgaaggctcgaggcaggtccgagaccgcggggtgacccggtccaaggcggaaaaagtgcggccgcccactgtgccagtgccgcaggtggatattgtgcctgggcggctcagtgaggccgagtggatggcgcttacagccctcgaggagggcgaggacgtcgtaggggacatcttggccgacttgctggctcgagtcatggactctgctttcaaagtctacctgactcagcagtgcattccattcaccatcagccaggcccgggaggccatgctgcagatcaccgagtggcgcttcctggcccgggacgagggagaatctgcagtagctgaggaccccacatggggtgaggacgaggagccttcggcatgcacgacggactcctgggctcagggttcagtgcccgtgctgcacgcgtccacctcggagggcctggagaacttccaaggcgaagaccctgggggcgtggaccggatccctttaggaaggtcgtggatgggtcgaggctcccaggagcagatggaatcttgggagccttctccgcagctgagagtcacgtcggcccctcctcccacatcagagctgtttcaggaggcagggcccggaggtcctgtagaggaagcggacggccagtctagaggcctctcctcggccgggtccttgagcgcgagcttccaactgtcggtggaggaggcgcctgccgacgatgccgacccttctctggatccgtacctggtagccagcccccaggcctcaactgggaggggacaccccctcggcttccatttgtcgttggaagacctctactgttgcatgcctcaactggacgcggctggggatcggctggaactcaggtcagagggggtgccctgcatcgcctcgggcgtgttggtgtcctacccctctgtgggcggcgccacccgcccctccgcgtcctgccagcagcagcgggccgggcactcggatgtgcggctgagcgcccaccaccacaggatgcgccgcaaggcggccgtgaaacgcctggaccctgcgaggctcccgtgccactgggtgcgccctctggctgaggtcctggtcccagactctcaaacacgccccttggaagcctaccgcggacgccagcggggcgagaagaccaaggcccgggccgaaccccaagccctcggccccggcacccgtgtctccccggcagcgttcttccctctccggccaggcattcctttccgtgacttggactcgggccccgcactcctgttccccactttaaatttaggcctatcgtcgccatccctcgagtcaaagctgccactcccaaactccaggatccgcttcctcaccacacacccggtgctccctgatgtggcccgcagccgcagccccaagctgtggcccagtgtcaggtggcccagcggttgggaggggaaggccgagctgctgggcgagctgtgggctggccggacccgcgtgcctccacagggtctggagctggcagacagggagggccaggatcctggcagatggcctcgaaccacacccccggtccttgaagccacttcccaggtgatgtggaagcccgtgttgctgccagaagccctgaagctggcccctggtgtgagcatgtggaaccggagcacccaggtgttgctcagctctggtgtgcctgaacaagaggacaaagaaggtagcacctttcctcccgttgagcaacatcccatccagacaggtgccccaaagcccaggtgaccgtagcacagctaatgaagaactcagcccccaaagtgtggtcacgctcctctaagcctgctgcctccctctgatccctgagcctctggcagtagtaactggtccctccctctgctagccagaaataaacacctgagttgccttaggaactag

SEQ ID NO: 118825 - DNA, 465 bp, Homo sapiens
  Payload ID: 3269
  Gene Symbol: C2orf82
  Gene Name: chromosome 2 open reading frame 82
  Uniprot ID: Q6UX34
  ENST ID: ENST00000331342
  CDS Start-End: 59-424
gttaaccagcgcagtcctccgtgcgtcccgcccgccgctgccctcactcccggccaggatggcatcctgtctggccctgcgcatggcgctgctgctggtctccggggttctggcccctgcggtgctcacagacgatgttccacaggagcccgtgcccacgctgtggaacgagccggccgagctgccgtcgggagaaggccccgtggagagcaccagccccggccgggagcccgtggacaccggtcccccagcccccaccgtcgcgccaggacccgaggacagcaccgcgcaggagcggctggaccagggcggcgggtcgctggggcccggcgctatcgcggccatcgtgatcgccgccctgctggccacctgcgtggtgctggcgctcgtggtcgtcgcgctgagaaagttttctgcctcctgaagcgaataaaggggccgcgcccggccgcggcgcgactcggc

SEQ ID NO: 118826 - DNA, 663 bp, Homo sapiens
  Payload ID: 3269
  Gene Symbol: C2orf82
  Gene Name: chromosome 2 open reading frame 82
  Uniprot ID: Q6UX34
  ENST ID: ENST00000409230
  CDS Start-End: 248-613
gagccaggcccagcctggaaatggatgtcataagtgcacaggggtctagggaggcagagagcgaaagaggaaacaggagcgttttaggaaagactagagctgcctgagggtttggatcaaaactgctttaaaagtccttcttcaacaagcactgagcacctactccgggccaggcatggagaacccagagttaaccagcgcagtcctccgtgcgtcccgcccgccgctgccctcactcccggccaggatggcatcctgtctggccctgcgcatggcgctgctgctggtctccggggttctggcccctgcggtgctcacagacgatgttccacaggagcccgtgcccacgctgtggaacgagccggccgagctgccgtcgggagaaggccccgtggagagcaccagccccggccgggagcccgtggacaccggtcccccagcccccaccgtcgcgccaggacccgaggacagcaccgcgcaggagcggctggaccagggcggcgggtcgctggggcccggcgctatcgcggccatcgtgatcgccgccctgctggccacctgcgtggtgctggcgctcgtggtcgtcgcgctgagaaagttttctgcctcctgaagcgaataaaggggccgcgcccggccgcggcgcgactcggctgcactcct

SEQ ID NO: 118827 - DNA, 561 bp, Homo sapiens
  Payload ID: 3269
  Gene Symbol: C2orf82
  Gene Name: chromosome 2 open reading frame 82
  Uniprot ID: Q6UX34
  ENST ID: ENST00000409533
  CDS Start-End: 146-511
tcctaagtcagactttgtgcttgctctccctaggaatgctgatacctgattctagttatggatatggaggcaaggagaagttgttaggttaaccagcgcagtcctccgtgcgtcccgcccgccgctgccctcactcccggccaggatggcatcctgtctggccctgcgcatggcgctgctgctggtctccggggttctggcccctgcggtgctcacagacgatgttccacaggagcccgtgcccacgctgtggaacgagccggccgagctgccgtcgggagaaggccccgtggagagcaccagccccggccgggagcccgtggacaccggtcccccagcccccaccgtcgcgccaggacccgaggacagcaccgcgcaggagcggctggaccagggcggcgggtcgctggggcccggcgctatcgcggccatcgtgatcgccgccctgctggccacctgcgtggtgctggcgctcgtggtcgtcgcgctgagaaagttttctgcctcctgaagcgaataaaggggccgcgcccggccgcggcgcgactcggctgcactcct

SEQ ID NO: 118828 - DNA, 357 bp, Homo sapiens
  Payload ID: 3269
  Gene Symbol: C2orf82
  Gene Name: chromosome 2 open reading frame 82
  ENST ID: ENST00000448993
  CDS Start-End: 299-357
aatggtctaactggtgcaatcatgaagagagttaatggttaacagacattggccaataacaaaacaccccatggactgtgactcgagtatccaacaggcagtcagagctctcccggtctgaaagttgcattgccactgctaactttgggattgcatcagagaggccctgagtggggttgagatgaggaatgctgatacctgattctagttatggatatggaggcaaggagaagttgttaggttaaccagcgcagtcctccgtgcgtcccgcccgccgctgccctcactcccggccaggatggcatcctgtctggccctgcgcatggcgctgctgctggtctccggggttctggcccc

SEQ ID NO: 118829 - DNA, 1844 bp, Homo sapiens
  Payload ID: 3270
  Gene Symbol: C2orf83
  Gene Name: chromosome 2 open reading frame 83
  Uniprot ID: Q53S99
  ENST ID: ENST00000264387
  CDS Start-End: 88-540
ttttgtatttgaatgcgcatgtgtgtgtccttttaaaactctttccatttgtacaatgacagatttcagattggagttaatctgagcatggaagactatgccctgacgtttggaattaatcccttcattgccttgatgattcaacccatcgtgacgatgactgtggttgacaaccaaggactggggcttcctgttgacattcagcacaaagcaaagccctcgccaaaagccagccagatgctgccacctgatcttggacctcccagcttccagaacttattaagtccatctgagaaactagagccttgggacccagggatgaggaaacttaccgtacagacatgcgggctgaccttcattcaccctgcgggccatggcctctgccatccaactgcagaggcttcagccgaaactctctccagcactgccctaaacagaccaagtgtgagggagggagcatgtaatgaaaagtccacagagaacaagaagccacaagattcggtgctctggagccattctagatggtttcaggggaactagcttcccacctctgacagggataccatggcaaataccactctttgcctaggattataattctttgtgcacaatgcatcccatcccaaagacagtccacagcaggacttgctccatctctgaactggtcttacccccttaaacctgcctttatatctaggagtttctttattttattttatttttttgagacagagtctcgctccattgcccaggctggactgcagcggcgtgatctcagctcactgcaacctccacctcctgggttcaagtgattcttgtgcctcagcctcccaagtagctgggattaaaggcacgtgccaccatgactggccaatttttatatttttagtagagatgaggtttcaccatgttggccaggctggtctcaaactcttgacttcaagtgatccgcccgcctcagcctcccaaagtgctgggattacaggtgtgagccaccaggcccagcctatatctaggagtctcttgatgagcattggtcgacagaaagaagtctcttctaaaaattgttaatgcttttatagactactcatagtctgagtcataaaacatcatttgcctttcaatttataccttccaagtgaatatgattattgaggattatctaattattatctacgtttctctctagatataaaaaacaccatagatcctatacacacaaaaatggtttttctatcagaaatggactcactcgcctggcaaaaggacacagattagattattctaatctcaaggccccttaggcttatgaattcaaaaaaaaaaatagaagaaatgaacaaaaacttaaatcacagtttgttattaagtaatatctgaaatgaattagaaagaaaccataagccttaacaatactccaatcacagttaaattaatttagacagaaaagcaaatagcaattgacttgaaaataagaagtggagccgaaggtggatacaagaaatccaggagggctaagataaatcccaaatccaatgttcatcaatgcctacacattcagtacaacctgatggcattaattctgtggttggggaaatgtgaaagtgaaatcgataataccacagttctaaatgtgcactgttggctgaacttatggtgtggtggggggtggtaaaaattaggcttctaagaaaggatgggactctgccctccaggcaaggagtaaatggccccagcagatggaaaactaaagcaaatgtaatcacctgcattttgaaaataggtgtgtttctgagaatttgtttgaattagttctttgtaaataaaacaggattttgaatgca

SEQ ID NO: 118830 - DNA, 2086 bp, Homo sapiens
  Payload ID: 3270
  Gene Symbol: C2orf83
  Gene Name: chromosome 2 open reading frame 83
  Uniprot ID: Q53S99
  ENST ID: ENST00000409066
  CDS Start-End: 236-526
atcccacggaatgttaaaatacattgcaccatcccatttgtctatttcttcagtctatctctgctaaaagagctttcagaaagaaactgtcaatagaaacctgggcttcctcagcagaccaaagccttgagaagaacacaattcgctgttttgtatttgaatgcgcatgtgtgtgtccttttaaaactctttccatttgtacaatgacagatttcagattggagttaatctgagcatggaagactatgccctgacgtttggaattaatcccttcattgccttgatgattcaacccatcgtgacgatgactgtggttgacaaccaaggactggggcttcctgttgacattcagcacaaagcaaagccctcgccaaaagccagccagatgctgccacctgatcttggacctcccagcttccagaactgcttcacctgtagaactgccccctcccttgtgatggttctcagctggaagagcggggtcaggagagaagtgccagttcatccatcttacgctaagtattaagtccatctgagaaactagagccttgggacccagggatgaggaaacttaccgtacagacatgcgggctgaccttcattcaccctgcgggccatggcctctgccatccaactgcagaggcttcagccgaaactctctccagcactgccctaaacagaccaagtgtgagggagggagcatgtaatgaaaagtccacagagaacaagaagccacaagattcggtgctctggagccattctagatggtttcaggggaactagcttcccacctctgacagggataccatggcaaataccactctttgcctaggattataattctttgtgcacaatgcatcccatcccaaagacagtccacagcaggacttgctccatctctgaactggtcttacccccttaaacctgcctttatatctaggagtttctttattttattttatttttttgagacagagtctcgctccattgcccaggctggactgcagcggcgtgatctcagctcactgcaacctccacctcctgggttcaagtgattcttgtgcctcagcctcccaagtagctgggattaaaggcacgtgccaccatgactggccaatttttatatttttagtagagatgaggtttcaccatgttggccaggctggtctcaaactcttgacttcaagtgatccgcccgcctcagcctcccaaagtgctgggattacaggtgtgagccaccaggcccagcctatatctaggagtctcttgatgagcattggtcgacagaaagaagtctcttctaaaaattgttaatgcttttatagactactcatagtctgagtcataaaacatcatttgcctttcaatttataccttccaagtgaatatgattattgaggattatctaattattatctacgtttctctctagatataaaaaacaccatagatcctatacacacaaaaatggtttttctatcagaaatggactcactcgcctggcaaaaggacacagattagattattctaatctcaaggccccttaggcttatgaattcaaaaaaaaaaatagaagaaatgaacaaaaacttaaatcacagtttgttattaagtaatatctgaaatgaattagaaagaaaccataagccttaacaatactccaatcacagttaaattaatttagacagaaaagcaaatagcaattgacttgaaaataagaagtggagccgaaggtggatacaagaaatccaggagggctaagataaatcccaaatccaatgttcatcaatgcctacacattcagtacaacctgatggcattaattctgtggttggggaaatgtgaaagtgaaatcgataataccacagttctaaatgtgcactgttggctgaacttatggtgtggtggggggtggtaaaaattaggcttctaagaaaggatgggactctgccctccaggcaaggagtaaatggccccagcagatggaaaactaaagcaaatgtaatcacctgcattttgaaaataggtgtgtttctgagaatttgtttgaattagttctttgtaaataaaacaggattttgaatgc

SEQ ID NO: 118831 - DNA, 4035 bp, Homo sapiens
  Payload ID: 3271
  Gene Symbol: C2orf88
  Gene Name: chromosome 2 open reading frame 88
  Uniprot ID: Q9BSF0
  ENST ID: ENST00000340623
  CDS Start-End: 412-699
acatgctgccacttggctgagccgggcgccggcgagaaggcggcgccgctgccctggcagctggactgcactttgcccccgcccggcctcagctgccgcccgcccagacgccagcaagcccccctcccacgacagggctgctccgggagcttcggagacccgccccgggcctgagcgcaggctgcctccgggaccccacggctgtccggacgtgccatgggcgcgcagctgccgggcaacgtgttgtgtaaacactacacgtgaagagtggtgaaagggaacattgattactgaagtgccctggagagggaaagcactggtcaacatcacatggacaaatttcattgttttctaaagatggcctggaagtagtctttgccactgcttcctccacaaacagctcttcataacatgggctgcatgaaatcaaagcaaactttcccatttcctaccatatatgaaggtgagaagcagcatgagagtgaagaaccctttatgccagaagagagatgtctacctaggatggcttctccagttaatgtcaaagaggaagtgaaggaacctccagggaccaatactgtgatcttggaatatgcacaccgcctgtctcaggatatcttgtgtgatgccttgcagcaatgggcatgcaataacatcaagtaccatgacattccatacattgagagtgaggggccttgaggctgtaggatgacaacactttgactgtggaggtgctagtttgaataaatgtgacaaaagcaaaaactggtgtgaaaaagtacaaataactatctggatttaaaaatgtgtctacgataatgtcactattataagaacaactaggatgaaatgcattttaagtacttctatgttaacagcaatttctgtttagtcttagattttagtcatctgaagggctgaacagaggtcctgtgacacccaataatcagctgaatgtcacagcacttcttcctaagtaatggcatcaccaaagaaaatgctaaggaataaaaactgccccaaattccaatggttgaagtttatcctttaaaataacaatttttgtttgtttatacccaaaaaaagtccagatatgaaaagggcttttctaaaatttcttggcgagggaatggcactcaaatcatagtgattaacagtaagtcttgtttgtttgtcaaggatctctacttcttgacacaaatgaaccctgtctttaataagataagatatttatttttgtagatgagaagtgtaactaccaccttggacctcagggccctaactaattacagctgttactggacgactcagactttgtgcctaaagccatcttagagataacagtttatagaagccatgacattagtgtttattgcattgaattaagcccagtgatataactatacaagaaaacaagtaggggtaccttttacaaagagcaatccaataaatcttaaaaataacagaaacttagtctgcaaggtagaaagtttcagttttaattctgtattaagctttactatctcagaggtacagagggctggaatatgggcatttatttccagttttttcttgactagtaaggcggtcaccattaaaatagaccagataatgcatgaagatttacagttgtattgcaaaacggaaaagataaaactgtcctttgaggagagtactcgttttctgggtttttgttattttttagtggtaacacaagcctatagggcatttatagccacctattatactgtttccataagcctggctaccttttagggaagctattttttctctttcatttttactgtcacagcacatacacacacacctttttgttttaaaggattaagtactgtttgaagatcagtggtaacagaaaatttgggagggagaagaagaaattaagacatgacttgttagaaaattaagacttcagtttctagaattatcttttcatcaagatttggtagacattgagtttaaatggaaaggaaattatttaagcctgtgtatgttagatccacaatacaccattggtattgaaatataaaggttaaaaaaaaggcttatgacctctttaatgagataaatatgtatttgtcttgtaagcaggcagaaaatctacctctaattttaacactaatactttgaaacccacaatcaaatagagtgaattctccaagttacataagcaaggaaaacattatttgaaatatgccatgttttcgttgcctttggacacctcatcattcaactctaattttaccgagtcccgggatttgtactgtcccattgtacttgcaatctacaatttatataatagaaaaacaaccaaacccattcatacaaggatctgaagttataaggttaagggcagaaagtttcccataagtataaaacatttccaggtcatgaagagtagtttaggttgagtgacaaaagcctaggtgtggttgtttttcattcattttgcatctcacaccaagacatttttgctgcaaggtcatctgctgcttaaaatgtacaattaggtatataaaataagtacaatggtgaaaacacaaagccaggtaaagcagcatgccccactaaacttttcagtatacatagggacagacaagtgagttttggttgtatctaaatattttaatttcaggttccttctgtgccctgggccactatttcccaggggtgtgacagagatgcctgccagatccatatcaactagaagtctgatttctgttgctgcccttcctcagcaactatggcagtatacttttatcaccaagcaccactcccttgtccctgaatcacattttaatagagtacaatatcttctgtacaatatttctgaaacacttatgtctgaaatatatgctgtattgtatgttaacccatgacatatatgaactacaaggcttgcataatcagtgagctagtggataaatcaagacaggagcaaatgggagaaagatgaataaacaaatgaaaaaagatgaataaatgaataagagagatgaataaacaaatttacattacatgtgatagttatcatggtatggccttcatgacaagatggatgagaatatcactgataggatattagccttctttcatatctttatattgaaatatgggctttacttcaatttgaaggtctttcatgaacaataaaagagagtagaaggactgtctgagaaggcaggagacatataaaacagatgactgaaagactgactagctcctggaaagggaaacatttggaacatccagagtaagggcaaatgggcttctaccagcacaacaaagagcctccaggtggcaacatggaagcaggttatcagagaaaataaatgtgcaaattccttatttacaatgactcacttaaccccacaaacatgtttcactgctgccttccccagttgtcgcttatgtactgttgttacctttcagttacatgcctttgatcctaaaattctctacttttgttgccttatcagttctttgcaatctgcctgtggttatcagcacttaaagcacaattttgaaggggaaaaaaatgataatcaccttagtcccaaagaaataatttgtcaaactgccttattagtattaaaaacagacacactgaatgaagtagcatgatacgcatatatcctactcagtatcattggccttttatcaaatggggaaactatacttttgtattacatagttttagaaatcgaaagttagagactctttataagtaatgtcaaggaacagtaatttaaaaacaaagttctaacaaatatattgtttgcttaatcacaatgccctcaacttgtatttgaataactaaataggacatgtcttccttggagctgtgggcattagttcagaagcactacctgcatcttaattttcaaaacttaagttttattagcaaatcctcttctctgtaagacttagctatgaagtggtatattttttccaaatatttttctgaaaacatttgttgttgtaactgcacaataaaagtccagttgcaattaa

SEQ ID NO: 118832 - DNA, 998 bp, Homo sapiens
  Payload ID: 3271
  Gene Symbol: C2orf88
  Gene Name: chromosome 2 open reading frame 88
  Uniprot ID: Q9BSF0
  ENST ID: ENST00000396974
  CDS Start-End: 380-667
gggagccagctgttgtcatcattcaggagctatcagcctatttctacatactttatatctgttttggattatttggattccagttgtaagcctccatttagaaagggagcatgagaagcactgaaaagtaaggcactgtgatctacacggaaaccatatattgggctcacagctactgaatgagaccgactggtggagacagtttagtgaacctggtaaacactacacgtgaagagtggtgaaagggaacattgattactgaagtgccctggagagggaaagcactggtcaacatcacatggacaaatttcattgttttctaaagatggcctggaagtagtctttgccactgcttcctccacaaacagctcttcataacatgggctgcatgaaatcaaagcaaactttcccatttcctaccatatatgaaggtgagaagcagcatgagagtgaagaaccctttatgccagaagagagatgtctacctaggatggcttctccagttaatgtcaaagaggaagtgaaggaacctccagggaccaatactgtgatcttggaatatgcacaccgcctgtctcaggatatcttgtgtgatgccttgcagcaatgggcatgcaataacatcaagtaccatgacattccatacattgagagtgaggggccttgaggctgtaggatgacaacactttgactgtggaggtgctagtttgaataaatgtgacaaaagcaaaaactggtgtgaaaaagtacaaataactatctggatttaaaaatgtgtctacgataatgtcactattataagaacaactaggatgaaatgcattttaagtacttctatgttaacagcaatttctgtttagtcttagattttagtcatctgaagggctgaacagaggtcctgtgacacccaataatcagctgaatgtcacagcacttcttcctaagtaatggcatcaccaaagaaaatgctaaggaataaaaactgccccaaattccaa

SEQ ID NO: 118833 - DNA, 1441 bp, Homo sapiens
  Payload ID: 3271
  Gene Symbol: C2orf88
  Gene Name: chromosome 2 open reading frame 88
  Uniprot ID: Q9BSF0
  ENST ID: ENST00000409870
  CDS Start-End: 1093-1380
tttcattgacctctgcgatgcctcgctggcttctgctttcattgacctttgcgggtctgttcccgctgcggcgccggcagctgcttggtagttgcggggggcgtgagggcggtggcccagaccaaccggctggcagcccagctccgctccgcccgcccctgcctcggaccctgcgcctgaggaagtatcgaggcaaccctctgccacccgaagttcgtgggtcgctcccagagggcgcgccctggagccgagcgcccttgggcggccatctggaggccaggtgcgggccgcgaacccgcgaggagcgcgcggcgggcgcggcggcgacggcaggaggaggggccgggagcccgggcgccgccgaaggacgccccgtcctccacatgctgccacttggctgagccgggcgccggcgagaaggcggcgccgctgccctggcagctggactgcactttgcccccgcccggcctcagctgccgcccgcccagacgccagcaagcccccctcccacgacagggctgctccgggagcttcggagacccgccccgggcctgagcgcaggctgcctccgggaccccacggctgtccggacgtgccatgggcgcgcagctgccgggcaacgtgttgtgtaagtgaacatctgggaggtgggtgactggtgaagggcgggtgtctgtcggtctttgcttgtcagctgtgccttttagatttttcaatggcagaaacccatgagttacaggaggctttaattaaacgagaccgttctcagccagctgccgtggatagagcctcacatctccgtcccctaatcgagaagagttagcccctaccccttcaattttgttctgggcttcccagtgaaaggtatctcattatgagttgcaattccaccctgctgcctacctgaagagtgagtgaagattttcaggtaaacactacacgtgaagagtggtgaaagggaacattgattactgaagtgccctggagagggaaagcactggtcaacatcacatggacaaatttcattgttttctaaagatggcctggaagtagtctttgccactgcttcctccacaaacagctcttcataacatgggctgcatgaaatcaaagcaaactttcccatttcctaccatatatgaaggtgagaagcagcatgagagtgaagaaccctttatgccagaagagagatgtctacctaggatggcttctccagttaatgtcaaagaggaagtgaaggaacctccagggaccaatactgtgatcttggaatatgcacaccgcctgtctcaggatatcttgtgtgatgccttgcagcaatgggcatgcaataacatcaagtaccatgacattccatacattgagagtgaggggccttgaggctgtaggatgacaacactttgactgtggaggtgctagtttgaataaatgtgacaaaagc

SEQ ID NO: 118834 - DNA, 570 bp, Homo sapiens
  Payload ID: 3271
  Gene Symbol: C2orf88
  Gene Name: chromosome 2 open reading frame 88
  ENST ID: ENST00000409545
  CDS Start-End: 368-570
attcgaattgttacaaagttcagctagagatttccttctccctgtggagtttcactccctgctcctctggtcaccctcctgatggatctctgtggtgccaggcaggaatggcctgctaggggatgcagcgagatcccaggtcctttctgctgcttcctctaccactgtttttcactcggctctccaaattgactcagctccaggtaaacactacacgtgaagagtggtgaaagggaacattgattactgaagtgccctggagagggaaagcactggtcaacatcacatggacaaatttcattgttttctaaagatggcctggaagtagtctttgccactgcttcctccacaaacagctcttcataacatgggctgcatgaaatcaaagcaaactttcccatttcctaccatatatgaaggtgagaagcagcatgagagtgaagaaccctttatgccagaagagagatgtctacctaggatggcttctccagttaatgtcaaagaggaagtgaaggaacctccagggaccaatactgtgatcttggaatatgcacaccgcctgtctcagga

SEQ ID NO: 118835 - DNA, 486 bp, Homo sapiens
  Payload ID: 3271
  Gene Symbol: C2orf88
  Gene Name: chromosome 2 open reading frame 88
  ENST ID: ENST00000450357
  CDS Start-End: 397-486
cagaatagactagttcatatatccaagagcagggctcctgaagggcatggactctagcttattacagacataccctggcatctagcacaatacctggcacataatagcctccatttagaaagggagcatgagaagcactgaaaagtaaggcactgtgatctacacggaaaccatatattgggctcacagctactgaatgagaccgactggtggagacagtttagtgaacctggtaaacactacacgtgaagagtggtgaaagggaacattgattactgaagtgccctggagagggaaagcactggtcaacatcacatggacaaatttcattgttttctaaagatggcctggaagtagtctttgccactgcttcctccacaaacagctcttcataacatgggctgcatgaaatcaaagcaaactttcccatttcctaccatatatgaaggtgagaagcagcatgagagtgaagaaccctttatgcca

SEQ ID NO: 118836 - DNA, 692 bp, Homo sapiens
  Payload ID: 3271
  Gene Symbol: C2orf88
  Gene Name: chromosome 2 open reading frame 88
  Uniprot ID: Q9BSF0
  ENST ID: ENST00000443551
  CDS Start-End: 339-626
ctgccgcccgcccagacgccagcaagcccccctcccacgacagggctgctccgggagcttcggagacccgccccgggcctgagcgcaggctgcctccgggaccccacggctgtccggacgtgccatgggcgcgcagctgccgggcaacgtgttgtgtaagtgaacatctgggaggtaaacactacacgtgaagagtggtgaaagggaacattgattactgaagtgccctggagagggaaagcactggtcaacatcacatggacaaatttcattgttttctaaagatggcctggaagtagtctttgccactgcttcctccacaaacagctcttcataacatgggctgcatgaaatcaaagcaaactttcccatttcctaccatatatgaaggtgagaagcagcatgagagtgaagaaccctttatgccagaagagagatgtctacctaggatggcttctccagttaatgtcaaagaggaagtgaaggaacctccagggaccaatactgtgatcttggaatatgcacaccgcctgtctcaggatatcttgtgtgatgccttgcagcaatgggcatgcaataacatcaagtaccatgacattccatacattgagagtgaggggccttgaggctgtaggatgacaacactttgactgtggaggtgctagtttgaataaatgtgacaaaagcaaaaa

SEQ ID NO: 118837 - DNA, 3721 bp, Homo sapiens
  Payload ID: 3272
  Gene Symbol: C2orf91
  Gene Name: chromosome 2 open reading frame 91
  Uniprot ID: Q6ZV80
  ENST ID: ENST00000378711
  CDS Start-End: 91-486
ttcaagcaagtcacccaggtcaagcctgttctagaagaaacaactatagcaaaagccctaaggttggagtgtggctgccagagctcacacatggtgaggatgtccagaccattattcctcgattgggcctggagacccctctgcagcccctcccaatctctcccactgacctacggaccagaaggctggattttgcaatggaagggaacttgcaggcagcagacagctctgcactgtccctttgattttcctcaggcacctctgagagggagacacactctcagccaagtacccaacaagggacatgagaaggcttctgctgtgcagctgccagagaaacaggggacagatcaaagcaggagaggaccaacatctgcggtaaccaaagcaaggacaagttaccctgagtcagaaaccttcattgtgtatttgtgcagttacttttggaactcaagtaaaggagtttacatgtcaggttccacctgaattccttccatgcttttcagcgactgaaccatttgggtggcctggaagagcctgtgagctccctggagaaaggagacagtgtggatggagaagaatctggagtagagaggagtctggggaccctgcctttcaagtcgtttgtgtgagggctgcgttggtggcccaactagccagggaagggctatggtatgcggggtcaggcgggaataggcaggaaatgtttgtgataagaggcttcgcctcttgcaagctcctctggtttccagacccagctgcaggataagggcccaggagctgagcagggagcctcagaggaggctgctgcaagagccagctcttgggatttcagcaggcagagttgcaatcagaggcccctggggtccctgaagaccatgcctggggatagaaacgaccctgggaacccagccagggctgccttcctttgggatcagggattttcaatcatacttcagagggccaaatcaatcccttaagaaaaataaaacaaaacaaaccccagctttgttaatccaagttgctgagagggtgggaagtacagacttgaccccccaggggatttcatgcgctggattggtcccagttggagccattcattaatgttaaccagtagaaatggaaaatggaagggtgcactgacaaaagaccaggctggaagctctgagaaggaatctatcccaaagggatcatctgctggggataaatagagtcatcgaacagtgtgtcatgcaggcatttgcaaagcttggtgctccttagatttccagtgtcgcctctttgcccaaggcccagtgactccaccatctgtggttgacttggccagctcacaaaggagcaagatgtgcttcacaggaacaccccatgagcggggatgaggctacaggccacttgctattgtaccagctccccttcttaaggattagcagcttctatctatccctggaggctgcactgtaaatgcctgtgtaatgctaatttgtggttggcaggagattgattgggaaggagcaggacaatggcaagaggaggctgagctccctcctcctcctggtgtaatggtgtgcttgcatgctgtgtgtgtgtgtgtgtgtgtgtgtgtgtgtgtacgtgtgtgtacgtgtgtgtcttctgggagaaatgtagcaacaagcccacagaagagatgattattcaaagagaggaagaagatttactcaccgatgcccagaatctgaaaggcatgtctggagtggagagatgggagtctatgaagcacaaatccagggagattttttgatgggaataagtgacaacccatcactcttaacatattctattcattagaaccaagtccctaagtccagcccacgcttagaggaagggattacatgggaggcaagaatcactgagagccatttcggaaactgcctacacttagaaaaacacttcaagagctcccggccaagggcctggcacatagcaagtgctcaaggaattgttacttggaccagtgactcttctaggatgtgatctaggttttcccatagtggcctgggtctctgctgtcccatctttattcctgttggcactgctgggttttcagcaaaggctttttcctctgacactgggaggtttgtgactaggctctctgggtgtgggccagcagacaggatagacgctaacttacactcttgctgtcttccgaacagcctcttcatgaccatgtgtggtcttactttgtggtcagtgtacagatattttaatttcctgctcacctgctcagaggaggatctgatttcttcttgcatttatttttctctccggcagcctgtggacaggtatttctgtctgaccatctggtagccattcacctttatggtggcttgagaaaggaatcaatttcacttgtttctttagtaatatctgcctcttttgacagcaagttacctttatcacctcttaaaattcttactatgttgcaccttctgttaccttgggggctctttcaatcccctaactttgtgcaactgcatctccctctttggtttagcttctcaggcctttctttttgcaccacggtttaatacattccatatatacttctaagtctgctggtacctctccccacccactgcctgctgagagtgacggattcttcctggctggaccaagtctaaagtaatcagaaaacaactgaaagaggaaagctgacccctgccctcatcctgcccctctgcagacttcttgaggccttttgtctaattgtggtgggtaatgtgggcagggtaaaaaatggggaagatagagcaaattttctgggcaagaatgaggggagaggtgagtggagcgtcttcatctcgctctggttttgtatcatgggtgtctccagggcctactgtctcctctgagactcctagaaagtgaggagccatggattggtatcctactaacagatggaacatcagaggcccgtggtaaggagtataataagctcagctcgccatgctctgttttgtttttgttggaagaagtgttgaaaaaaggagtggttatacactggcctatctagctatagaatacaaacacttagggtgagcagcagggaatgccttttctgaaaatgatgctgcatggaatggatgattaattccctggttaaaatgaagccagactatctttcagagtcttaagcctcctcccaataccctccacatactagtttctaattggttaatgaatatggtcactatttctagggcctgttgctccagtgtagtggtcaagagtgtacactcctatttacaatagcaaagacatggaaccaacccaaatgcccatcaatgatagactggatgaagaaaatattgtacatatataccatggaatactatgcagccctaagaaggaatgagatcgtgtcctttgcagggacatggatgaagctggaagccatcatcctcagcaaactaacacaggaacagaaaaccaaataccacacgttctcactcataagtgggagctgaacagtgagaacacatggacacagggaggggaacatcacacaccaaggcctgtctggtgtggggaggggagggagagcatcaggacaaatagctaatgcatgtggggcttaaacctagatgacgggttgataggtgcagcaatccactatggcacacatatacctatgtaacaaaccataccttctgcacatgtatcccagaacttaaagtaaaat

SEQ ID NO: 118838 - DNA, 393 bp, Homo sapiens
  Payload ID: 3272
  Gene Symbol: C2orf91
  Gene Name: chromosome 2 open reading frame 91
  ENST ID: ENST00000615044
  CDS Start-End: 1-393
atggtgaggatgtccagaccattattcctcgattgggcctggagacccctctgcagcccctcccaatctctcccactgacctacggaccagaaggctggattttgcaatggaagggaacttgcaggcagcagacagctctgcactgtccctttgattttcctcaggcacctctgagagggagacacactctcagccaagtacccaacaagggacatgagaaggcttctgctgtgcagctgccagagaaacaggggacagatcaaagcaggagaggaccaacatctgcggtaaccaaagcaaggacaagttaccctgagtcagaaaccttcattgtgtatttgtgcagttacttttggaactcaagtaaaggagtttacatgtcaggtaaagat

SEQ ID NO: 118839 - DNA, 730 bp, Homo sapiens
  Payload ID: 3273
  Gene Symbol: C20orf141
  Gene Name: chromosome 20 open reading frame 141
  Uniprot ID: Q9NUB4
  ENST ID: ENST00000380589
  CDS Start-End: 175-672
ggaggaggtgaggagggtttgctgggtgggtatgggggagggggagactctgcaggagcctaattccccactctgagctcacccttctgtctgcccgggccctaccccttcccctactctcacccttataatccttttcagcactaggtcttcccgtcacctccacctctctccatgacccggctctgcttacccagacccgaagcacgtgaggatccgatcccagttcctccaaggggcctgggtgctggggaggggtcaggtagtccagtgcgtccacctgtatccacctggggccctagctgggcccagctcctggacagtgtcctatggctgggggcactaggactgacaatccaggcagtcttttccaccactggcccagccctgctgctgcttctggtcagcttcctcacctttgacctgctccataggcccgcaggtcacactctgccacagcgcaaacttctcaccaggggccagagtcagggggccggtgaaggtcctggacagcaggaggctctactcctgcaaatgggtacagtctcaggacaacttagcctccaggacgcactgctgctgctgctcatggggctgggcccgctcctgagagcctgtggcatgcccttgaccctgcttggcctggctttctgcctccatccttgggcctgagagcccctccccacaactcagtgtccttcaaatatacaatgaccacccttcttcatca

SEQ ID NO: 118840 - DNA, 580 bp, Homo sapiens
  Payload ID: 3273
  Gene Symbol: C20orf141
  Gene Name: chromosome 20 open reading frame 141
  Uniprot ID: Q9NUB4
  ENST ID: ENST00000603872
  CDS Start-End: 65-562
actcccagaatgctgaccaaagtgggaggagcactaggtcttcccgtcacctccacctctctccatgacccggctctgcttacccagacccgaagcacgtgaggatccgatcccagttcctccaaggggcctgggtgctggggaggggtcaggtagtccagtgcgtccacctgtatccacctggggccctagctgggcccagctcctggacagtgtcctatggctgggggcactaggactgacaatccaggcagtcttttccaccactggcccagccctgctgctgcttctggtcagcttcctcacctttgacctgctccataggcccgcaggtcacactctgccacagcgcaaacttctcaccaggggccagagtcagggggccggtgaaggtcctggacagcaggaggctctactcctgcaaatgggtacagtctcaggacaacttagcctccaggacgcactgctgctgctgctcatggggctgggcccgctcctgagagcctgtggcatgcccttgaccctgcttggcctggctttctgcctccatccttgggcctgagagcccctccccacaact

SEQ ID NO: 118841 - DNA, 571 bp, Homo sapiens
  Payload ID: 3274
  Gene Symbol: C20orf144
  Gene Name: chromosome 20 open reading frame 144
  Uniprot ID: Q9BQM9
  ENST ID: ENST00000375222
  CDS Start-End: 63-524
gggcccagggggcagagcagacggagtgtgggccatcgtccccagtggtgaccagccctgccatgggaaactatagttcccacaaaaggaccaaagcacccaagcaggcccgcaaggagaggccggctgacatggacaaggcctggtggaaatcgttcctcaaccacctcactcggaagaagccggctaccaggatcgtgctgattctccccctggacaagcggcagccgctggccaacgctgggcaacggattgactacgcgtccggcgctgggctgggctccccggcggcacccagattgcgcggagcgggcgaaggtagcgagcgcgagccgaggatgccggtactgctgctgctgcggcggcaagaggcgcggcggccggaagagggcggggccagggcagctctgagctggccgcggctgctctcgcgcttccggtccccggggaaggctccccgcgaagccggccccgccgaggagcagccgcgcaaacggtgccgctgccctcgcccgcagctttaaacgcttggcccggaccccgcccaataaagagtgcgtggcaaccctgg

SEQ ID NO: 118842 - DNA, 1034 bp, Homo sapiens
  Payload ID: 3275
  Gene Symbol: C20orf173
  Gene Name: chromosome 20 open reading frame 173
  Uniprot ID: Q96LM9
  ENST ID: ENST00000246199
  CDS Start-End: 280-729
acatgctgtctctctgccctggcctcttccaccccatgcccagtcagagaccgttttgaggcattgcgactgcccttggttcagttccgggaagtgtggctgcccttctgagaccctcaactgctcctcctgccaccacacagccgacgaatggaactggcttgatgcgtgctccaggaagactatggggtacctgatgaggacaagagagtctatgacctctgacactgtgctctggtggttggtcagtggtcaacactgggcccggccatatcccccatgctttccgggcctcacccatctcccactttccgcccaaatccctgcccttggccctgtcttcacagcctctggatggagatctcacccacccagctctgttttctctcccctgggcccagcccccaatctccctcttgctgtttccagggcatgaactcagggagcgagcttgggaaattgtggaggaagctgtttaaagggattcccaggctctcggtgagccattttgatttctattgtgggacttgtgtgctgttggggcgcccacagatcccgcagggctccagccttggcaacgacatcgaccaataccccgtggttttcaggaatgccagcgaccagggctcctggatgcagctggagatgctactgcggaagctctctgacctggtgtggacttcagatgctctaagtgataagattttggaagatggtctggttccctagtggagtggaagatagcaaagacacggtcaccctctttggatttggatcagaatagcaaggaaagtgtttctatcactggaaggaggataatcagaccaagggctccaaggaaatactgcccacgtctagtgcaggagcagaaatcgaagtcatccatcagctagcgtgtggacaagctcactattcacacaagctcagcctagctgagtccatacaaatcctatttctgggtgggtaaagggcaggaggaaattgtaagatcagtctggtactgaataaaatcctggcctgattgtcttacctgt

SEQ ID NO: 118843 - DNA, 985 bp, Homo sapiens
  Payload ID: 3275
  Gene Symbol: C20orf173
  Gene Name: chromosome 20 open reading frame 173
  Uniprot ID: Q96LM9
  ENST ID: ENST00000374345
  CDS Start-End: 146-754
actgaggtattccttcccctctcaggactagccacatgctgtctctctgccctggcctcttccaccccatgcccagtcagagaccgttttgagggtagagaagccagtctacggcccaccacgggagccaccgcctgggccagacatgaagcgctggcagatttttgtcctgtgggtcttttgggtgctcatcctctggctgatgaccccctatctggatctgacacctgaatcagcaccccaggaaaaacgaatgtacttggtaccacagcattgcgactgcccttggttcagttccgggaagtgtggctgcccttctgagaccctcaactgctcctcctgccaccacacagccgacgaatggaactggcttgatgcgtgctccaggaagactatggggtacctgatgaggacaagagagtctatgacctctgacactgtgctctggtggttgggcatgaactcagggagcgagcttgggaaattgtggaggaagctgtttaaagggattcccaggctctcggtgagccattttgatttctattgtgggacttgtgtgctgttggggcgcccacagatcccgcagggctccagccttggcaacgacatcgaccaataccccgtggttttcaggaatgccagcgaccagggctcctggatgcagctggagatgctactgcggaagctctctgacctggtgtggacttcagatgctctaagtgataagattttggaagatggtctggttccctagtggagtggaagatagcaaagacacgcctcttcttcccggtgccaggtgtcggggccaatctactgtctgccaggggcaccatcatcagggccagagatcatgattcgatacaggagtttgggcctggtggctgcctatgtcctttcattgtggctgatcacctccttcctacaccagcactccagccagaaggacctccgtaatatggccaagatacacccaggaatctgc

SEQ ID NO: 118844 - DNA, 383 bp, Homo sapiens
  Payload ID: 3275
  Gene Symbol: C20orf173
  Gene Name: chromosome 20 open reading frame 173
  ENST ID: ENST00000424444
  CDS Start-End: 189-383
agccacatgctgtctctctgccctggcctcttccaccccatgcccagtcagagaccgttttgaggcattgcgactgcccttggttcagttccgggaagtgtggctgcccttctgagaccctcaactgctcctcctgccaccacacagccgacgaatggaactggcttgatgcgtgctccaggaagactatggggtacctgatgaggacaagagagtctatgacctctgacactgtgctctggtggttgggcatgaactcagggagcgagcttgggaaattgtggaggaagctgtttaaagggattcccaggctctcggtgagccattttgatttctattgtgggacttgtgtgctgttggggcgcccacagatcccgcagggc

SEQ ID NO: 118845 - DNA, 1059 bp, Homo sapiens
  Payload ID: 3275
  Gene Symbol: C20orf173
  Gene Name: chromosome 20 open reading frame 173
  Uniprot ID: Q96LM9
  ENST ID: ENST00000444723
  CDS Start-End: 146-754
actgaggtattccttcccctctcaggactagccacatgctgtctctctgccctggcctcttccaccccatgcccagtcagagaccgttttgagggtagagaagccagtctacggcccaccacgggagccaccgcctgggccagacatgaagcgctggcagatttttgtcctgtgggtcttttgggtgctcatcctctggctgatgaccccctatctggatctgacacctgaatcagcaccccaggaaaaacgaatgtacttggtaccacagcattgcgactgcccttggttcagttccgggaagtgtggctgcccttctgagaccctcaactgctcctcctgccaccacacagccgacgaatggaactggcttgatgcgtgctccaggaagactatggggtacctgatgaggacaagagagtctatgacctctgacactgtgctctggtggttgggcatgaactcagggagcgagcttgggaaattgtggaggaagctgtttaaagggattcccaggctctcggtgagccattttgatttctattgtgggacttgtgtgctgttggggcgcccacagatcccgcagggctccagccttggcaacgacatcgaccaataccccgtggttttcaggaatgccagcgaccagggctcctggatgcagctggagatgctactgcggaagctctctgacctggtgtggacttcagatgctctaagtgataagattttggaagatggtctggttccctagtggagtggaagatagcaaagacacggtcaccctctttggatttggatcagaatagcaaggaaagtgtttctatcactggaaggaggataatcagaccaagggctccaaggaaatactgcccacgtctagtgcaggagcagaaatcgaagtcatccatcagctagcgtgtggacaagctcactattcacacaagctcagcctagctgagtccatacaaatcctatttctgggtgggtaaagggcaggaggaaattgtaagatcagtctggtactgaataaaatcctggcctgattgtcttacctgt

SEQ ID NO: 118846 - DNA, 6869 bp, Homo sapiens
  Payload ID: 3276
  Gene Symbol: C20orf194
  Gene Name: chromosome 20 open reading frame 194
  Uniprot ID: Q5TEA3
  ENST ID: ENST00000252032
  CDS Start-End: 69-3602
gccgccctgcgggcaactgagaccctcgcagctgcaccgtcctcctccgccgccagtcgtccgccgccatggacgtgtaccccccgcgccggcaggggctgccccgcgctcggtcccctggcggctccagccgcgggtcaccctccgtcagctgcagtcgacttcggcaggttcagagcatcctgacccagagcagcaagtctcggccggatgggatcctctgcatcctaggaatcgatagcaggtacaatgaaggctgcagagagctggcaaattatcttctatttggtttgtacaatcagaataccagtgattttgagaaaacgggattttctgaagaagtactagatgatgtaattatattgattaaatcggatagcgtccatctgtactgtaatcctgtaaactttcgctatctcttaccttatgtggcacattggagaaatctgcatttccactgcatgaccgaaaatgagtatgaagatgaagaagccgcagaagaatttaaaattaccagctttgtggacatggttcgagactgtagtagaattggcattccttacagctcccaaggtcacttgcagatatttgatatgtttgtggtggagaaatggccaattgtacaggcctttgcacttgagggcattggaggggatggattttttaccatgaaatatgagttgcaggatgtgagtttgaatctatggaatgtctacagcaagatggatcctatgtctctggagagtttgctttcagatgatttggtggcttttgaacatcagtggactagcttcttcgctaattttgacacagaaattcctttcctgctagaactttcagaatctcaggcgggtgagccattcagaagttatttcagtcatggaatgatctctagccatataactgaaaacagccctaaccggcagccatttgttctctttggtaatcactccacacgagaaaacctgaatgctggcaactttaacttcccttctgaaggacatctggtacgaagcactggtcccggcgggagctttgccaagcacatggtagcccagtgtgtctcaccaaagggacctcttgcttgttcgagaacatacttttttggagctactcatgttccttacttgggtggtgacagcaagctgcccaagaaaactgaacaaattaggctattgtcccagatatatgctgctgttattgaggctgttttggctggcattgcatgttatgctaaaacttccagtctaacaaaggccaaggaggtagcagagcaaactctgggatctgggttagattcctttgagttgattccgtttaaggcagccctgcgctccaagatgacttttcatatacatgctgtgaataatcagggaagaattgtaccgctggacagtgaagatagcttatcctttgtgaagacggcttgtatggccgtctatgacattcctgacttactgggaggcaatggttgtttaggatctgtggttttctctgaatcatttttgacttctcagatcttagttaaagaaaaggatggcactgttaccacagaaaccagctccgtagtcctgactgctgctgtacccagattctgctcctggctggtggaagataatgaagtaaaattgtctgagaaaacccagcaagcagtgaggggggatgagtctttcctgggcacttatctaacaggaggagaaggagcatatctttattccagcaatctacagtcctggcctgaggaagggaatgttcatttcttctctagtggccttctgttttctcactgtcgtcatagaagtatcatcatttccaaggatcacatgaattccatttccttctatgatggggattccaccagtactgttgctgctcttctcatagacttcaaaagctcattgcttcctcacctcccagttcatttccatggatcaagcaattttctgatgattgcccttttccccaaatcgaagatataccaagcattttactcagaggtcttctccctctggaaacagcaggataactcagggatctctttaaaagtgatccaggaagatggattatctgtggaacaaaagagattgcactccagtgcacagaagctcttcagtgccctgagccagcctgctggggagaaacggagttccctaaagttactctcagccaaactcccagagctggactggtttctccagcatttcgccatcagcagcattagccaggagcctgtgatgcggacccatcttcctgtgctgctgcagcaagctgaaatcaacactactcacagaatagaaagtgacaaggtaattatcagcattgtaaccggcctcccaggctgtcacgctagcgagctctgtgcttttctggtcactctgcataaggaatgtggcagatggatggtgtatcgccaaatcatggacagctctgaatgttttcatgctgcacacttccagagatacctttccagtgccctagaggcccagcagaaccgctctgcgcgccagtcagcctacatccgcaagaagaccagactgctggtggtgttacaaggctacacagatgttattgatgttgtccaggccctgcagacccacccagactcaaatgtcaaggcctccttcaccattggtgccatcacagcatgtgtggagcccatgagctgctacatggagcacagatttctctttcctaaatgtcttgaccagtgttcacaaggcctggtgagtaacgtggtattcaccagtcacaccacggagcagcggcaccctctccttgttcagctgcagagcctcatcagggctgccaatcctgctgcagccttcattcttgcagaaaatgggattgtcaccaggaatgaagacattgagctgattctctcagaaaacagtttttcaagtcctgagatgctacgatctcgatatttaatgtatcctggctggtatgaaggtaaattgaatgctggatcagtctatcccctaatggttcagatctgcgtatggtttggccgtcccttggagaagactcgctttgtggccaaatgtaaagcaattcagtcctccatcaagccaagtcccttctccggaaacatctaccacatcctgggcaaagtgaagttttcagactctgagaggaccatggaggtctgctacaacacactggccaactccttgagcatcatgccagttttggaaggacccacaccaccaccagactccaaaagcgtatctcaagacagcagcgggcagcaggagtgctaccttgtgttcatcggctgctccctgaaggaagacagcatcaaggactggctgcggcagtcagctaagcagaagcctcagaggaaagccctgaagaccagggggatgctgacgcaacaggagatcaggagcatccacgtaaaacgccacttggaacccctacctgcaggctacttttataatggcacccaatttgttaacttctttggtgacaaaactgattttcacccactcatggaccagttcatgaatgactacgtggaagaagccaaccgggaaattgagaagtataaccaggagctggaacagcaggagtatcatgacctctttgagctgaagccctagaggaaggctgggcccgtacgtcctgcagaatgtccaccttggagatggacgaacgggtgtcttaacctcagctctgctggaggcctctcccttaaggggctgtctttgttctccttggcctgtgtgggctggcttgagtgcatgttgtctttattccctgtatagcgctgaagagcatcacctgcaccattgattttgggggtcgggggaatactcaaggatgagcagatggggcctgcccgtctacgtgtgcaactggcagtccaggagctctgggtttctgataacaggatctcctttgggctcttgaggttggggagaagcattaggattacacagaggagctactgggacttagaaggaaccctggctgcctgaactgtggccgtgtctgggaggcgaggccacgacaggcctcaagcctcagatgctgctccacgagagccatcttccccagtggagtgcctgcctcccctgctaggcccgtttccctgaaggagctggccgtactggccgtgggcccagtcctgggaggagcagcacagccttgcccaggcccagtccacagagccagcagcttgggttgagatgaatgatgtgttcacaaatgaggggatttcccttctggactaaactgaaggagaggcttgttgctttccagaggtgtgtggctcttaagttgacatcagcttttccccttgtgggtggttctttagctctcctgtcacaccattcgggtgtcctaatgtagggacaagagcaagcctgctgctcaggccccctggcgaggcttcacctcactgtggaagggggcgtcctgcagctggttagtcttaggcctggtggctgatcacttgtggggtcagtctccagcacccagcgctcccacaagccttgccaaggaaggcctgcttttcagccacaaacttcaggaaactcatccccccgctccccaaagtgttgttgctggccctgggcttgtgtggctcctgaggattgggaatttcaaataattgcaatacctgagttagaattccttctaatggcatcgttttaagctggaccataaagcagaggggaattacaagtgtgtcccatgcctgaccttcataattggtgtgggggacaggggagtcacagccactgatatttaggtgatgtctcttaggacttcagtgcctcagctgcctgaactgtaaatgttttctgaatttcacatatttttttttgcatgccttaggaagaagcacataggtaaaaccagcagtttccagtaatatagggggtttttgagcaaggcccctggagcagcggagagacaagatggagcacatgtagtctgtgtgcctggtcacacagaggcctgcatgcaagtagcaaagcagctctcaagggcttgtcagtaaaatatattagaaaaaaaaaaaaaacaatttgaagccaaatgaacaaaactccagataccattgataagaaattttgcatcaagaagggcttctgaaaagacccacgtgctccagtcccagctccaaaagccactgatgacaagggccccactgtggaacctaagtctgggagccccctgacttctggctggccagaggctgcggtccgtcaagggcttgcctcgcttcagaatcagtaacatagatcttaagtgcaattgattaataagcagtgagttactgtagcttcctttagctctaccgaactctttttaaaaactcaaacttgagcagccttagaaaaggggttggggggtgggaaccacaggccatttctctaagtgggctgctgtgaagttttaaatgaaagctctagctttaggagcttgagccatttcctgactgcactggcctggcagtctggctgctgcagaagagtttttaaagaggggtcggagcccgcccgtgagagcgggtcttctcaccatgtggggctgtactacgtggtggtctttgtttctcttcacagaaatgctctctcaccaacttgccccactgtcccaactcctctcctcttagagaaaaaactgtgattacctcaacttgaatatgaaactgtgattgaaaaaagtcaaaacgtgaagaagcatcaaagccaaaaaggcaaaactggctgaggcctctgttgatgctcctcagcctactcgggaacgtgaaggggcagctggcgaaagggcattcctggggccacttgctctgccccactgataaggcacacccgcggtgcactgtgagctctttgaggactgaggccaggggatgcctcctggaacctgccaggcctctctgttctgtgaaggtcagtatccacttgattcctccaggcggcgctccaggtgggaggagcagggtcttctgctgtttccaaaggaatggccatgacactgcttttgaccttagaagtggatccagggacccagcaaagagcgggggtgggttcccagggacaggcagtcctcccggggcttacatgctttttgctaactttcctattagcagcttcagtttatatcacccagagtgcgtgggataatgttgaagtcgctgaagttacgggttattttatgtttttacatgggatttttctgtttttgattggaagaaggagacagaaattggaggaaatgggattattatcctagggaagggccgttggcaaggagttgagccggcccctctgagccctgggggctatctgacctgaagcctggacactgggcccttcaggtcgcaagaaaaagttccctcctaaattctattaggattttggagaatttttgcacagtaagaagctctgggttgctccttgggcttctcaaaagggaaaagttcaattcaaagattgtaaactacgaagtattccagccgtgttgctgatctagttggatagttgtacctcaaaaaagtaggtgagaactggcttcctcattgtcccaggatgtcaaatactaatgacataagagctcacttacgtgccaaaattcacttttatactagtttttcagtgctttaatatttgtaacttaaattttaaaactcgtatttacaaacactactgtaacttcagtgaaactgaattgtgcgattgaagctttttgcttatcatagtatttattacactacttaattcagtaaatatataaaagtagccttcaatttatttttatattattttacatgtttttacctgcagttgtgtatgtgaatttaccttggtaatcgagatgtcatgctaaggaccaataaactatcactgaacaag

SEQ ID NO: 118847 - DNA, 1119 bp, Homo sapiens
  Payload ID: 3277
  Gene Symbol: C20orf195
  Gene Name: chromosome 20 open reading frame 195
  Uniprot ID: Q9BVV2
  ENST ID: ENST00000370097
  CDS Start-End: 75-1031
ccgcggagtgcggagggaggctgggctctgggaagtccgcgcgcggctccgcttcagaggcaggctcccggataatgagcacccatgtggcaggcctgggcctggacaagatgaagctgggcaatccccagtccttcctggaccaggaggaggcagatgaccagcagctgctggaaccagaggcgtggaagacctacaccgagcgccgcaatgccctgcgtgagttcctgacctcggacctgagtccgcacctgctcaagcgccaccacgcccgcatgcagctgctgcgtaagtgctcctactacatcgaggtcctgcccaagcacctggccctgggcgaccagaacccgctggtgctgcctagcgccttgttccagctcatcgacccctggaagttccagcgcatgaagaaggtgggcacagctcagaccaagatccagctcctgctgctcggggacctgttggaacagctcgaccatggccgtgctgagctggatgccctgctccggtcgccagacccacggcccttcctggccgactgggcgctggtggagcggcggctggcggacgtgtcggccgtcatggacagcttcctgaccatgatggtgccggggcggctacacgtcaagcaccgcctggtgtctgatgtcagtgccaccaagatcccgcacatctggctcatgctgagcaccaagatgcctgtcgtgtttgaccgaaaggcgtcggcggctcaccaggactgggcccggctgcgctggttcgtcaccatccagccagccacatcggagcagtatgagttgcgcttcaggctgctggacccgcggacacagcaggagtgcgcccagtgtggcgtcatccccgtggctgcctgcaccttcgacgtccgaaacctgctgcccaaccgatcctataagttcaccatcaagagggccgagacctccacgctggtgtacgagccctggagggacagcctcaccctgcacaccaagccggagcccctggaggggcccgccctcagccactctgtctgagagatgattttctaatatttatccactaataaagaagagtgtaaatgcacatatggaattaaagaagcaaacctatttatgttttaaa

SEQ ID NO: 118848 - DNA, 1112 bp, Homo sapiens
  Payload ID: 3277
  Gene Symbol: C20orf195
  Gene Name: chromosome 20 open reading frame 195
  Uniprot ID: Q9BVV2
  ENST ID: ENST00000370098
  CDS Start-End: 93-1049
ggaagaggccccagcactgacctccgtgggggtggagatgaggaggatggaaagggtgtcttcctccagcatcttcctgaagctcccggataatgagcacccatgtggcaggcctgggcctggacaagatgaagctgggcaatccccagtccttcctggaccaggaggaggcagatgaccagcagctgctggaaccagaggcgtggaagacctacaccgagcgccgcaatgccctgcgtgagttcctgacctcggacctgagtccgcacctgctcaagcgccaccacgcccgcatgcagctgctgcgtaagtgctcctactacatcgaggtcctgcccaagcacctggccctgggcgaccagaacccgctggtgctgcctagcgccttgttccagctcatcgacccctggaagttccagcgcatgaagaaggtgggcacagctcagaccaagatccagctcctgctgctcggggacctgttggaacagctcgaccatggccgtgctgagctggatgccctgctccggtcgccagacccacggcccttcctggccgactgggcgctggtggagcggcggctggcggacgtgtcggccgtcatggacagcttcctgaccatgatggtgccggggcggctacacgtcaagcaccgcctggtgtctgatgtcagtgccaccaagatcccgcacatctggctcatgctgagcaccaagatgcctgtcgtgtttgaccgaaaggcgtcggcggctcaccaggactgggcccggctgcgctggttcgtcaccatccagccagccacatcggagcagtatgagttgcgcttcaggctgctggacccgcggacacagcaggagtgcgcccagtgtggcgtcatccccgtggctgcctgcaccttcgacgtccgaaacctgctgcccaaccgatcctataagttcaccatcaagagggccgagacctccacgctggtgtacgagccctggagggacagcctcaccctgcacaccaagccggagcccctggaggggcccgccctcagccactctgtctgagagatgattttctaatatttatccactaataaagaagagtgtaaatgcacatatggaattaaa

SEQ ID NO: 118849 - DNA, 2954 bp, Homo sapiens
  Payload ID: 3277
  Gene Symbol: C20orf195
  Gene Name: chromosome 20 open reading frame 195
  Uniprot ID: Q9BVV2
  ENST ID: ENST00000615526
  CDS Start-End: 1950-2906
agagcccgcggcgggggaagccgcccctctcctctgtccaggcgctgggtggtccatccgcctggtcaccggccactgcctctctcccaaattcctccgagggattcccgaggagtgcgctcggactggggggttgagcaggaactccctcccagtcacccgaggctcctgcgccccgcccgaagccgggggtgcgtggggagtggtgcgcccgcggaagggctccgggacgggaaccccccttggagcctggctcttggaccagccacccgccgtggcccctcagtcggggacgcgggcccccagaagtctggggctctccaggaagcgaagcggatggaagattactcggctcggggtcccgggtccccacccccgccccgcccccgggccgcagcgtcacaaaggccgctggtccccagggcaacccgcggagtgcggagggaggctgggctctgggaagtccgcgcgcggctccgcttcagaggcagggcaagtgggcgcggtcctggggcggcggcgggggccgggagaggagggctgggggtctcgagaaggtaaggggcaggcagagcggccggggaggtgggcccgggccaggggagccaaggggagtgtggtggagggggtagagtgcgggcacctggtggtctcagggaagcgggcctgggaccggggcgtgtaggaagcagcgaggggctcagaaccacctttccgggttcacgaccagcctctctgggtgttccacctgggcagctgctggagactagaaaacatccctcacacgtcacagaggcacggtttccctccagcggtgaaatccgccccagcctccagcaagagcagggcttaggcctggggtcctggggtcctgctctcagctggcacctcaccccagacacactccctgctgcccccaggggcctgttctcgagggattcccgaggagtgcgctcgtgaagtcatatctgcctcacgcccaaaagggcaacccttcccgggcagatatgacttcaccacgtacctgtgtggccctggggaactcagcaactgcttagctctcatttgtgggtcgtccaaggcccaagtggctgtgacaacctgagatctccagggttgctgggagccggggcagcaaccaggggtgcggcttgctctccagggagctgcggcagagcctggggccacagctgcactcagccggtgcacccacggacagagggtcagactcggctcagcactgggctcaagccctggatgagaacaagaaccaagcttcttagcctcaggctccatctgggaaatggagtgtcacttgtggagtccatgagctcaccagggacaggatcccgggtccacagcgagggcccacagcgtgggaggagggctgctcctccgggcccaggcctgggcgccctcctcccatgctgaccagccagctggcctcgtctttggtgaggcctgtctctgtgccctacaactgcggtgaggcgtggagcgtccccagggagaaccggagcgggaggatggcccgcgaatgtccccgagggggatcctgtgctgcttaggaccacgccgtcccctctccacggccccgaggggtgccagcaacccctttcagcagcagggttaggaactggggcccttgcaaggccacaggtcaggcggttctggccagaagtccgcagtcctagttcttccctgtcctgtcccacaggccactggttgtcagtagaggtttttgcccctcagtataaactgtgtccagatctgtaggctgcccatccagccctccaggcagcctcttcccatcgagttgtgcccccgaagaaggacagaggtccagcatggggtcagtgggctgaatccatcccccgaacatgccacagcccaggggaggccagcctgcctggcagctgacacccagccctccccccagctcccggataatgagcacccatgtggcaggcctgggcctggacaagatgaagctgggcaatccccagtccttcctggaccaggaggaggcagatgaccagcagctgctggaaccagaggcgtggaagacctacaccgagcgccgcaatgccctgcgtgagttcctgacctcggacctgagtccgcacctgctcaagcgccaccacgcccgcatgcagctgctgcgtaagtgctcctactacatcgaggtcctgcccaagcacctggccctgggcgaccagaacccgctggtgctgcctagcgccttgttccagctcatcgacccctggaagttccagcgcatgaagaaggtgggcacagctcagaccaagatccagctcctgctgctcggggacctgttggaacagctcgaccatggccgtgctgagctggatgccctgctccggtcgccagacccacggcccttcctggccgactgggcgctggtggagcggcggctggcggacgtgtcggccgtcatggacagcttcctgaccatgatggtgccggggcggctacacgtcaagcaccgcctggtgtctgatgtcagtgccaccaagatcccgcacatctggctcatgctgagcaccaagatgcctgtcgtgtttgaccgaaaggcgtcggcggctcaccaggactgggcccggctgcgctggttcgtcaccatccagccagccacatcggagcagtatgagttgcgcttcaggctgctggacccgcggacacagcaggagtgcgcccagtgtggcgtcatccccgtggctgcctgcaccttcgacgtccgaaacctgctgcccaaccgatcctataagttcaccatcaagagggccgagacctccacgctggtgtacgagccctggagggacagcctcaccctgcacaccaagccggagcccctggaggggcccgccctcagccactctgtctgagagatgattttctaatatttatccactaataaagaagagtgtaaatgc

SEQ ID NO: 118850 - DNA, 804 bp, Homo sapiens
  Payload ID: 3277
  Gene Symbol: C20orf195
  Gene Name: chromosome 20 open reading frame 195
  ENST ID: ENST00000611891
  CDS Start-End: 560-804
tgcccagtcaggcctggcccatgcccaagggcaccacagtccaacagccgcccgtgcccacggagaagtgggggttccacggagaagcgctgctgttcagcacctgcagtggttgccaagcctgagctgcactcaggtgaaaaattgcctgcttatttaagtgttggccagatattttaacatcattaaccctgcaccaggtgccgagcctccggcctctgcagtaaattctgaggacaggcgagtgagggggctctcagcaccccggctttcatgcagtaaaacgagatgctgattgcagggagctcggccgcaggccaggcacccagatgccccatgctgcccgatgaccggcttctgagtcagtcaatgcccaggccatacccaaaggccactgcggggaagtggaggctgcggacgcctggccccagttcagggggatgagcacacggagaaggggcggcgggtgagtccctggctggggacctcccaccctctccctggacagcgccaagcccccgcatgctgaagcaaactctgcccgctcagctcccggataatgagcacccatgtggcaggcctgggcctggacaagatgaagctgggcaatccccagtccttcctggaccaggaggaggcagatgaccagcagctgctggaaccagaggcgtggaagacctacaccgagcgccgcaatgccctgcgtgagttcctgacctcggacctgagtccgcacctgctcaagcgccaccacgcccgcatgcagctgctgcgtaagtgctcctactacatcgaggtcctgcc

SEQ ID NO: 118851 - DNA, 1154 bp, Homo sapiens
  Payload ID: 3278
  Gene Symbol: C20orf196
  Gene Name: chromosome 20 open reading frame 196
  Uniprot ID: Q8IYI0
  ENST ID: ENST00000303142
  CDS Start-End: 88-705
ccgcgttccggttgcggatggtgagtgtgtcggggggcttggcggcttttctcctcagttttctggagtgctttggaggagaggactatggcagccagggacgccacttcaggcagcctgtcagaggagagcagtgctttggacctgccatcagcgtgtgacataagagattacgtcctgcagggacccagccaagaagccaacagcgaggctttcagttctttggaattccattcttttccttattcttctgatgtggatccagacaccagtaacttaaatatagaacaaaataactcctggaccgctgagaacttctggcttgaccctgctgtgaaaggccagtcagagaaggaagaggatgatggccttcggaaatccctggatagattctatgaaatgtttggtcatccacagccaggctctgcaaactcactctctgcatctgtctgcaagtgcctgtctcagaaaatcactcaactaagaggccaggagagccaaaagtatgccctccgcagttttcaaatggcccgggtgatcttcaaccgggacggctgctccgtcttacagaggcattccagggacacccacttctacccactggaggaaggaagtacatctttggatgatgaaaagccaaacccaggactgtcaaaggatattactcatttcctcttgcagcagaatgtaatgaaagacctgtaactggtgccgggcagtgtgcagggtagtaatggaggtgctgtgccatgaccagcagtgttggtggccacccagatcccctagggtctctggccagctctgtgtgcccaatcccaattaagtgctttgaggttaaaggctggcacctgtgacctggtattggagccagtcagcccatatggagagccagcagggtctgggagttctccgtcctcttggccaaggccgctgactgactgggctacgagtcaaaagcccagctcccttgcctcaaggaaggacattctctgaggagtaatttatgctctagcactccctttcctctagatcggcctgaggctgggacattacatgaaatcacacccttgctgggcttaatccctttccctaccctcccatttatttactggtgtctctgggagcctttccttaataaacctcttatatctgaa

SEQ ID NO: 118852 - DNA, 585 bp, Homo sapiens
  Payload ID: 3278
  Gene Symbol: C20orf196
  Gene Name: chromosome 20 open reading frame 196
  ENST ID: ENST00000378979
  CDS Start-End: 92-280
gcttccgcgttccggttgcggatggtgagtgtgtcggggggcttggcggcttttctcctcagttttctggagtgctttggaggagaggactatggcagccagggacgccacttcaggcagcctgtcagaggagagcagtgctttggacctgccatcagcgtgtgacataagagattacgtcctgcagggacccagccaagaagccaacagcgaggctttcagttctttggaattccattcttttccttattcttctgatgtggatccagcagatctctgagaatgcttcattgtcttaggcagaaaaacatcttacctaagcaaagctttcaggaggaacttcaaaggacagcttacctggcacagcaatgacaaggagctgtttcctggatgtctttttgttattgttgctgttaatctcaggtctctttctaatctccctcaaaatgaattcagaagcaggggaatatttggttcaacaaagagagagtggaatttttttttgttttgttcttttaaaacttcagaaaatagcaatgtgggcctgttatgtgtgatgagtaataaaaatagagactttagcat

SEQ ID NO: 118853 - DNA, 501 bp, Homo sapiens
  Payload ID: 3278
  Gene Symbol: C20orf196
  Gene Name: chromosome 20 open reading frame 196
  ENST ID: ENST00000445603
  CDS Start-End: 139-501
ggcggcttttctcctcagttttctggagtgctttggaggagagacaaggtcttgctatgttgcccaggctggtcttgaactcctggcctcaagcgatcctcccaacttggcctcgcaaagtgctgggactacaggactatggcagccagggacgccacttcaggcagcctgtcagaggagagcagtgctttggacctgccatcagcgtgtgacataagagattacgtcctgcagggacccagccaagaagccaacagcgaggctttcagttctttggaattccattcttttccttattcttctgatgtggatccagacaccagtaacttaaatatagaacaaaataactcctggaccgctgagaacttctggcttgaccctgctgtgaaaggccagtcagagaaggaagaggatgatggccttcggaaatccctggatagattctatgaaatgtttggtcatccacagccaggctctgcaaactcactctctgcatctgtc

SEQ ID NO: 118854 - DNA, 627 bp, Homo sapiens
  Payload ID: 3278
  Gene Symbol: C20orf196
  Gene Name: chromosome 20 open reading frame 196
  ENST ID: ENST00000442185
  CDS Start-End: 28-627
agttttctggagtgctttggaggagagatggagtctcactcttgtagcccaagctggagtacaatgacaatctcagctcactgcaacctccgtcttccatcagcttcccaaagtgttgggattacaggcgtaagccaccacatctggcctaggattttctatatgactatggcagccagggacgccacttcaggcagcctgtcagaggagagcagtgctttggacctgccatcagcgtgtgacataagagattacgtcctgcagggacccagccaagaagccaacagcgaggctttcagttctttggaattccattcttttccttattcttctgatgtggatccagacaccagtaacttaaatatagaacaaaataactcctggaccgctgagaacttctggcttgaccctgctgtgaaaggccagtcagagaaggaagaggatgatggccttcggaaatccctggatagattctatgaaatgtttggtcatccacagccaggctctgcaaactcactctctgcatctgtctgcaagtgcctgtctcagaaaatcactcaactaagaggccaggagagccaaaagtatgccctccgcagttttcaaatggcccgggtgatcttcaac

SEQ ID NO: 118855 - DNA, 1604 bp, Homo sapiens
  Payload ID: 3279
  Gene Symbol: C20orf202
  Gene Name: chromosome 20 open reading frame 202
  Uniprot ID: A1L168
  ENST ID: ENST00000400633
  CDS Start-End: 64-432
ctcattaactccatcttcagtgatttggccagaacctgctgccagtctgaaagagttgggggaatgtacaagtcaaagatccctcgggcccagaaccaggtcagtgtcaaggtcactcctaagaacactgagatgaaaatagcagaagagcccagcccgagtcttgggcagaccttggagtggctgagaaaggagctgtctgagatgcagattcaagatcagagtctcctgctcacactgaggcatcttcacagtgtcctggaggagctgcgtgcggacagcgcccactgggaggacgccaggtccagcggagggacatcccccatcagagctcgagcgggctccgaaggcaggggctgccagccggtttgctcaaggggtctggcccagctcctccgaggggaagacagcagacgaagctctctcccttaactggacggagatgacactgggctttaacactctccccattagtctaacctttcactgtgatatttcaggggcagagtgttggaatgggagtcagaaagccagggctctgggttcatttctgccctcatctgctgtgcatccctggatctgtcactcagcttctctgtgtctctggttccttttctgtcacttgggatttcttggtgaggcacacataaggtattggatgtgaacacacttttcgactgaaaacacaaatgtgctctagtgctctggcaagcaccatggcagtaaccctatccttgggaatttttcacaaggcaattgttaaaacaaagaactagatgtgcagtaatggttaccaagtgttgctatggtgaaaattccaacccctgtgtagtgacttagtggctgttttctgtcttcccaggaagccttcccattccccttcatctgataacatattaggccctgtaaccaccctggccataggcatgggtatattaccaggcctggccaatgatataattcatggttgccctaaaaagatgattggcccaatggatggtcatgtgaaccaacagagccagtcaccgaccttccctgagattgctacctggaagctctttctattacactcaggctgaggctgctggtggccatgttcctaccaggtaaagaagacctgtctgcagtaggaaggaaagaggctaatctccaaagagaagtagagagagggccacacaacagatggacagagaggaagagcgctggctctttttggtccctggttttaggtcctagttttgtgagttactcctgcattctttccagggaccgaagccagtcaatttcaccccccaacacagccacacacatcaatttgtttttggttaagctgatttgagcagtttccctcatttgcagctagaatggtcttgaggaatatgatccagatgttcaaagaatcaaagaggagaaatcaatatgaaaatggcatttcattcaatgagggtttgtgacaacaacctccgtaacagcaggcaaccaggcttgtgatacagcagagacactcagttgtgtggggtgctgcagtcataactgaaaaattgtatctgcctataagaaagactaaaacagaaaaggtgaaaataaaaaagtcatggtgttaa

SEQ ID NO: 118856 - DNA, 1114 bp, Homo sapiens
  Payload ID: 3280
  Gene Symbol: C20orf24
  Gene Name: chromosome 20 open reading frame 24
  Uniprot ID: Q9BUV8
  ENST ID: ENST00000344795
  CDS Start-End: 219-608
gggcgcgcgacactgcaccgcccctcccttcgcggcgcctgctctgtagagccggcggaaccgggtagcttggccaggttgtgaggaaccgcagcgcgccgcaggaccgggccgctgagcctgcagccgccccgcgccgtgacctgcgaccctagaccccgactccctttggctcagcccgcgcgccccaggcccggcccgggcggcgcgacgggaggatgagcggcgggcggcggaaggaggagccgcctcagccgcagctggccaacggggccctcaaagtctccgtctggagtaaggtgctgcggagcgacgcggcctgggaggataaggatgaatttttagatgtgatctactggttccgacagatcattgctgtggtcctgggtgtcatttggggagttttgccattacgagggttcttgggaatagcaggattctgcctgatcaatgcaggagtcctgtacctctacttcagcaattacctacagattgatgaggaagaatatggtggcacgtgggagctcacgaaggaagggtttatgacctcttttgccttgttcatggtcatttggatcatcttttacactgccatccattatgactgatggtgtacagctcccaagtgctccctatccagtccaaaggaccctcttgattacagcacaggaacttgatcgttggggaaccccagccccttggaacttggaagacccgtgtttcctggaccgcgaatcagtgtgttgggcatcagtgttttctgcaagggttgtgacctgaaactttttaaaaaccacccacctttggggaagcatttctgaatttatccatcaccaaccatttcttcttggataccatcaagtaacagctattatttgccaagtggagctgtcatttaatttgatgcacctctggattcagatgaaacattaaattgtcttcctcgattctccatcgggtgtagagtttttaaactatcaatggcatttcaagtcttctgaaacagcatggctgtatgtgcgtggtccatagcacagtacatgcagcatctaataagagtttccattgtagaatgttttcacatacttgaataaatcaaatctttaattgagaa

SEQ ID NO: 118857 - DNA, 896 bp, Homo sapiens
  Payload ID: 3280
  Gene Symbol: C20orf24
  Gene Name: chromosome 20 open reading frame 24
  Uniprot ID: Q9BUV8
  ENST ID: ENST00000342422
  CDS Start-End: 131-562
ccgcagcgcgccgcaggaccgggccgctgagcctgcagccgccccgcgccgtgacctgcgaccctagaccccgactccctttggctcagcccgcgcgccccaggcccggcccgggcggcgcgacgggaggatgagcggcgggcggcggaaggaggagccgcctcagccgcagctggccaacggggccctcaaagtctccgtctggagtaaggtgctgcggagcgacgcggcctgggaggataaggatgaatttttagatgtgatctactggttccgacagatcattgctgtggtcctgggtgtcatttggggagttttgccattacgagggttcttgggaatagcagggtcatttggatcatcttttacactgccatccattatgactgatggtgtacagctcccaagtgctccctatccagtccaaaggaccctcttgattacagcacaggaacttgatcgttggggaaccccagccccttggaacttggaagacccgtgtttcctggaccgcgaatcagtgtgttgggcatcagtgttttctgcaagggttgtgacctgaaactttttaaaaaccacccacctttggggaagcatttctgaatttatccatcaccaaccatttcttcttggataccatcaagtaacagctattatttgccaagtggagctgtcatttaatttgatgcacctctggattcagatgaaacattaaattgtcttcctcgattctccatcgggtgtagagtttttaaactatcaatggcatttcaagtcttctgaaacagcatggctgtatgtgcgtggtccatagcacagtacatgcagcatctaataagagtttccattgtagaatgttttcacatacttgaataaatcaaatctttaattgagaa

SEQ ID NO: 118858 - DNA, 1059 bp, Homo sapiens
  Payload ID: 3280
  Gene Symbol: C20orf24
  Gene Name: chromosome 20 open reading frame 24
  Uniprot ID: Q9BUV8
  ENST ID: ENST00000373852
  CDS Start-End: 136-549
aggaaccgcagcgcgccgcaggaccgggccgctgagcctgcagccgccccgcgccgtgacctgcgaccctagaccccgactccctttggctcagcccgcgcgccccaggcccggcccgggcggcgcgacgggaggatgagcggcgggcggcggaaggaggagccgcctcagccgcagctggccaacggggccctcaaagtctccgtctggagtaaggtgctgcggagcgacgcggcctgggaggataaggatgaatttttagatgtgatctactggttccgacagatcattgctgtggtcctgggtgtcatttggggagttttgccattacgagggttcttgggaatagcaggattctgcctgatcaatgcaggagtcctgtacctctacttcagcaattacctacagattgatgaggaagaatatggtggcacgtgggagctcacgaaggaagggtttatgacctcttttgccttgttcatggtatgtgtagctgatagttttacaacaggtcatttggatcatcttttacactgccatccattatgactgatggtgtacagctcccaagtgctccctatccagtccaaaggaccctcttgattacagcacaggaacttgatcgttggggaaccccagccccttggaacttggaagacccgtgtttcctggaccgcgaatcagtgtgttgggcatcagtgttttctgcaagggttgtgacctgaaactttttaaaaaccacccacctttggggaagcatttctgaatttatccatcaccaaccatttcttcttggataccatcaagtaacagctattatttgccaagtggagctgtcatttaatttgatgcacctctggattcagatgaaacattaaattgtcttcctcgattctccatcgggtgtagagtttttaaactatcaatggcatttcaagtcttctgaaacagcatggctgtatgtgcgtggtccatagcacagtacatgcagcatctaataagagtttccattgtagaatgttttcacatacttgaataaatcaaatctttaattgagaa

SEQ ID NO: 118859 - DNA, 1170 bp, Homo sapiens
  Payload ID: 3280
  Gene Symbol: C20orf24
  Gene Name: chromosome 20 open reading frame 24
  Uniprot ID: Q9BUV8
  ENST ID: ENST00000483815
  CDS Start-End: 164-427
cggaaccgggtagcttggccaggttgtgaggaaccgcagcgcgccgcaggaccgggccgctgagcctgcagccgccccgcgccgtgacctgcgaccctagaccccgactccctttggctcagcccgcgcgccccaggcccggcccgggcggcgcgacgggaggatgagcggcgggcggcggaaggaggagccgcctcagccgcagctggccaacggggccctcaaagtctccgtctggagtaaggtgctgcggagcgacgcggcctgggaggataaggatgaatttttagatgtgatctactggttccgacagatcattgctgtggtcctgggtgtcatttggggagttttgccattacgagggttcttgggaatagcagggaaaggccattgctgctctggagctgtgtgtgtgtgtgatgactaaagcaaagaagcagccctacagtggcactcctgggtctggtgcaccactcctcaggagcatctcagattctgcctgatcaatgcaggagtcctgtacctctacttcagcaattacctacagattgatgaggaagaatatggtggcacgtgggagctcacgaaggaagggtttatgacctcttttgccttgttcatggtcatttggatcatcttttacactgccatccattatgactgatggtgtacagctcccaagtgctccctatccagtccaaaggaccctcttgattacagcacaggaacttgatcgttggggaaccccagccccttggaacttggaagacccgtgtttcctggaccgcgaatcagtgtgttgggcatcagtgttttctgcaagggttgtgacctgaaactttttaaaaaccacccacctttggggaagcatttctgaatttatccatcaccaaccatttcttcttggataccatcaagtaacagctattatttgccaagtggagctgtcatttaatttgatgcacctctggattcagatgaaacattaaattgtcttcctcgattctccatcgggtgtagagtttttaaactatcaatggcatttcaagtcttctgaaacagcatggctgtatgtgcgtggtccatagcacagtacatgcagcatctaataagagtttccattgtagaatgttttcacatacttgaataaatcaaatctttaattgagaa

SEQ ID NO: 118860 - DNA, 1044 bp, Homo sapiens
  Payload ID: 3280
  Gene Symbol: C20orf24
  Gene Name: chromosome 20 open reading frame 24
  Uniprot ID: Q9BUV8
  ENST ID: ENST00000492721
  CDS Start-End: 168-431
ccggcggaaccgggtagcttggccaggttgtgaggaaccgcagcgcgccgcaggaccgggccgctgagcctgcagccgccccgcgccgtgacctgcgaccctagaccccgactccctttggctcagcccgcgcgccccaggcccggcccgggcggcgcgacgggaggatgagcggcgggcggcggaaggaggagccgcctcagccgcagctggccaacggggccctcaaagtctccgtctggagtaaggtgctgcggagcgacgcggcctgggaggataaggatgaatttttagatgtgatctactggttccgacagatcattgctgtggtcctgggtgtcatttggggagttttgccattacgagggttcttgggaatagcagggaaaggccattgctgctctggagctgtgtgtgtgtgtgatgactaaagcaaagaagcagccctacagtggcactcctgggtctggtgcaccactcctcaggagcatctcaggtcatttggatcatcttttacactgccatccattatgactgatggtgtacagctcccaagtgctccctatccagtccaaaggaccctcttgattacagcacaggaacttgatcgttggggaaccccagccccttggaacttggaagacccgtgtttcctggaccgcgaatcagtgtgttgggcatcagtgttttctgcaagggttgtgacctgaaactttttaaaaaccacccacctttggggaagcatttctgaatttatccatcaccaaccatttcttcttggataccatcaagtaacagctattatttgccaagtggagctgtcatttaatttgatgcacctctggattcagatgaaacattaaattgtcttcctcgattctccatcgggtgtagagtttttaaactatcaatggcatttcaagtcttctgaaacagcatggctgtatgtgcgtggtccatagcacagtacatgcagcatctaataagagtttccattgtagaatgttttcacatacttgaataaatcaaatctttaattgagaa

SEQ ID NO: 118861 - DNA, 1302 bp, Homo sapiens
  Payload ID: 3281
  Gene Symbol: C20orf27
  Gene Name: chromosome 20 open reading frame 27
  Uniprot ID: Q9GZN8
  ENST ID: ENST00000217195
  CDS Start-End: 153-752
tcctgcagccgccgccgctgcagtggtcgtccctgccctccccggccccggggtgcaccccgcaaggctcccgctggtgtccctggagcatgggaggctgctgagcgtgagtggcggtgtctggcaggagctgcgtggcagggagggcgtccatggctgcagccaacaagggtaagtgccttcctggcgtggtaggacttgcacaagctcttccggtgggccctggtaggagggccattgctgcaggcaacaagcccagagtccggagtatccgctttgcggcaggccacgatgcagaaggatcccacagccacgtccactttgatgagaagctgcatgactcggtggtcatggtcacccaggagagtgacagcagctttctggtcaaggttggcttcctgaagatcctgcacaggtatgagattaccttcactctgcccccagtgcacaggctgagcaaggatgtccgcgaggcacctgtccccagcctgcacctcaagctcctcagcgtggtgcccgtccctgaaggttatagtgtcaagtgtgagtactcggcgcacaaagagggcgtcctcaaagaggagatactgctagcctgcgaaggtggcactggcacctgtgtgcgcgtgacggtgcaggcccgcgtcatggaccggcaccacggcacgcccatgctgctggatggtgtcaagtgtgtgggcgccgagctggaatacgactcagagcacagcgactggcacggctttgactgaggcccgaggccccgcctgccccgggcccctcagccttaaaccccgccttgtccccccgacatgctgcgtgatggtgtggcttcctcgcccctctctggggtgggtgtgggggtggagtggccttgcccacgcctctcacctctgccttcatttgtgctgccaccctgcccctccctcgtcctcctctcccacttcctcctctctgtgtgcctcagtctcctgccggaagaaatgggttgagcccgaaaggaggctgtctgaggaagggagagggagggcctggggtgggtcccccactccccaccccaagccacagggactcccaccagggtctgggagaggacggagctggctctgtggcgtcgtggccccattactgctgccttgcttcagccacctctcctgcccctccctagtccccactgctgtccaccatgagtaggagggaggtgcagtccccagcccccacccctcaggtctgtgttacttggtttttaagcgactggttgggatagaaccctaaagaaataaacttccagtggataccgga

SEQ ID NO: 118862 - DNA, 1886 bp, Homo sapiens
  Payload ID: 3281
  Gene Symbol: C20orf27
  Gene Name: chromosome 20 open reading frame 27
  Uniprot ID: Q9GZN8
  ENST ID: ENST00000379772
  CDS Start-End: 812-1336
gttctgatgcttctccaggccgggccaggcacccgggacgcgtctcgggcccgcacgggggttgcttctttcgagacaggggatggggtggaaggggaagaggtccaaaccctggggtcgaaacaggagtgatggagggttcctcagctcctgaacgagaccaacacggcccgtatcgatggccgaagccggcgtggaagcccagggagaaaggccaccttcgggagctccacccagccccgagacgcgcccgacagccctcccgagagcgaagggcccaagggaggtgcgtcctaagcaaggttcaaggctagaggcgctatcccccaggcggaagaaggagcgggggcggggcctatccgaggccctccttctccctcttcgagtggtcggttctggcccctggcctagttgggccgcctgcccgtcttcctcgcgagagctcgcccggcaggcgcggactagcagggcgctgcctcggcgaccctggcacgtgacgtaggcggccctcgccagttggccgttctttggagcccgctcattggtccggagcgtccctcgccccaccctcccagatcaaccaatgggcggaggcgggggcgtgccgacgggagggcggccgcggcgcggggctcccttcctcgtgctcggcgttgagctcctgcagccgccgccgctgcagtggtcgtccctgccctccccggccccggggtgcaccccgcaaggctcccgctggtgtccctggagcatgggaggctgctgagcgtgagtggcggtgtctggcaggagctgcgtggcagggagggcgtccatggctgcagccaacaagggcaacaagcccagagtccggagtatccgctttgcggcaggccacgatgcagaaggatcccacagccacgtccactttgatgagaagctgcatgactcggtggtcatggtcacccaggagagtgacagcagctttctggtcaaggttggcttcctgaagatcctgcacaggtatgagattaccttcactctgcccccagtgcacaggctgagcaaggatgtccgcgaggcacctgtccccagcctgcacctcaagctcctcagcgtggtgcccgtccctgaaggttatagtgtcaagtgtgagtactcggcgcacaaagagggcgtcctcaaagaggagatactgctagcctgcgaaggtggcactggcacctgtgtgcgcgtgacggtgcaggcccgcgtcatggaccggcaccacggcacgcccatgctgctggatggtgtcaagtgtgtgggcgccgagctggaatacgactcagagcacagcgactggcacggctttgactgaggcccgaggccccgcctgccccgggcccctcagccttaaaccccgccttgtccccccgacatgctgcgtgatggtgtggcttcctcgcccctctctggggtgggtgtgggggtggagtggccttgcccacgcctctcacctctgccttcatttgtgctgccaccctgcccctccctcgtcctcctctcccacttcctcctctctgtgtgcctcagtctcctgccggaagaaatgggttgagcccgaaaggaggctgtctgaggaagggagagggagggcctggggtgggtcccccactccccaccccaagccacagggactcccaccagggtctgggagaggacggagctggctctgtggcgtcgtggccccattactgctgccttgcttcagccacctctcctgcccctccctagtccccactgctgtccaccatgagtaggagggaggtgcagtccccagcccccacccctcaggtctgtgttacttggtttttaagcgactggttgggatagaaccctaaagaaataaacttccagtggataccgga

SEQ ID NO: 118863 - DNA, 1734 bp, Homo sapiens
  Payload ID: 3281
  Gene Symbol: C20orf27
  Gene Name: chromosome 20 open reading frame 27
  Uniprot ID: Q9GZN8
  ENST ID: ENST00000399672
  CDS Start-End: 660-1184
gacgggagggcggccgcggcgcggggctcccttcctcgtgctcggcgttgagctcctgcagccgccgccgctgcagtggtcgtccctgccctccccggccccggggtgcaccccgcaaggtgaggccacccctctgctccctgcctcccggttccttcccgttcgccgaggtcccctcccggtcccggccctgtcctgagcagtcagtgcctgggaccccagcggccgtgatggcagggctggggtggggggctccgctgtcggggccgggcctggaggactccccagcacctgaactagagtgatgtcaggttcccggggcgcagtgaccgttagctggtgcagctggggtgttttccgcgaagcgattgtccgggggcatgagtgcggtagtgagggcgggggcgtaatggggtcagcgccccctcctccccacgaccctgttcattgccgctgcctcgctgcatgaccttggaccagtagcatctctgagcctccgagcctcagcaccctcaggaaggagggcagtgatgtctgggagtgcgggctccggagactcctgcgtcagccgaggctcccgctggtgtccctggagcatgggaggctgctgagcgtgagtggcggtgtctggcaggagctgcgtggcagggagggcgtccatggctgcagccaacaagggcaacaagcccagagtccggagtatccgctttgcggcaggccacgatgcagaaggatcccacagccacgtccactttgatgagaagctgcatgactcggtggtcatggtcacccaggagagtgacagcagctttctggtcaaggttggcttcctgaagatcctgcacaggtatgagattaccttcactctgcccccagtgcacaggctgagcaaggatgtccgcgaggcacctgtccccagcctgcacctcaagctcctcagcgtggtgcccgtccctgaaggttatagtgtcaagtgtgagtactcggcgcacaaagagggcgtcctcaaagaggagatactgctagcctgcgaaggtggcactggcacctgtgtgcgcgtgacggtgcaggcccgcgtcatggaccggcaccacggcacgcccatgctgctggatggtgtcaagtgtgtgggcgccgagctggaatacgactcagagcacagcgactggcacggctttgactgaggcccgaggccccgcctgccccgggcccctcagccttaaaccccgccttgtccccccgacatgctgcgtgatggtgtggcttcctcgcccctctctggggtgggtgtgggggtggagtggccttgcccacgcctctcacctctgccttcatttgtgctgccaccctgcccctccctcgtcctcctctcccacttcctcctctctgtgtgcctcagtctcctgccggaagaaatgggttgagcccgaaaggaggctgtctgaggaagggagagggagggcctggggtgggtcccccactccccaccccaagccacagggactcccaccagggtctgggagaggacggagctggctctgtggcgtcgtggccccattactgctgccttgcttcagccacctctcctgcccctccctagtccccactgctgtccaccatgagtaggagggaggtgcagtccccagcccccacccctcaggtctgtgttacttggtttttaagcgactggttgggatagaaccctaaagaaataaacttccagtggataccgga

SEQ ID NO: 118864 - DNA, 933 bp, Homo sapiens
  Payload ID: 3281
  Gene Symbol: C20orf27
  Gene Name: chromosome 20 open reading frame 27
  ENST ID: ENST00000399683
  CDS Start-End: 1-383
gcaacaagcccagagtccggagtatccgctttgcggcaggccacgatgcagaaggatcccacagccacgtccactttgatgagaagctgcatgactcggtggtcatggtcacccaggagagtgacagcagctttctggtcaaggttggcttcctgaagatcctgcacaggtatgagattaccttcactctgcccccagtgcacaggctgagcaaggatgtccgcgaggcacctgtccccagcctgcacctcaagctcctcagcgtggtgcccgtccctgaagaccggcaccacggcacgcccatgctgctggatggtgtcaagtgtgtgggcgccgagctggaatacgactcagagcacagcgactggcacggctttgactgaggcccgaggccccgcctgccccgggcccctcagccttaaaccccgccttgtccccccgacatgctgcgtgatggtgtggcttcctcgcccctctctggggtgggtgtgggggtggagtggccttgcccacgcctctcacctctgccttcatttgtgctgccaccctgcccctccctcgtcctcctctcccacttcctcctctctgtgtgcctcagtctcctgccggaagaaatgggttgagcccgaaaggaggctgtctgaggaagggagagggagggcctggggtgggtcccccactccccaccccaagccacagggactcccaccagggtctgggagaggacggagctggctctgtggcgtcgtggccccattactgctgccttgcttcagccacctctcctgcccctccctagtccccactgctgtccaccatgagtaggagggaggtgcagtccccagcccccacccctcaggtctgtgttacttggtttttaagcgactggttgggatagaaccctaaagaaataaacttccagtggataccgga

SEQ ID NO: 118865 - DNA, 803 bp, Homo sapiens
  Payload ID: 3282
  Gene Symbol: C20orf85
  Gene Name: chromosome 20 open reading frame 85
  Uniprot ID: Q9H1P6
  ENST ID: ENST00000371168
  CDS Start-End: 62-475
gagacgcgagacgctgagcccagggccagagcttgcggggcgcacagagcccccaggcctcatggcgcagaaacctctcagcaccgcggcggctgaacgcatgaaccttgtgggtcaggatgagatctggaaataccgtctgaaggctgaatcggaagcacggcagaactggccccagaactgggggtttttaacaaccccttttgaggagttgatcaagtgtgaagaagatctccccaccccaaagcccaaaatcgagcttcctgagcgtttccgcatccggccggtgaccccagtggagaagtacatcaaggtctttccatcccccccagtcccacagaccacccagggcttcatcggctggagatctgcagtgccaggcctgaacaagtgcctagagctcgacgatgcgatcagaagctgcaaaggtgcttttgcacgagagctgtgctggcccaagcagggcgtgcactgaatccagacggagttctgcccaggggtgctgcatatcggtcaccaggcacccagggccatgccagggaaaggaagagctcccctgaatcccgaggacacagtcccctgcgtacttgctcatgggatgttgcaaagaacacaaagtgtgccttagacattctcaagtcatcagcgtcacccttccagaatgttcacgtccacacccattcttggctaatgtaatgaataaggcttctctcatttgtttttgataccttgggaatttctatgcagggctttaaaaaaaaataagtgattcaattttaaaaatatttgtctaggtccttcaa

SEQ ID NO: 118866 - DNA, 1575 bp, Homo sapiens
  Payload ID: 3283
  Gene Symbol: C20orf96
  Gene Name: chromosome 20 open reading frame 96
  Uniprot ID: Q9NUD7
  ENST ID: ENST00000360321
  CDS Start-End: 140-1231
aaagcatcgggtctcgggacttctgagtggcctgggttaccgcgcgatctacactgagacaaggaagttggaaaagccgagtagttataccagaagatcagggtctcacagactcgcaacttctcttccattttccccaatggcgcatgtcttacaaaaacccaagcactctgggactcactccatagtccaggagttccaggttccggattatgttccatggcagcagtccaagcaggaaaccaagccatctactctgcctccagtccaacaagccaacagccttcatacaagcaaaatgaagactttgactagggtccaaccagtgtttcacttcaagcccactacggtggtgacaagctgccagccgaagaatccaagagaactacatagaaggcggaagttggaccctgggaagatgcatgccaaaatctggttaatgaagacctcgctcaggagcgggagggccgctctgcgagagctccgaagccgtgagaacttcctcagcaagctcaaccgggagctgatcgagaccatccaggagatggagaacagcacgaccctgcacgtgcgggccctgctgcagcagcaggacaccctggcgaccatcatcgacatcttggagtactcaaacaagaagaggctgcagcaattgaaatctgagcttcaggagtgggaagaaaagaagaaatgcaagatgagctatcttgagcagcaggcagagcagctgaatgccaagattgagaagacccaggaggaagtgaacttcctgagcacttacatggaccatgagtattccatcaagtctgtccagatctccactcttatgcgccagctgcagcaggttaaggacagccagcaggatgagctggatgacctcggtgagatgcgcagaaaggtcctggaatccttgtctgacaagattcagaagaagaagaaaaaaattctgagttctgtggtggcggaaacccagcgtccctatgaagaggctctcctacagaagatgtgggaaagccaggacttcctgaaatgcatgcaaaggttcagagaaattattgaccagtttgaggagaacatgcctgtattaagggccgaggtggaagagctccaagcccagacccgggaaccccgagaggtcatatttgaggatgttctgcttcggagacccaagtgcaccccagacatggatgtcatcctcaacattcctgtggaagagccactacccttctagatggcagtgccatgggccgccctcccctcctgctctcttcccagcacctggagccttggatcatttacttccaggaccggatctccattcagaccctgatctacagtctccctgctccctctgcccttcctccctctttctttccctccctccctccctcccttcttccccccttcccttccctcctccttccttcctcctctccctccctccctcctttctttcttcctgtggttttttcctctcttcttcccttctttctggttggtgctgctgggccaggtgggaatttctgattaaatctgctattccttttttaccaataaagctggatttacatttgc

SEQ ID NO: 118867 - DNA, 1420 bp, Homo sapiens
  Payload ID: 3283
  Gene Symbol: C20orf96
  Gene Name: chromosome 20 open reading frame 96
  ENST ID: ENST00000382369
  CDS Start-End: 90-1076
gggctattgtccccggtaaactgcagtttctggttcgagactccaatcctgtttcgaattgctgcttgctgccccttgggctggggataatggaagttctttcccttcccaactctttccagacccaagcactctgggactcactccatagtccaggagttccaggttccgtgtttcacttcaagcccactacggtggtgacaagctgccagccgaagaatccaagagaactacatagaaggcggaagttggaccctgggaagatgcatgccaaaatctggttaatgaagacctcgctcaggagcgggagggccgctctgcgagagctccgaagccgtgagaacttcctcagcaagctcaaccgggagctgatcgagaccatccaggagatggagaacagcacgaccctgcacgtgcgggccctgctgcagcagcaggacaccctggcgaccatcatcgacatcttggagtactcaaacaagaagaggctgcagcaattgaaatctgagcttcaggagtgggaagaaaagaagaaatgcaagatgagctatcttgagcagcaggcagagcagctgaatgccaagattgagaagacccaggaggaagtgaacttcctgagcacttacatggaccatgagtattccatcaagtctgtccagatctccactcttatgcgccagctgcagcaggttaaggacagccagcaggatgagctggatgacctcggtgagatgcgcagaaaggtcctggaatccttgtctgacaagattcagaagaagaagaaaaaaattctgagttctgtggtggcggaaacccagcgtccctatgaagaggctctcctacagaagatgtgggaaagccaggacttcctgaaatgcatgcaaaggttcagagaaattattgaccagtttgaggagaacatgcctgtattaagggccgaggtggaagagctccaagcccagacccgggaaccccgagaggtcatatttgaggatgttctgcttcggagacccaagtgcaccccagacatggatgtcatcctcaacattcctgtggaagagccactacccttctagatggcagtgccatgggccgccctcccctcctgctctcttcccagcacctggagccttggatcatttacttccaggaccggatctccattcagaccctgatctacagtctccctgctccctctgcccttcctccctctttctttccctccctccctccctcccttcttccccccttcccttccctcctccttccttcctcctctccctccctccctcctttctttcttcctgtggttttttcctctcttcttcccttctttctggttggtgctgctgggccaggtgggaatttctgattaaatctgctattccttttttaccaataaagctggatttacatttgc

SEQ ID NO: 118868 - DNA, 1608 bp, Homo sapiens
  Payload ID: 3283
  Gene Symbol: C20orf96
  Gene Name: chromosome 20 open reading frame 96
  ENST ID: ENST00000400269
  CDS Start-End: 176-1264
gcgtttccttggagaccgagacgctggcgaaagcatcgggtctcgggacttctgagtggcctgggttaccgcgcgatctacactgagacaaggaagttggaaaagccgagtagttataccagaagatcagggtctcacagactcgcaacttctcttccattttccccaatggcgcatgtcttacaaaagtagacccaagcactctgggactcactccatagtccaggagttccaggttccggattatgttccatggcagcagtccaagcaggaaaccaagccatctactctgcctccagtccaacaagccaacagccttcatacaagcaaaatgaagactttgactagggtccaaccagtgtttcacttcaagcccactacggtggtgacaagctgccagccgaagaatccaagagaactacatagaaggcggaagttggaccctgggaagatgcatgccaaaatctggttaatgaagacctcgctcaggagcgggagggccgctctgcgagagctccgaagccgtgagaacttcctcagcaagctcaaccgggagctgatcgagaccatccaggagatggagaacagcacgaccctgcacgtgcgggccctgctgcagcagcaggacaccctggcgaccatcatcgacatcttggagtactcaaacaagaagaggctgcagcaattgaaatctgagcttcaggagtgggaagaaaagaagaaatgcaagatgagctatcttgagcagcaggcagagcagctgaatgccaagattgagaagacccaggaggaagtgaacttcctgagcacttacatggaccatgagtattccatcaagtctgtccagatctccactcttatgcgccagctgcagcaggttaaggacagccagcaggatgagctggatgacctcggtgagatgcgcagaaaggtcctggaatccttgtctgacaagattcagaagaagaagaaaaaaattctgagttctgtggtggcggaaacccagcgtccctatgaagaggctctcctacagaagatgtgggaaagccaggacttcctgaaatgcatgcaaaggttcagagaaattattgaccagtttgaggagaacatgcctgtattaagggccgaggtggaagagctccaagcccagacccgggaaccccgagaggtcatatttgaggatgttctgcttcggagacccaagtgcaccccagacatggatgtcatcctcaacattcctgtggaagagccactacccttctagatggcagtgccatgggccgccctcccctcctgctctcttcccagcacctggagccttggatcatttacttccaggaccggatctccattcagaccctgatctacagtctccctgctccctctgcccttcctccctctttctttccctccctccctccctcccttcttccccccttcccttccctcctccttccttcctcctctccctccctccctcctttctttcttcctgtggttttttcctctcttcttcccttctttctggttggtgctgctgggccaggtgggaatttctgattaaatctgctattccttttttaccaataaagctggatttacatttgc

SEQ ID NO: 118869 - DNA, 756 bp, Homo sapiens
  Payload ID: 3284
  Gene Symbol: C21orf140
  Gene Name: chromosome 21 open reading frame 140
  Uniprot ID: B9A014
  ENST ID: ENST00000410005
  CDS Start-End: 1-756
atgcctcgctttgcaagccctcttttaagaaatgtcattatcagaagtcaatttgatggcatcaagaggaagcaatgcctccaatatctgaaaaccctgagaacactgcaatatgatggatttaagaccgtatattttggggaaaccaatatcccagaaagtctcgtaactggggaagatattagtgatggatatttcatacaaaccccaacttggtgtattgtgcatgctgcgggtagtcaaggatgggtgccttggaaatatcgggtgttcctaagagacgagctgtgtatcaaacaagaagacagcctcttctctgagttctgtgatgtggtgaggaaggcctatggaaagtgtgtcatcgtggtcaaagagagaaggcagcaggaagagcagaggccaaaggaagacagagaggctgagggccagttctatatccctacagtcattagcttagcaagcattatgtgttgcccagaggtggccaagtcctgtggccatgaactactctctctgccttccccttgtaattatctgaaccctttagactcagcctggtcttctctgaaatggtttatcatcaataacagaaacgagttttgtttgcagtccattgacagtggctattcttaccaatgtatacttttcagcaatttaattagcaaaggaattgaaaggataaacgcaagcaagtggagaacattaactagcaaagtacggagatgggaaaactactatcttgggaaattttcttaa

SEQ ID NO: 118870 - DNA, 1283 bp, Homo sapiens
  Payload ID: 3285
  Gene Symbol: C21orf2
  Gene Name: chromosome 21 open reading frame 2
  Uniprot ID: O43822
  ENST ID: ENST00000325223
  CDS Start-End: 209-976
atgagcaggagcagagccaacgtgtcagcggcgcccaagcggccccagcgggctcgcgtcgccccgctctcctcaccgagccgccaatcggctcaggatccgcccctgacgacgcgggccccgcccctggagacacgcgccgcgcagtcgtcacccgcccgggatcaggaggccgggggcgcccgccggtcgggcctgggcggccgccatgaagctgacgcggaagatggttctgacccgggccaaggcctcggagctgcacagcgtgcgcaagctcaactgctggggcagccgcctcacagatatctccatttgccaggagatgcccagcctggaggtgatcacgctcagtgtcaacagcatctccaccctggagcctgtgagccggtgccagcgcctgagtgagctgtacctgcggaggaaccgcatccccagcctggctgagctcttctacctgaaggggctgccgcgtctgcgggtgctgtggctggccgagaacccgtgctgcggcaccagcccccaccgctaccgcatgaccgtgctgcgcaccctgccgcgcctacagaagctggacaaccaggctgtgacggaggaggagctgtcccgtgcactgagtgagggagaggagatcactgcggccccagagagagagggcacaggccacggcggccccaagctatgctgcacactgagctccctcagctccgctgctgagactggccgggacccgctggacagcgaggaggaggcaaccggcgcccaggatgaacgtggcctgaagccgccttcccggggccagtttccttccctctcagccagggatgcctcgagcagccacaggggcaggaacgtcctgactgccatcctgctgctgctgcgggagctggatgcagaggggctggaggccgtgcagcagactgtgggcagccggctgcaggccctgcgtggggaagaggtgcaggagcacgccgagtgaccgcaggacctgaacgccgctccagcctccacggggaccccagcgtcttccccagcccccgggagctggagggtggctgccatggccgcagccccggccccacacaaaagcctccccggtttgccacatcggccgagggcaggagtgggtgttaggtactggctaaccggggcggtggagatgcctgtctacaccagtcctgtccccaggactccccttctgtggtctggaggttctaggctggcctgggctcttaaagggaggattttgcaggctgtcctccctaataaaagattttcccaaggtt

SEQ ID NO: 118871 - DNA, 2233 bp, Homo sapiens
  Payload ID: 3285
  Gene Symbol: C21orf2
  Gene Name: chromosome 21 open reading frame 2
  Uniprot ID: O43822
  ENST ID: ENST00000339818
  CDS Start-End: 209-979
atgagcaggagcagagccaacgtgtcagcggcgcccaagcggccccagcgggctcgcgtcgccccgctctcctcaccgagccgccaatcggctcaggatccgcccctgacgacgcgggccccgcccctggagacacgcgccgcgcagtcgtcacccgcccgggatcaggaggccgggggcgcccgccggtcgggcctgggcggccgccatgaagctgacgcggaagatggttctgacccgggccaaggcctcggagctgcacagcgtgcgcaagctcaactgctggggcagccgcctcacagatatctccatttgccaggagatgcccagcctggaggtgatcacgctcagtgtcaacagcatctccaccctggagcctgtgagccggtgccagcgcctgagtgagctgtacctgcggaggaaccgcatccccagcctggctgagctcttctacctgaaggggctgccgcgtctgcgggtgctgtggctggccgagaacccgtgctgcggcaccagcccccaccgctaccgcatgaccgtgctgcgcaccctgccgcgcctacagaagctggacaaccaggctgtgacggaggaggagctgtcccgtgcactgagtgagggagaggagatcactgcggccccagagagagagggcacaggccacggcggccccaagctatgctgcacactgagctccctcagctccgctgctgagactggccgggacccgctggacagcgaggaggaggcaaccagcggcgcccaggatgaacgtggcctgaagccgccttcccggggccagtttccttccctctcagccagggatgcctcgagcagccacaggggcaggaacgtcctgactgccatcctgctgctgctgcgggagctggatgcagaggggctggaggccgtgcagcagactgtgggcagccggctgcaggccctgcgtggggaagaggtgcaggagcacgccgagtgaccgcaggacctgaacgccgctccagcctccacggggaccccagcgtcttccccagcccccgggagctggagggtggctgccatggccgcagccccggccccacacaaaagcctccccggtttgccacatcggccgagggcaggagtgggtgttaggtactggctaaccggggcggtggagatgcctgtctacaccagtcctgtccccaggactccccttctgtggtctggaggttctaggctggcctgggctcttaaagggaggattttgcaggctgtcctccctaataaaagattttcccaaggttgatctggaggtgacgtttcccaaggcatggttgtgacagtcttcctgaaagcaagggccgtttctccacagaatgaggaggtcttcacggatggctttgccgattccagcccttggtccttggatagatttctgttgggcaagggagacttcgagaatgctggcacccatagcgacatctgccctgagctgctcagcaggcaggcagcagcctcccgcacccatgggagagagttttgttttcttggccgggctgggcaggtgcgccttcctttctctctcctgtgaagaactgcaggagggccctcagctgtgaggttgtggatgaacaggcctgttcgccctggggtccgggcctggcacaggaagcagctagactaggggagtccttggagcatctgagaggggttttctttcctctgggaagagtcgcaagtcttatgaggatgccacaatctgggcagtgacccgtggccctggggaccttcctagtgccccccaaaaccaaggaagcattcacgtgagatggggagtcagccttccagctggtgtgtaggaaagccaggtccctgggcccttgtcccatgtggggttgagatccagatctccatgagatattcccatcctccgccgagcggtgatgcgtgaccgtgtgtgcaggccgctgttctcccaagctcggggccatgccgtgccaccgtcaccagagccagctgcagcactggggcagccactgtcgccggacttggggaagcccagggtgaagacagtcactcatccgtgcaagctctccagaagggatgcaagctctccagaaggggtgtgatctctgagcagtggggagtggagtcaccactcgggacatagagggtggacagttcaggcctgtgtctgcctccttgggactgtggagtgggtgccctcagtaaagcgctttgttggaatggt

SEQ ID NO: 118872 - DNA, 1634 bp, Homo sapiens
  Payload ID: 3285
  Gene Symbol: C21orf2
  Gene Name: chromosome 21 open reading frame 2
  Uniprot ID: O43822
  ENST ID: ENST00000397956
  CDS Start-End: 200-1327
agcagagccaacgtgtcagcggcgcccaagcggccccagcgggctcgcgtcgccccgctctcctcaccgagccgccaatcggctcaggatccgcccctgacgacgcgggccccgcccctggagacacgcgccgcgcagtcgtcacccgcccgggatcaggaggccgggggcgcccgccggtcgggcctgggcggccgccatgaagctgacgcggaagatggttctgacccgggccaaggcctcggagctgcacagcgtgcgcaagctcaactgctggggcagccgcctcacagatatctccatttgccaggagatgcccagcctggaggtgatcacgctcagtgtcaacagcatctccaccctggagcctgtgagccggtgccagcgcctgagtgagctgtacctgcggaggaaccgcatccccagcctggctgagctcttctacctgaaggggctgccgcgtctgcgggtgctgtggctggccgagaacccgtgctgcggcaccagcccccaccgctaccgcatgaccgtgctgcgcaccctgccgcgcctacagaagctggacaaccaggctgtgacggaggaggagctgtcccgtgcactgagtgagggagaggagatcactgcggccccagagagagagggcacaggccacggcggccccaagctatgctgcacactgagctccctcagctccgctgctgagactggccgggacccgctggacagcgaggaggaggcaaccggcgcccaggatgaacgtggcctgaagccgccttcccggggccagtttccttccctctcagccagggatgcctcgagcagccacaggggcagggtgagtggcgggccgctaggggccgcggctgcctctgcccactgcacccactgcacagaaaccgtggggagggagcatggagcctcacagggccccgtggggagggagcatggagcctcacagggccttgaagagctgtgccccagggggagctgcgtgtgcgggtctgtgaatgcgcacacacgtgtaacacgtgccccgcacggagccgtcctggcccctcagcctctcctgctgtcctggtctgtggaatgtgggcccgggccctgctgggctgagggcaacaggagtcacgtggaagaggtgccacacacgcgtccacaggcggggctcctctgctcagattctccgagtgtgccgaacgtcctgactgccatcctgctgctgctgcgggagctggatgcagaggggctggaggccgtgcagcagactgtgggcagccggctgcaggccctgcgtggggaagaggtgcaggagcacgccgagtgaccgcaggacctgaacgccgctccagcctccacggggaccccagcgtcttccccagcccccgggagctggagggtggctgccatggccgcagccccggccccacacaaaagcctccccggtttgccacatcggccgagggcaggagtgggtgttaggtactggctaaccggggcggtggagatgcctgtctacaccagtcctgtccccaggactccccttctgtggtctggaggttctaggctggcctgggctcttaaagggaggattttgcaggctgtcctccctaataaaagattttcccaaggtt

SEQ ID NO: 118873 - DNA, 1674 bp, Homo sapiens
  Payload ID: 3286
  Gene Symbol: C21orf33
  Gene Name: chromosome 21 open reading frame 33
  Uniprot ID: P30042
  ENST ID: ENST00000291577
  CDS Start-End: 94-900
caggcgcagtcccgacgagcaacgcgtttgtagaggggtgggtgcgcacgctctgtccctgcgtgaccttccgaccccgctgtcctcaccgcaatggcggctgtgagggtcctggtggcctcgaggctcgctgcggcatctgcattcacgtccctgtcccccggcggtcggacgccttcccagcgcgcagcccttcacctctccgtgccgcgccccgcggccagggtcgcgctggtgctgtctggatgcggagtctacgatgggaccgagatccacgaggcctcggcgatcctggtgcacctgagccgtggaggggctgaagtccagatctttgctcctgacgtccctcagatgcacgtgattgaccacaccaaggggcagccgtccgaaggcgagagcaggaatgttttgaccgagtctgcgaggatcgcccgtggcaaaatcacagacctggccaacctcagtgcagccaaccatgatgctgccatctttccaggaggctttggagcggctaaaaacctgagcacgtttgccgtggacgggaaagattgcaaggtgaataaagaagtggagcgtgtcctgaaggagttccaccaggccgggaagcccatcggcttgtgctgcattgcacctgtcctcgcggccaaggtgctcagaggcgtcgaggtgactgtgggccacgagcaggaggaaggtggcaagtggccttatgccgggaccgcagaggccatcaaggccctgggtgccaagcactgcgtgaaggaagtggtcgaagctcacgtggaccagaaaaacaaggtggtcacgaccccagccttcatgtgcgagacggcactccactacatccatgatgggatcggagccatggtgaggaaggtgctggaactcactggaaagtgacgcgcatggacggggcccagctaggcgccaggacttggcctcaccctctggctgaggagctgtcggctgctttccatccagctgggagtctggcaggcccttttttttttttctttgccgaaacctgcaggcgttctctctctaaggaggatgtgctgcagtgcatgggggatgtttcttcctgggtgtggctgggctgctctcacatacagaggccgaggggccaattcgttctctgccacagggacttgcctcactgtgtcccaaaaacaaatcgcagccagcttttccagaaatagaaaattctgccgtctgaggttttatacttcaggttagttagtttttggaaggaagaacatttttaggtttgcaagcctcctgatcaggaaaccagaaataccacatttatggaccatgaaaggttggttcttgactctgaagggacttttgagttaatcagcgtaaggggatttctaaagcaggcaatccctgtagccgcagagaataaacgccttcccaaaatggcaacttcccacagccacatttcagacctgctgagactgctgagtgaggaatggcagtgaggtttcttcaattagtctcagttctcttaattttcaggaagaaagggaaattgcagcccctcagcccccaggattgacctctggggagtgatggtagcgttggtgccaggccgtgggttcaggtgtggcagaagcttgcagatgcgtccgaagggaaataaagtgtgttggcgttagactttgtgctgca

SEQ ID NO: 118874 - DNA, 1506 bp, Homo sapiens
  Payload ID: 3286
  Gene Symbol: C21orf33
  Gene Name: chromosome 21 open reading frame 33
  Uniprot ID: P30042
  ENST ID: ENST00000348499
  CDS Start-End: 19-732
cccgctgtcctcaccgcaatggcggctgtgagggtcctggtggcctcgaggctcgctgcggcatctgcattcacgtccctgtcccccggcggtcggacgccttcccagcgcgcagcccttcacctctccgtgccgcgccccgcggccagggtcgcgctggtgctgtctggatgcggagtctacgatgggaccgagatccacgaggcctcggcgatcctggtgcacctgagccgtggaggggctgaagtccagatctttgctcctgacgtccctcagatgcacgtgattgaccacaccaaggggcagccgtccgaaggcgagagcaggaatgttttgaccgagtctgcgaggatcgcccgtggcaaaatcacagacctggccaacctcagtgcagccaaccatgatgctgccatctttccaggaggctttggagcggctaaaaacctcttgtgctgcattgcacctgtcctcgcggccaaggtgctcagaggcgtcgaggtgactgtgggccacgagcaggaggaaggtggcaagtggccttatgccgggaccgcagaggccatcaaggccctgggtgccaagcactgcgtgaaggaagtggtcgaagctcacgtggaccagaaaaacaaggtggtcacgaccccagccttcatgtgcgagacggcactccactacatccatgatgggatcggagccatggtgaggaaggtgctggaactcactggaaagtgacgcgcatggacggggcccagctaggcgccaggacttggcctcaccctctggctgaggagctgtcggctgctttccatccagctgggagtctggcaggcccttttttttttttctttgccgaaacctgcaggcgttctctctctaaggaggatgtgctgcagtgcatgggggatgtttcttcctgggtgtggctgggctgctctcacatacagaggccgaggggccaattcgttctctgccacagggacttgcctcactgtgtcccaaaaacaaatcgcagccagcttttccagaaatagaaaattctgccgtctgaggttttatacttcaggttagttagtttttggaaggaagaacatttttaggtttgcaagcctcctgatcaggaaaccagaaataccacatttatggaccatgaaaggttggttcttgactctgaagggacttttgagttaatcagcgtaaggggatttctaaagcaggcaatccctgtagccgcagagaataaacgccttcccaaaatggcaacttcccacagccacatttcagacctgctgagactgctgagtgaggaatggcagtgaggtttcttcaattagtctcagttctcttaattttcaggaagaaagggaaattgcagcccctcagcccccaggattgacctctggggagtgatggtagcgttggtgccaggccgtgggttcaggtgtggcagaagcttgcagatgcgtccgaagggaaataaagtgtgttggcgttagactttgtgctgca

SEQ ID NO: 118875 - DNA, 694 bp, Homo sapiens
  Payload ID: 3286
  Gene Symbol: C21orf33
  Gene Name: chromosome 21 open reading frame 33
  ENST ID: ENST00000389690
  CDS Start-End: 1-675
ccttcccagcgcgcagcccttcacctctccgtgccgcgccccgcggccagggtcgcgctggtgctgtctggatgcggagtctacgatgggaccgagatccacgaggcctcggcgatcctggtgcacctgagccgtggaggggctgaagtccagatctttgctcctgacgtccctcagatgcacgtgattgaccacaccaaggggcagccgtccgaaggcgagagcaggaatgttttgaccgagtctgcgaggatcgcccgtggcaaaatcacagacctggccaacctcagtgcagccaaccatgatgctgccatctttccaggaggctttggagcggctaaaaacctgagcacgtttgccgtggacgggaaagattgcaaggtgaataaagaagtggagcgtgtcctgaaggagttccaccaggccgggaagcccatcggtcactcacttaaggacctgcctggtcactgtccagggaggcccctaaagtggagcctcaggaagaggtgcaggctcagagctcctgaaggaggtccctgctgcagccgtgtcacagccggggtgaaggtttcgcccatggtctccacctcgggatcccgtccttgtcagagaagtgttccttggatgagcgcccagagggaggagcccatggccctttcttctgtgactgattaaaaatctcgatgaaacaaga

SEQ ID NO: 118876 - DNA, 1077 bp, Homo sapiens
  Payload ID: 3286
  Gene Symbol: C21orf33
  Gene Name: chromosome 21 open reading frame 33
  ENST ID: ENST00000427803
  CDS Start-End: 81-734
gacgagcaacgcgtttgtagaggggtgggtgcgcacgctctgtccctgcgtgaccttccgaccccgctgtcctcaccgcaatggcggctgtgagggtcctggtggcctcgaggctcgctgcggcatctgcattcacgtccctgtcccccggcggtcggacgccttcccagcgcgcagcccttcacctctccgtgccgcgccccgcggccagggtcgcgctggtgctgtctggatgcggagtctacgatgggaccgagatccacgaggcctcggcgatcctggtgcacctgagccgtggaggggctgaagtccagatctttgctcctgacgtccctcagatgcacgtgattgaccacaccaaggggcagccgtccgaaggcgagagcaggaatgttttgaccgagtctgcgaggatcgcccgtggcaaaatcacagacctggccaacctcagtgcagccaaccatgatgctgccatctttccaggaggctttggagcggctaaaaacctgagcacgtttgccgtggacgggaaagattgcaaggtgaataaagaagtggagcgtgtcctgaaggagttccaccaggccgggaagcccatcgggtgtgatgcttccacgagcctcccggcacctgctccttggtggtcctggaacgcggcgctgtgctgtccaggtctcagctgcgtctggtgctggcagggcgagagccgcacttgcgtgggtgaacatcagtgaggcgcactcgcgatggccgctcactaccgagttctgtcagccgaacaaggatgaggatctatcggaatcctctgtctccccatccacagtcactcacttaaggacctgcctggtcactgtccagggaggcccctaaagtggagcctcaggaagaggtgcaggctcagagctcctgaaggaggtccctgctgcagccgtgtcacagccggggtgaaggtttcgcccatggtctccacctcgggatcccgtccttgtcagagaagtgttccttggatgagcgcccagagggaggagcccatggccctttcttctgtgactgattaaaaatctcgatgaaacaaga

SEQ ID NO: 118877 - DNA, 1546 bp, Homo sapiens
  Payload ID: 3286
  Gene Symbol: C21orf33
  Gene Name: chromosome 21 open reading frame 33
  ENST ID: ENST00000449622
  CDS Start-End: 1-772
gcgccccgcggccagggtcgcgctggtgctgtctggatgcggagtctacgatgggaccgagatccacgaggcctcggcgatcctggtgcacctgagccgtggaggggctgaagtccagatctttgctcctgacgtccctcagatgcacgtgattgaccacaccaaggggcagccgtccgaaggcgagagcaggaatgttttgaccgagtctgcgaggatcgcccgtggcaaaatcacagacctggccaacctcagtgcagccaaccatgatgctgccatctttccaggaggctttggagcggctaaaaacctgtgcgtatttgagctccaaggtcttccgctttccatgtggagcagatgggaagggggtgcacctgtctgctgtccaatgtggagcacgtttgccgtggacgggaaagattgcaaggtgaataaagaagtggagcgtgtcctgaaggagttccaccaggccgggaagcccatcggcttgtgctgcattgcacctgtcctcgcggccaaggtgctcagaggcgtcgaggtgactgtgggccacgagcaggaggaaggtggcaagtggccttatgccgggaccgcagaggccatcaaggccctgggtgccaagcactgcgtgaaggaagtggtcgaagctcacgtggaccagaaaaacaaggtggtcacgaccccagccttcatgtgcgagacggcactccactacatccatgatgggatcggagccatggtgaggaaggtgctggaactcactggaaagtgacgcgcatggacggggcccagctaggcgccaggacttggcctcaccctctggctgaggagctgtcggctgctttccatccagctgggagtctggcaggcccttttttttttttctttgccgaaacctgcaggcgttctctctctaaggaggatgtgctgcagtgcatgggggatgtttcttcctgggtgtggctgggctgctctcacatacagaggccgaggggccaattcgttctctgccacagggacttgcctcactgtgtcccaaaaacaaatcgcagccagcttttccagaaatagaaaattctgccgtctgaggttttatacttcaggttagttagtttttggaaggaagaacatttttaggtttgcaagcctcctgatcaggaaaccagaaataccacatttatggaccatgaaaggttggttcttgactctgaagggacttttgagttaatcagcgtaaggggatttctaaagcaggcaatccctgtagccgcagagaataaacgccttcccaaaatggcaacttcccacagccacatttcagacctgctgagactgctgagtgaggaatggcagtgaggtttcttcaattagtctcagttctcttaattttcaggaagaaagggaaattgcagcccctcagcccccaggattgacctctggggagtgatggtagcgttggtgccaggccgtgggttcaggtgtggcagaagcttgcagatgcgtccgaagggaaataaagtgtgttggcgttagactttgtgctgca

SEQ ID NO: 118878 - DNA, 674 bp, Homo sapiens
  Payload ID: 3286
  Gene Symbol: C21orf33
  Gene Name: chromosome 21 open reading frame 33
  ENST ID: ENST00000419699
  CDS Start-End: 1-575
ctcagatgcacgtgattgaccacaccaaggggcagccgtccgaaggcgagagcaggaatgttttgaccgagtctgcgaggatcgcccgtggcaaaatcacagacctggccaacctcagtgcagccaaccatgatgctgccatctttccaggaggctttggagcggctaaaaacctgagcacgtttgccgtggacgggaaagattgcaaggtgaataaagaagtggagcgtgtcctgaaggagttccaccaggccgggaagcccatcggcttgtgctgcattgcacctgtcctcgcggccaaggtgctcagaggcgtcgaggtgactgtgggccacgagcaggaggaaggtggcaagtggccttatgccgggaccgcagaggccatcaaggccctgggtgccaagcactgcgtgaaggaagtggtcgaagctcacgtggaccagaaaaacaaggtggtcacgaccccagccttcatgtgcgagacggcactccactacatccatgatgggatcggagccatggaagaaagggaaattgcagcccctcagcccccaggattgacctctggggagtgatggtagcgttggtgccaggccgtgggttcaggtgtggcagaagcttgcagatgcgtccgaagggaaataaagtgtgttggcgttagactttgtgctgca

SEQ ID NO: 118879 - DNA, 2975 bp, Homo sapiens
  Payload ID: 3287
  Gene Symbol: C21orf58
  Gene Name: chromosome 21 open reading frame 58
  Uniprot ID: P58505
  ENST ID: ENST00000291691
  CDS Start-End: 1138-2106
gcggcaaaaagttcgcgctgctggtcccgcgcgggcggcccctgggctttgtgtccaccaggacagcgggccgggctccctgcaggcgcgggcggcgccgaacggtgctcagcaaccacccggacagggccaggccgttttctcccgctcaggcattagtcgttggctgtgggccgccgcgggaagttgaggcctaccacggaggaggctgctgaggtggatctcaggggatccgcaagggctccctcacccttgccgggaccctgggaacccgaaacaaaatcctacgccaccagcccgccgaatgcgccccctcggccgggggtcctgggtcttcagagaagaactcggccgaatgcggtcagaaagcccgcgaaccgcctggacctgcaggccccgccgcttggagctcccgcctttcccgaccgagcccgtgtctgctcgtgtgtctcactgatgtcttaggtctcaaaaaaaaaagaaaagaaaaggtttttagtagacagaagagaaatggggccgtgggttcgtggtcccagggggaaactgacgtcgcatgaggtcgtcgtccctcagcttgagctcagcggaacataagcttgcagaggtggaaaccacggaaggtttgggtgtcttggagctctctggacaccgaagcccggacacagtcccggggtccgcaccgcctgtgacctgtggcgggaccgccggggtgggcgttttctcagctggcgcgcgcgtaggtggaacttgggaaactaactggagcgaagtggcaaaaaaccaagacagggccggtgacctcgcgcaggccgtccttaactgtggagtattccttcagctaacccctttatttcatgtgtccaagtctggtttctgggtttctttgtagtcctccgggcctgttcgtgcgccttcacttgcaaaaggttcgtcgtggagggccgtgtgcttgtttgcagcagtaacgatgcccttcccgagcgtgctggagtggctcctcgctgacgcaagctcaccttgcagcctcctcagcaactgcaacttaaacgcgccctcaggaagccctggaatctcgctcagaattttttttctttttttgagacagtctcgctgcgacgcccaggctatagcgcaatggcgcgatctcggctccctgcaacctccctcaggaagccgtggaagctcgaccgccagaaacttccttctcctgactcaggccacagtcttctgtgtggctggtctccaggaggtaaggcccgccctgcaggcaacaccggtgcttgggctcctgctgagcagttctttcctgcgagtaacagaaccagggagggaggtgggctgtggcctcccctgcccctacagtcgtctcctgcagctcccaccatgctggactcatcagcagcagagcaagtgacccgactgacgctgaagctcttgggacagaagctggagcaagaacggcagaacgtggaagggggacctgagggcctccacctcgagccaggaaatgaggaccggccggacgatgccctgcagactgctctgaagagaaggagggaccttctgcagagactccgggaacaacacctcctggacgagctctctcgggcccaggcctggagcgggccaagcagaggagccctcgggtcagccctgcccccagagctgccccccacgggcatcctacccactgcctccccatccccgctggccccagacccgccaaggatcatcctgcctacggtcccccagcctcctgccaccatcattcagcagctccctcagcagccactcatagcacagattcctcctccccaggccttccctactcaacggtcaggaagtattaaggaagacatggtggagctgctgctgctgcagaacgcacaggtgcaccagttggtcctgcagaactggatgctcaaggccctgcccccagccctgcaggacccgccacatgtgcccccgagggtcccacgagctgccaggccaaggctgcctgccgtgcaccaccaccaccaccaccaccatgctgtgtggccacctggggctgccactgtcctccagcccgcccccagcctgtggacgcctggcccaccctgagtgtgagtcacagagaccctggccggggcaccctccacccccaggcttcctcagggctgtgggctgtggcgggactatggaagggagcagggagagaccctgccaccacccggagtggctacgcgagtgtggactgcaggctcctcctggggaagctgggcaggctcgctttctggtcacggggccattccagggggcatcccttgctccgggtcccctgcagtgaggggcctgtgaaccccaccagggcaacagcccctcccagggacccctcctttcctgtagggcggcgccggcccacctgggagcctcagatccccctcttccatcacggaggtaaagttgaggccgtggacgccaccagcctgatgaaataaagatttcatccagaaagagtttaagaaaatctcagctcaggagccagaacagaaaagatcaatagctttagccacatggaagtgtgaacatcctgatggggaaaataccacaaagtctaatttaataactagggacacctgtgtccacagctgtggcacagactcccactaaagaagtaggggtgcatggctcatgcctgtaatcccagcactttaagaggctgaggcaggaggatcacttgagctcaggaattcgagaccagcctgggtcacatagcaagaccccgtctctacaaaaaataaatttaaaaaactagccaggtgtggtgatatgcgcctgttatctcagcagctctgggggctgaggtgggaggattgcttgagcccaggagttagaagctgcagtgagctctgatggaaccactgcactatagcctggaccacagagcaggcccctgtctcaaaaataaaataaaaaagtgaaagaagcaa

SEQ ID NO: 118880 - DNA, 2900 bp, Homo sapiens
  Payload ID: 3287
  Gene Symbol: C21orf58
  Gene Name: chromosome 21 open reading frame 58
  ENST ID: ENST00000397679
  CDS Start-End: 1385-2035
ttcagggtccctacatggatgtgggttggaagacaggacaggcacacaaccatagatactgatggacatgggccatttacagaactgagggcaagagagcaattttggccactgaggcaagttcctgggttagctgcaccgaggagggtgctgacctctgcccctcgggtccacaggtctgggcccctgctgctgacatcccccacatgtcagtctgcctgctagtgggattgactaactcatcaacgtggagtttaatgcccaaccaagtgcagaccacgctcctgttttgcgtcaccctctgcgaagcttcctgcaaacttgactccctgcccagtgcccccagccccaaggtgggacatatcccctgggcaccccctctggtcctgctaaagcccagcccctctgcaggtcacaacccctcctctgtcctaccccttctgctgcctgcaatttcctgaactccttggtaggcagtctcctcaccctgtcctcccagtgtctccccaccctgtcttccctgcttgctctgagggtccctaggagggaggtattaacaccctggaggcagtacacaggtggggcgccctcccctgacacacaggttcttctggactgggtcctgaggctggtggtgcatagggggtcacgactgcccttcccccaggtctgagggttctgcccctctgcctcagctgctgcccacttttttgccttcccatgaagcccagctggccacacctggggatgagtgtttaccggtagcctgaggacgcacagtggaaacctggcaacctggggcctccctgtgtctggcagcctggcaactgtcacgcggcgcccagcgctggcttctggggcactgcagtccagggagggtgtggctatcttcccacagggctcttctcttccctcaggctggtctccaggaggtaaggcccgccctgcaggcaacaccggtgcttgggctcctgctgagcagttctttcctgcgagtaacagaaccagggagggaggtgggctgtggcctcccctgcccctacagtcgtctcctgcagctcccaccatgctggactcatcagcagcagagcaagtgacccgactgacgctgaagctcttgggacagaaagcctcttagtcattcctggagcacacagggcctttgcgtggagccaccgtctctgtcacggtctctcttcctcacagaagctggagcaagaacggcagaacgtggaagggggacctgagggcctccacctcgagccaggaaatgaggaccggccggacgatgccctgcagactgctctgaagagaaggagggaccttctgcagagactccgggaggccaccctcatgcacataaccctggaagggtcttccagtcatggccatcctgcccggagaggcgcctgtacctggcccaggctggcctgagcctgatgctgggggtgcctctgtggcgttggggctccccgtccccgtgtgcagcagctctgcatcggccttgcaggaacaacacctcctggacgagctctctcgggcccaggcctggagcgggccaagcagaggagccctcgggtcagccctgcccccagagctgccccccacgggcatcctacccactgcctccccatccccgctggccccagacccgccaaggatcatcctgcctacggtcccccagcctcctgccaccatcattcagcagctccctcagcagccactcatagcacagattcctcctccccaggccttccctactcaacggtcaggaagtattaaggaagacatggtggagctgctgctgctgcagaacgcacaggtgcaccagttggtcctgcagaactggatgctcaaggccctgcccccagccctgcaggacccgccacatgtgcccccgagggtcccacgagctgccaggccaaggctgcctgccgtgcaccaccaccaccaccaccaccatgctgtgtggccacctggggctgccactgtcctccagcccgcccccagcctgtggacgcctggcccaccctgagtgtgagtcacagagaccctggccggggcaccctccacccccaggcttcctcagggctgtgggctgtggcgggactatggaagggagcagggagagaccctgccaccacccggagtggctacgcgagtgtggactgcaggctcctcctggggaagctgggcaggctcgctttctggtcacggggccattccagggggcatcccttgctccgggtcccctgcagtgaggggcctgtgaaccccaccagggcaacagcccctcccagggacccctcctttcctgtagggcggcgccggcccacctgggagcctcagatccccctcttccatcacggaggtaaagttgaggccgtggacgccaccagcctgatgaaataaagatttcatccagaaagagtttaagaaaatctcagctcaggagccagaacagaaaagatcaatagctttagccacatggaagtgtgaacatcctgatggggaaaataccacaaagtctaatttaataactagggacacctgtgtccacagctgtggcacagactcccactaaagaagtaggggtgcatggctcatgcctgtaatcccagcactttaagaggctgaggcaggaggatcacttgagctcaggaattcgagaccagcctgggtcacatagcaagaccccgtctctacaaaaaataaatttaaaaaactagccaggtgtggtgatatgcgcctgttatctcagcagctctgggggctgaggtgggaggattgcttgagcccaggagttagaagctgcagtgagctctgatggaaccactgcactatagcctggaccacagagcaggcccctgtctcaaaaataaaataaaaaagtgaaagaa

SEQ ID NO: 118881 - DNA, 2624 bp, Homo sapiens
  Payload ID: 3287
  Gene Symbol: C21orf58
  Gene Name: chromosome 21 open reading frame 58
  ENST ID: ENST00000397680
  CDS Start-End: 1109-1759
tgctggtcccgcgcgggcggcccctgggctttgtgtccaccaggacagcgggccgggctccctgcaggcgcgggcggcgccgaacggtgctcagcaaccacccggacagggccaggccgttttctcccgctcaggcattagtcgttggctgtgggccgccgcgggaagttgaggcctaccacggaggaggctgctgaggtggatctcaggggatccgcaagggctccctcacccttgccgggaccctgggaacccgaaacaaaatcctacgccaccagcccgccgaatgcgccccctcggccgggggtcctgggtcttcagagaagaactcggccgaatgcggtcagaaagcccgcgaaccgcctggacctgcaggccccgccgcttggagctcccgcctttcccgaccgagcccgtgtctgctcgtgtgtctcactgatgtcttaggtctcaaaaaaaaaagaaaagaaaaggtttttagtagacagaagagaaatggggccgtgggttcgtggtcccagggggaaactgacgtcgcatgaggtcgtcgtccctcagcttgagctcagcggaacataagcttgcagaggtggaaaccacggaaggtttgggtgtcttggagctctctggacaccgaagcccggacacagtcccggggtccgcaccgcctgtgacctgtggcgggaccgccggggtgggcgttttctcagctggcgcgcgcgctggtctccaggaggtaaggcccgccctgcaggcaacaccggtgcttgggctcctgctgagcagttctttcctgcgagtaacagaaccagggagggaggtgggctgtggcctcccctgcccctacagtcgtctcctgcagctcccaccatgctggactcatcagcagcagagcaagtgacccgactgacgctgaagctcttgggacagaagctggagcaagaacggcagaacgtggaagggggacctgagggcctccacctcgagccaggaaatgaggaccggccggacgatgccctgcagactgctctgaagagaaggagggaccttctgcagagactccgggaggccaccctcatgcacataaccctggaagggtcttccagtcatggccatcctgcccggagaggcgcctgtacctggcccaggctggcctgagcctgatgctgggggtgcctctgtggcgttggggctccccgtccccgtgtgcagcagctctgcatcggccttgcaggaacaacacctcctggacgagctctctcgggcccaggcctggagcgggccaagcagaggagccctcgggtcagccctgcccccagagctgccccccacgggcatcctacccactgcctccccatccccgctggccccagacccgccaaggatcatcctgcctacggtcccccagcctcctgccaccatcattcagcagctccctcagcagccactcatagcacagattcctcctccccaggccttccctactcaacggtcaggaagtattaaggaagacatggtggagctgctgctgctgcagaacgcacaggtgcaccagttggtcctgcagaactggatgctcaaggccctgcccccagccctgcaggacccgccacatgtgcccccgagggtcccacgagctgccaggccaaggctgcctgccgtgcaccaccaccaccaccaccaccatgctgtgtggccacctggggctgccactgtcctccagcccgcccccagcctgtggacgcctggcccaccctgagtgtgagtcacagagaccctggccggggcaccctccacccccaggcttcctcagggctgtgggctgtggcgggactatggaagggagcagggagagaccctgccaccacccggagtggctacgcgagtgtggactgcaggctcctcctggggaagctgggcaggctcgctttctggtcacggggccattccagggggcatcccttgctccgggtcccctgcagtgaggggcctgtgaaccccaccagggcaacagcccctcccagggacccctcctttcctgtagggcggcgccggcccacctgggagcctcagatccccctcttccatcacggaggtaaagttgaggccgtggacgccaccagcctgatgaaataaagatttcatccagaaagagtttaagaaaatctcagctcaggagccagaacagaaaagatcaatagctttagccacatggaagtgtgaacatcctgatggggaaaataccacaaagtctaatttaataactagggacacctgtgtccacagctgtggcacagactcccactaaagaagtaggggtgcatggctcatgcctgtaatcccagcactttaagaggctgaggcaggaggatcacttgagctcaggaattcgagaccagcctgggtcacatagcaagaccccgtctctacaaaaaataaatttaaaaaactagccaggtgtggtgatatgcgcctgttatctcagcagctctgggggctgaggtgggaggattgcttgagcccaggagttagaagctgcagtgagctctgatggaaccactgcactatagcctggaccacagagcaggcccctgtctcaaaaataaaataaaaaagtgaaagaa

SEQ ID NO: 118882 - DNA, 2941 bp, Homo sapiens
  Payload ID: 3287
  Gene Symbol: C21orf58
  Gene Name: chromosome 21 open reading frame 58
  ENST ID: ENST00000397682
  CDS Start-End: 1705-2355
gcggcaaaaagttcgcgctgctggtcccgcgcgggcggcccctgggctttgtgtccaccaggacagcgggccgggctccctgcaggcgcgggcggcgccgaacggtgctcagcaaccacccggacagggccaggccgttttctcccgctcaggcattagtcgttggctgtgggccgccgcgggaagttgaggcctaccacggaggaggctgctgaggtggatctcaggggatccgcaagggctccctcacccttgccgggaccctgggaacccgaaacaaaatcctacgccaccagcccgccgaatgcgccccctcggccgggggtcctgggtcttcagagaagaactcggccgaatgcggtcagaaagcccgcgaaccgcctggacctgcaggccccgccgcttggagctcccgcctttcccgaccgagcccgtgtctgctcgtgtgtctcactgatgtcttaggtctcaaaaaaaaaagaaaagaaaaggtttttagtagacagaagagaaatggggccgtgggttcgtggtcccagggggaaactgacgtcgcatgaggtcgtcgtccctcagcttgagctcagcggaacataagcttgcagaggtggaaaccacggaaggtttgggtgtcttggagctctctggacaccgaagcccggacacagtcccggggtccgcaccgcctgtgacctgtggcgggaccgccggggtgggcgttttctcagctggcgcgcgcgtaggtggaacttgggaaactaactggagcgaagtggcaaaaaaccaagacagggccggtgacctcgcgcaggccgtccttaactgtggagtattccttcagctaacccctttatttcatgtgtccaagtctggtttctgggtttctttgtagtcctccgggcctgttcgtgcgccttcacttgcaaaaggttcgtcgtggagggccgtgtgcttgtttgcagcagtaacgatgcccttcccgagcgtgctggagtggctcctcgctgacgcaagctcaccttgcagcctcctcagcaactgcaacttaaacgcgccctcaggaagccctggaatctcgctcagaattttttttctttttttgagacagtctcgctgcgacgcccaggctatagcgcaatggcgcgatctcggctccctgcaacctccctcaggaagccgtggaagctcgaccgccagaaacttccttctcctgactcaggccacagtcttctgtgtggctggtctccaggaggtaaggcccgccctgcaggcaacaccggtgcttgggctcctgctgagcagttctttcctgcgagtaacagaaccagggagggaggtgggctgtggcctcccctgcccctacagtcgtctcctgcagctcccaccatgctggactcatcagcagcagagcaagtgacccgactgacgctgaagctcttgggacagaaagcctcttagtcattcctggagcacacagggcctttgcgtggagccaccgtctctgtcacggtctctcttcctcacagaagctggagcaagaacggcagaacgtggaagggggacctgagggcctccacctcgagccaggaaatgaggaccggccggacgatgccctgcagactgctctgaagagaaggagggaccttctgcagagactccgggaggccaccctcatgcacataaccctggaagggtcttccagtcatggccatcctgcccggagaggcgcctgtacctggcccaggctggcctgagcctgatgctgggggtgcctctgtggcgttggggctccccgtccccgtgtgcagcagctctgcatcggccttgcaggaacaacacctcctggacgagctctctcgggcccaggcctggagcgggccaagcagaggagccctcgggtcagccctgcccccagagctgccccccacgggcatcctacccactgcctccccatccccgctggccccagacccgccaaggatcatcctgcctacggtcccccagcctcctgccaccatcattcagcagctccctcagcagccactcatagcacagattcctcctccccaggccttccctactcaacggtcaggaagtattaaggaagacatggtggagctgctgctgctgcagaacgcacaggtgcaccagttggtcctgcagaactggatgctcaaggccctgcccccagccctgcaggacccgccacatgtgcccccgagggtcccacgagctgccaggccaaggctgcctgccgtgcaccaccaccaccaccaccaccatgctgtgtggccacctggggctgccactgtcctccagcccgcccccagcctgtggacgcctggcccaccctgagtggcggcgccggcccacctgggagcctcagatccccctcttccatcacggaggtaaagttgaggccgtggacgccaccagcctgatgaaataaagatttcatccagaaagagtttaagaaaatctcagctcaggagccagaacagaaaagatcaatagctttagccacatggaagtgtgaacatcctgatggggaaaataccacaaagtctaatttaataactagggacacctgtgtccacagctgtggcacagactcccactaaagaagtaggggtgcatggctcatgcctgtaatcccagcactttaagaggctgaggcaggaggatcacttgagctcaggaattcgagaccagcctgggtcacatagcaagaccccgtctctacaaaaaataaatttaaaaaactagccaggtgtggtgatatgcgcctgttatctcagcagctctgggggctgaggtgggaggattgcttgagcccaggagttagaagctgcagtgagctctgatggaaccactgcactatagcctggaccacagagcaggcccctgtctcaaaaataaaataaaaaagtgaaagaagcaa

SEQ ID NO: 118883 - DNA, 1674 bp, Homo sapiens
  Payload ID: 3287
  Gene Symbol: C21orf58
  Gene Name: chromosome 21 open reading frame 58
  ENST ID: ENST00000397683
  CDS Start-End: 657-1307
aaagaggagaggaaaaaaagttaaccagttcaacgaaaaggagaatctggcaaggaagcatctctgatgtgggcagagcctgcagcagcagatgtggagggcttctcacaagtgacagcaagactgtctgtaaaacggccactttgacctggtggtgttctgctcttttcatggccatagagtactctggctggtctccaggaggtaaggcccgccctgcaggcaacaccggtgcttgggctcctgctgagcagttctttcctgcgagtaacagaaccagggagggaggtgggctgtggcctcccctgcccctacagtcgtctcctgcagctcccaccatgctggactcatcagcagcagagcaagtgacccgactgacgctgaagctcttgggacagaaagcctcttagtcattcctggagcacacagggcctttgcgtggagccaccgtctctgtcacggtctctcttcctcacagaagctggagcaagaacggcagaacgtggaagggggacctgagggcctccacctcgagccaggaaatgaggaccggccggacgatgccctgcagactgctctgaagagaaggagggaccttctgcagagactccgggaggccaccctcatgcacataaccctggaagggtcttccagtcatggccatcctgcccggagaggcgcctgtacctggcccaggctggcctgagcctgatgctgggggtgcctctgtggcgttggggctccccgtccccgtgtgcagcagctctgcatcggccttgcaggaacaacacctcctggacgagctctctcgggcccaggcctggagcgggccaagcagaggagccctcgggtcagccctgcccccagagctgccccccacgggcatcctacccactgcctccccatccccgctggccccagacccgccaaggatcatcctgcctacggtcccccagcctcctgccaccatcattcagcagctccctcagcagccactcatagcacagattcctcctccccaggccttccctactcaacggtcaggaagtattaaggaagacatggtggagctgctgctgctgcagaacgcacaggtgcaccagttggtcctgcagaactggatgctcaaggccctgcccccagccctgcaggacccgccacatgtgcccccgagggtcccacgagctgccaggccaaggctgcctgccgtgcaccaccaccaccaccaccaccatgctgtgtggccacctggggctgccactgtcctccagcccgcccccagcctgtggacgcctggcccaccctgagtgacagattctttcattcctgaagttccgcacaaggaggaaccctgtcccagtgcttccatctttgaaagtttgcaggtaggagacaggatgaccagagagttgccactgagctgcagagctccccagggacagccacctggtgctgacatggacgggcaggtgtgaacaccgaagggcccagcgcagctactggcagtaacactcacttctctcagaaccatcttttcgtgcctcttgaaggtgattccagagactctgtgctctcgttaaaagctcaaaccaaagctcagactccatttcctcttttcaaggtgactttccagcatggcatttctttctttctattaaaaatgtttttttttga

SEQ ID NO: 118884 - DNA, 1931 bp, Homo sapiens
  Payload ID: 3287
  Gene Symbol: C21orf58
  Gene Name: chromosome 21 open reading frame 58
  ENST ID: ENST00000445935
  CDS Start-End: 1796-1931
aaaagttcgcgctgctggtcccgcgcgggcggcccctgggctttgtgtccaccaggacagcgggccgggctccctgcaggcgcgggcggcgccgaacggtgctcagcaaccacccggacagggccaggccgttttctcccgctcaggcattagtcgttggctgtgggccgccgcgggaagttgaggcctaccacggaggaggctgctgaggtggatctcaggggatccgcaagggctccctcacccttgccgggaccctgggaacccgaaacaaaatcctacgccaccagcccgccgaatgcgccccctcggccgggggtcctgggtcttcagagaagaactcggccgaatgcggtcagaaagcccgcgaaccgcctggacctgcaggccccgccgcttggagctcccgcctttcccgaccgagcccgtgtctgctcgtgtgtctcactgatgtcttaggtctcaaaaaaaaaagaaaagaaaaggtttttagtagacagaagagaaatggggccgtgggttcgtggtcccagggggaaactgacgtcgcatgaggtcgtcgtccctcagcttgagctcagcggaacataagcttgcagaggtggaaaccacggaaggtttgggtgtcttggagctctctggacaccgaagcccggacacagtcccggggtccgcaccgcctgtgacctgtggcgggaccgccggggtgggcgttttctcagctggcgcgcgcgtaggtggaacttgggaaactaactggagcgaagtggcaaaaaaccaagacagggccggtgacctcgcgcaggccgtccttaactgtggagtattccttcagctaacccctttatttcatgtgtccaagtctggtttctgggtttctttgtagtcctccgggcctgttcgtgcgccttcacttgcaaaaggttcgtcgtggagggccgtgtgcttgtttgcagcagtaacgatgcccttcccgagcgtgctggagtggctcctcgctgacgcaagctcaccttgcagcctcctcagcaactgcaacttaaacgcgccctcaggaagccctggaatctcgctcagaattttttttctttttttgagacagtctcgctgcgacgcccaggctatagcgcaatggcgcgatctcggctccctgcaacctccctcaggaagccgtggaagctcgaccgccagaaacttccttctcctgactcaggccacagtcttctgtgtggtctgggcccctgctgctgacatcccccacatgtcagtctgcctgctagtgggattgactaactcatcaacgtggagtttaatgcccaaccaagtgcagaccacgctcctgttttgcgtcaccctctgcgaagcttcctgcaaacttgactccctgcccagtgcccccagccccaaggctggtctccaggaggtaaggcccgccctgcaggcaacaccggtgcttgggctcctgctgagcagttctttcctgcgagtaacagaaccagggagggaggtgggctgtggcctcccctgcccctacagtcgtctcctgcagctcccaccatgctggactcatcagcagcagagcaagtgacccgactgacgctgaagctcttgggacagaagctggagcaagaacggcagaacgtggaagggggacctgagggcctccacctcgagccaggaaatgaggaccggccggacgatgccctgcagactgctctgaagagaaggagggaccttctgcagagactccgggaggccaccctcatgcacataaccctggaagggtcttccagtcatggccatcctgcccggagaggcgcctgtacctggcccaggctggcctgagcctgatgctgggggtgcctctgtggcgttggggctccccgtccccgtgtgcagcagctctgcatcggccttgcaggaacaacacc

SEQ ID NO: 118885 - DNA, 1072 bp, Homo sapiens
  Payload ID: 3287
  Gene Symbol: C21orf58
  Gene Name: chromosome 21 open reading frame 58
  ENST ID: ENST00000417060
  CDS Start-End: 1-855
ggtaaggcccgccctgcaggcaacaccggtgcttgggctcctgctgagcagttctttcctgcgagtaacagaaccagggagggaggtgggctgtggcctcccctgcccctacagtcgtctcctgcagctcccaccatgctggactcatcagcagcagagcaagtgacccgactgacgctgaagctcttgggacagaagctggagcaagaacggcagaacgtggaagggggacctgagggcctccacctcgagccaggaaatgaggaccggccggacgatgccctgcagactgctctgaagagaaggagggaccttctgcagagactccgggaacaacacctcctggacgagctctctcgggcccaggcctggagcgggccaagcagaggagccctcgggtcagccctgcccccagagctgccccccacgggcatcctacccactgcctccccatccccgctggccccagacccgccaaggatcatcctgcctacggtcccccagcctcctgccaccatcattcagcagctccctcagcagccactcatagcacagattcctcctccccaggccttccctactcaacggtcaggaagtattaaggaagacatggtggagctgctgctgctgcagaacgcacaggtgcaccagttggtcctgcagaactggatgctcaaggccctgcccccagccctgcaggacccgccacatgtgcccccgagggtcccacgagctgccaggccaaggctgcctgccgtgcaccaccaccaccaccaccaccatgctgtgtggccacctggggctgccactgtcctccagcccgcccccagcctgtggacgcctggcccaccctgagttttgcaggtaggagacaggatgaccagagagttgccactgagctgcagagctccccagggacagccacctggtgctgacatggacgggcaggtgtgaacaccgaagggcccagcgcagctactggcagtaacactcacttctctcagaaccatcttttcgtgcctcttgaaggtgattccagagactctgtgctctcgttaaaagctcaaaccaa

SEQ ID NO: 118886 - DNA, 1196 bp, Homo sapiens
  Payload ID: 3287
  Gene Symbol: C21orf58
  Gene Name: chromosome 21 open reading frame 58
  ENST ID: ENST00000491666
  CDS Start-End: 1-720
ggtaaggcccgccctgcaggcaacaccggtgcttgggctcctgctgagcagttctttcctgcgagtaacagaaccagggagggaggtgggctgtggcctcccctgcccctacagtcgtctcctgcagctcccaccatgctggactcatcagcagcagagcaagtgacccgactgacgctgaagctcttgggacagaagctggagcaagaacggcagaacgtggaagggggacctgagggcctccacctcgagccaggaaatgaggaccggccggacgatgccctgcagactgctctgaagagaaggagggaccttctgcagagactccgggaacaacacctcctggacgagctctctcgggcccaggcctggagcgggccaagcagaggagccctcgggtcagccctgcccccagagctgccccccacgggcatcctacccactgcctccccatccccgctggccccagacccgccaaggatcatcctgcctacggtcccccagcctcctgccaccatcattcagcagctccctcagcagccactcatagcacagattcctcctccccaggccttccctactcaacggtcaggaagtattaaggaagacatggtggagctgctgctgctgcagaacgcacaggtgcaccagttggtcctgcagaactggatgctcaaggccctgcccccagccctgcaggacagattctttcattcctgaagttccgcacaaggaggaaccctgtcccagtgcttccatctttgaaagtttgcaggtaggagacaggatgaccagagagttgccactgagctgcagagctccccagggacagccacctggtgctgacatggacgggcaggtgtgaacaccgaagggcccagcgcagctactggcagtaacactcacttctctcagaaccatcttttcgtgcctcttgaaggtgattccagagactctgtgctctcgttaaaagctcaaaccaaagctcagactccatttcctcttttcaaggtgactttccagcatggcatttctttctttctattaaaaatgtttttttttgagacagagttttgctcttgtcgcccaggctggagtgcaatggagcgatctcggctcactgcaagctccgcctcccaggatggtcttgatttcctgacctcgtgatccacctgcctcggcctcccaaagtgctg

SEQ ID NO: 118887 - DNA, 1692 bp, Homo sapiens
  Payload ID: 3288
  Gene Symbol: C21orf59
  Gene Name: chromosome 21 open reading frame 59
  Uniprot ID: P57076
  ENST ID: ENST00000290155
  CDS Start-End: 624-1496
tggagactgaaagcggcggaagggacgctggaatgtggagcggttgtggggcggcagctgcggaactgcgcgattgtggttcccgccgtatttcccgttccccatctagtaactcccatctcagcccacgtatctccctgagtggaaatctcgggccccagaccagtcgattgggaggtccgccctccccttcagcgacttggtctgtgttttggcagttgccgcgacaacagtcacttccgggaaggggctctgcgaatctccttccgtcggtccgctcagaatcagctgtcctctcagactgtgtgggtggtttccccggccgcagctccgtacgggcttggattgctgggcctcggtgcaccccagcctcccccactcgggttctgagcttgagctggcggctctttaactctgcttcactgttgctcttggcaacatccacttccgggagcgagtgccgtttcccccgctcaccgcgggctagggagcgtgggattccggactgtgagcggctgttagtgcgtcgcagctgctggcgatccggcgaccctcggccggcaggacccgcgggccacgcagccggggccttctcaacgcctcagtacctcggcgggaccgccatggttctgctgcacgtgaagcggggcgacgagagccagttcctgctgcaggcgcctgggagtaccgagctggaggagctcacggtgcaggtggcccgggtctataatgggcggctcaaggtgcagcgcctctgctcagaaatggaagaattagccgaacatggcatatttctccctcctaatatgcaaggactgaccgatgatcagattgaagaattgaaattgaaggatgaatggggtgaaaaatgcgtacccagcggaggtgcagtgtttaaaaaggatgatattggacgaaggaatgggcaagctccaaatgagaagatgaagcaagtgttaaagaagactatagaagaagccaaagcaataatatctaagaaacaagtggaagccggtgtctgtgttaccatggagatggtgaaagatgccttggaccagcttcgaggcgcggtgatgattgtttaccccatggggttgccaccgtatgatcccatccgcatggagtttgaaaataaggaagacttgtcgggaacacaggcagggctcaacgtcattaaagaggcagaggcgcagctgtggtgggcagccaaggagctgagaagaacgaagaagctttcagactacgtggggaagaatgaaaaaaccaaaattatcgccaagattcagcaaaggggacagggagctccagcccgagagcctattattagcagtgaggagcagaagcagctgatgctgtactatcacagaagacaagaggagctcaagagattggaagaaaatgatgatgatgcctatttaaactcaccatgggcggataacactgctttgaaaagacattttcatggagtgaaagacataaagtggagaccaagatgaagttcaccagctgatgacacttccaaagagattagctcacctttctcctaggcaattataatttaaaaaaaaaaaaaaggccacttactgccctctgtaaaagatgttaacatttctagttttcttttagtgtgaatttttaaaatagcagttattcaaggttttagaacttaataaatacctagtcagaagaaaa

SEQ ID NO: 118888 - DNA, 1243 bp, Homo sapiens
  Payload ID: 3288
  Gene Symbol: C21orf59
  Gene Name: chromosome 21 open reading frame 59
  ENST ID: ENST00000300260
  CDS Start-End: 361-777
cttccgtcggtccgctcagaatcagctgtcctctcagactgtgtgggtggtttccccggccgcagctccgtacgggcttggattgctgggcctcggtgcaccccagcctcccccactcgggttctgagcttgagctggcggctctttaactctgcttcactgttgctcttggcaacatccacttccgggagcgagtgccgtttcccccgctcaccgcgggctagggagcgtgggattccggactgtgagcggctgttagtgcgtcgcagctgctggcgatccggcgaccctcggccggcaggacccgcgggccacgcagccggggccttctcaacgcctcagtacctcggcgggaccgccatggttctgctgcacgtgaagcggggcgacgagagccagttcctgctgcaggcgcctgggagtaccgagctggaggagctcacggtgcaggtggcccgggtctataatgggcggctcaaggtgcagcgcctctgctcagaaatggaagaattagccgaacatggcatatttctccctcctaatatgcaaggactgaccgatgatcagattgaagaattgaaattgaaggatgaatggggtgaaaaatgcgtacccagcggaggtgcagtgtttaaaaaggatgatattggacgaaggaatgggcaagaaacaagtggaagccggtgtctgtgttaccatggagatggtgaaagatgccttggaccagcttcgaggcgcggtgatgattgtttaccccatggggttgccaccgtatgatcccatccgcatggagtttgaaaataaggaagacttgtcgggaacacaggcagggctcaacgtcattaaagaggcagaggcgcagctgtggtgggcagccaaggagctgagaagaacgaagaagctttcagactacgtggggaagaatgaaaaaaccaaaattatcgccaagattcagcaaaggggacagggagctccagcccgagagcctattattagcagtgaggagcagaagcagctgatgctgtactatcacagaagacaagaggagctcaagagattggaagaaaatgatgatgatgcctatttaaactcaccatgggcggataacactgctttgaaaagacattttcatggagtgaaagacataaagtggagaccaagatgaagttcaccagctgatgacacttccaaagagattagctcacctttctcctaggcaattataatttaaaaaaaaaaaaaa

SEQ ID NO: 118889 - DNA, 2503 bp, Homo sapiens
  Payload ID: 3288
  Gene Symbol: C21orf59
  Gene Name: chromosome 21 open reading frame 59
  ENST ID: ENST00000382549
  CDS Start-End: 344-1081
agaatcagctgtcctctcagactgtgtgggtggtttccccggccgcagctccgtacgggcttggattgctgggcctcggtgcaccccagcctcccccactcgggttctgagcttgagctggcggctctttaactctgcttcactgttgctcttggcaacatccacttccgggagcgagtgccgtttcccccgctcaccgcgggctagggagcgtgggattccggactgtgagcggctgttagtgcgtcgcagctgctggcgatccggcgaccctcggccggcaggacccgcgggccacgcagccggggccttctcaacgcctcagtacctcggcgggaccgccatggttctgctgcacgtgaagcggggcgacgagagccagttcctgctgcaggcgcctgggagtaccgagctggaggagctcacggtgcaggtggcccgggtctataatgggcggctcaaggtgcagcgcctctgctcagaaatggaagaattagccgaacatggcatatttctccctcctaatatgcaaggactgaccgatgatcagattgaagaattgaaattgaaggatgaatggggtgaaaaatgcgtacccagcggaggtgcagtgtttaaaaaggatgatattggacgaaggaatgggcaagctccaaatgagaagatgaagcaagtgttaaagaagactatagaagaagccaaagcaataatatctaagaaacaagtggaagccggtgtctgtgttaccatggagatggtgaaagatgccttggaccagcttcgaggcgcggtgatgattgtttaccccatggggttgccaccgtatgatcccatccgcatggagtttgaaaataaggaagacttgtcgggaacacaggcagggctcaacgtcattaaagaggcagaggcgcagctgtggtgggcagccaaggagctgagaagaacgaagaagctttcagactacgtggggaagaatgaaaaaaccaaaattatcgccaagattcagcaagtaagtactttttgctttaatgtgtcagtagtttttgttatttcccttcaaactgataaaaatgtacagtgaatccgaaagatttaaactactggtacaaatattttaatcttattggctcgggtttaaactaaaaatatcctcttcctgcacaccaacaaaaactggaagaaaatatggattgagtaccaatatctagagtttgttttaatatgtgggggagaggaaatatactatgttaatttcaagcgtaaaaatagggctgcaagtaaacagatatgttccttgaaatgtaaaatttcgcccgtcactgatttcaggctttttcaaactgctgatgctgtgtacaggagggggaggaggaaaggttcgagacctttgaaggacatcgtgtagcgctgtaacctgaggggccgccttggttttgtgggtgctcctacgtcactaggctgtgattttggggaaatggggccctccaccttatgtagatccagagtccgtggctctgagcatcctccctttcccactggacctgcctgcagtgtctgccttgggaatggtcaagacagagatggtatcgtgcagcctctggtctccacacagtgagagtccagggctcagggctgctcaagaccaaggcttcccttgatgcttcacttcgggtgatcagacatgggggacctgtttatctttagtagccggcaaaggcaatcgtaaaacatttgttgtaacttcaggattgtcactctaagaacaccttaatccacaatttgctctgctctcctctttgcagaggggacagggagctccagcccgagagcctattattagcagtgaggagcagaagcagctgatgctgtactatcacagaagacaagaggagctcaaggtagcaggggacagatgggctttctgcagtgctggcgcccacacatagcctgtgtgccttacctggggctgctggggagcagtgagctctgcagaatgccggggaggggtctttctagagcttctgtctgcaggtctgtcggggtcctgccaggtgtcccctggtgttagacatggcagtatcctgctcctagagggcagggagagggggaggtcagtcatggactctttcttcagtctctttatgtgcaaaacactttcctgaaatgcctgcctgaataaaacatacttatttccagagattggaagaaaatgatgatgatgcctatttaaactcaccatgggcggataacactgctttgaaaagacattttcatggagtgaaagacataaagtggagaccaagatgaagttcaccagctgatgacacttccaaagagattagctcacctttctcctaggcaattataatttaaaaaaaaaaaaaaggccacttactgccctctgtaaaagatgttaacatttctagttttcttttagtgtgaatttttaaaatagcagttattcaaggttttagaacttaataaatacctagtcagaagaaaa

SEQ ID NO: 118890 - DNA, 863 bp, Homo sapiens
  Payload ID: 3288
  Gene Symbol: C21orf59
  Gene Name: chromosome 21 open reading frame 59
  ENST ID: ENST00000458138
  CDS Start-End: 313-863
ggtttccccggccgcagctccgtacgggcttggattgctgggcctcggtgcaccccagcctcccccactcgggttctgagcttgagctggcggctctttaactctgcttcactgttgctcttggcaacatccacttccgggagcgagtgccgtttcccccgctcaccgcgggctagggagcgtgggattccggactgtgagcggctgttagtgcgtcgcagctgctggcgatccggcgaccctcggccggcaggacccgcgggccacgcagccggggccttctcaacgcctcagtacctcggcgggaccgccatggttctgctgcacgtgaagcggggcgacgagagccagttcctgctgcaggcgcctgggagtaccgagctggaggagctcacggtgcaggtggcccgggtctataatgggcggctcaaggtgcagcgcctctgctcaggactgaccgatgatcagattgaagaattgaaattgaaggatgaatggggtgaaaaatgcgtacccagcggaggtgcagtgtttaaaaaggatgatattggacgaaggaatgggcaagctccaaatgagaagatgaagcaagtgttaaagaagactatagaagaagccaaagcaataatatctaagaaacaagtggaagccggtgtctgtgttaccatggagatggtgaaagatgccttggaccagcttcgaggcgcggtgatgattgtttaccccatggggttgccaccgtatgatcccatccgcatggagtttgaaaataaggaagacttgtcgggaacacaggcagggctcaacgtcattaaagaggcagaggcgcagctgtggtgggcagccaaggagctgagaagaac

SEQ ID NO: 118891 - DNA, 873 bp, Homo sapiens
  Payload ID: 3288
  Gene Symbol: C21orf59
  Gene Name: chromosome 21 open reading frame 59
  ENST ID: ENST00000425336
  CDS Start-End: 1-352
ttaccccatggggttgccaccgtatgatcccatccgcatggagtttgaaaataaggaagacttgtcgggaacacaggcagggctcaacgtcattaaagaggcagaggcgcagctgtggtgggcagccaaggagctgagaagaacgaagaagctttcagactacgtggggaagaatgaaaaaaccaaaattatcgccaagattcagcaaaggggacagggagctccagcccgagagcctattattagcagtgaggagcagaagcagctgatgctgtactatcacagaagacaagaggagctcaaggtagcaggggacagatgggctttctgcagtgctggcgcccacacatagcctgtgtgccttacctggggctgctggggagcagtgagctctgcagaatgccggggaggggtctttctagagcttctgtctgcaggtctgtcggggtcctgccaggtgtcccctggtgttagacatggcagtatcctgctcctagagggcagggagagggggaggtcagtcatggactctttcttcagtctctttatgtgcaaaacactttcctgaaatgcctgcctgaataaaacatacttatttccagagattggaagaaaatgatgatgatgcctatttaaactcaccatgggcggataacactgctttgaaaagacattttcatggagtgaaagacataaagtggagaccaagatgaagttcaccagctgatgacacttccaaagagattagctcacctttctcctaggcaattataatttaaaaaaaaaaaaaaggccacttactgccctctgtaaaagatgttaacatttctagttttcttttagtgtgaatttttaaaatagcagttattcaag

SEQ ID NO: 118892 - DNA, 417 bp, Homo sapiens
  Payload ID: 3288
  Gene Symbol: C21orf59
  Gene Name: chromosome 21 open reading frame 59
  ENST ID: ENST00000431599
  CDS Start-End: 1-239
agctgagaagaacgaagaagctttcagactacgtggggaagaatgaaaaaaccaaaattatcgccaagattcagcaaatttttgccactttccaggtggtcgttctttgtcctcctgagcttgggcctcgctccttgggacccctggaccagaaccccaatcagctcaggaacaggcttctggcagatgagcccggcggcagtggagcgagagatgcagtgagcaatgtggctccataagcacagtacaatgcatatcctttcagccacgtctttgtttatttcattagctttgctttatgaaatatttcaagaactggcattgtgtgcaaggctctagaagaattttttgcatgtgtttgattttaattttctctgtttgctttttagtaattaagagtaaagtcaaccaagaaca

SEQ ID NO: 118893 - DNA, 1082 bp, Homo sapiens
  Payload ID: 3288
  Gene Symbol: C21orf59
  Gene Name: chromosome 21 open reading frame 59
  ENST ID: ENST00000440966
  CDS Start-End: 110-886
gctgttagtgcgtcgcagctgctggcgatccggcgaccctcggccggcaggacccgcgggccacgcagccggggccttctcaacgcctcagtacctcggcgggaccgccatggttctgctgcacgtgaagcggggcgacgagagccagttcctgctgcaggcgcctgggagtaccgagctggaggagctcacggtgcaggtggcccgggtctataatgggcggctcaaggtgcagcgcctctgctcagaaatggaagaattagccgaacatggcatatttctccctcctaatatgcaaggactgaccgatgatcagattgaagaattgaaattgaaggatgaatggggtgaaaaatgcgtacccagcggaggtgcagtgtttaaaaaggatgatattggacgaaggaatgggcaagctccaaatgagaagatgaagcaagtgttaaagaagactatagaagaagccaaagcaataatatctaagaaacaagtggaagccggtgtctgtgttaccatggagatggtgaaagatgccttggaccagcttcgaggcgcggtgatgattgtttaccccatggggttgccaccgtatgatcccatccgcatggagtttgaaaataaggaagacttgtcgggaacacaggcagggctcaacgtcattaaagaggcagaggcgcagctgtggtgggcagccaaggagctgagaagaacgaagaagctttcagactacgtggggaagaatgaaaaaaccaaaattatcgccaagattcagcaaagattggaagaaaatgatgatgatgcctatttaaactcaccatgggcggataacactgctttgaaaagacattttcatggagtgaaagacataaagtggagaccaagatgaagttcaccagctgatgacacttccaaagagattagctcacctttctcctaggcaattataatttaaaaaaaaaaaaaaggccacttactgccctctgtaaaagatgttaacatttctagttttcttttagtgtgaatttttaaaatagcagttattcaaggttttagaacttaataaatacctagtcagaagaaaa

SEQ ID NO: 118894 - DNA, 878 bp, Homo sapiens
  Payload ID: 3289
  Gene Symbol: C21orf62
  Gene Name: chromosome 21 open reading frame 62
  ENST ID: ENST00000382373
  CDS Start-End: 1-801
tgcagattaaaccagctgtcaagccagggtgaaggatccgtggccaggcagaggtctgtggagtggagaggcgaggcctcacggtggaactctcagatgacagcatgcaggcaccaagagagtggacgcacatacagaagacagccatgcactgagctggggacatgcaacaataacagcactctgggtgtctttgcacttaactgcttcaccaaaggtcagaagaacagcacgctcatcttcacaagggaaaacaccattcggaactgcagctgttctgcggacatccgggattgtgactacagtttggccaacctgatgtgcaactgtaaaaccgtcctgccccttgcagtagagcgaaccagctacaatggccatctgaccatctggttcacggacacatctgcgctgggccacctgctgaacttcacgctggtccaagacctgaagctttccctgtgcagcaccaacactctccccactgaatacctggctatttgtggtctgaagaggctgcgcatcaacatggaggccaagcatcccttcccagagcagagcttactcatccatagcggtggggacagtgactccagagagaagcccatgtggttacacaaaggctggcagccatgtatgtatatctcattcttagatatggctcttttcaacagggactcagccttaaaatcatatagtattgaaaacgttaccagcattgccaacaactttcctgacttttcttactttagaaccttcccaatgccaagcaacaaaagctatgttgtcacatttatttactagcataataactgtgtccagctgcctggaactttggcaaatgatgaataatttgcagaaggaatctggaaataaggccg

SEQ ID NO: 118895 - DNA, 1009 bp, Homo sapiens
  Payload ID: 3289
  Gene Symbol: C21orf62
  Gene Name: chromosome 21 open reading frame 62
  Uniprot ID: Q9NYP8
  ENST ID: ENST00000487113
  CDS Start-End: 153-812
accagctgtcaagccagggtgaaggatccgtggccaggcagaggtctgtggagtggagaggcgaggcctcacggtggaactctcagatgtgagttccaacaaattggttcaaaaagaggggggataaacacgctggcccatgctgggcaagcatggcaccaccttccaggcactgtcttcttctgatcagcactctgggtgtctttgcacttaactgcttcaccaaaggtcagaagaacagcacgctcatcttcacaagggaaaacaccattcggaactgcagctgttctgcggacatccgggattgtgactacagtttggccaacctgatgtgcaactgtaaaaccgtcctgccccttgcagtagagcgaaccagctacaatggccatctgaccatctggttcacggacacatctgcgctgggccacctgctgaacttcacgctggtccaagacctgaagctttccctgtgcagcaccaacactctccccactgaatacctggctatttgtggtctgaagaggctgcgcatcaacatggaggccaagcatcccttcccagagcagagcttactcatccatagcggtggggacagtgactccagagagaagcccatgtggttacacaaaggctggcagccatgtatgtatatctcattcttagatatggctcttttcaacagggactcagccttaaaatcatatagtattgaaaacgttaccagcattgccaacaactttcctgacttttcttactttagaaccttcccaatgccaagcaacaaaagctatgttgtcacatttatttactagcataataactgtgtccagctgcctggaactttggcaaatgatgaataatttgcagaaggaatctggaaataaggccgtgagataggtatccctacccacaactgtgcctctctccgcaggctccatttgcaacacagccacacataccaataaccagctctctgttctgctctgtgcccaactgcgagaacactttt

SEQ ID NO: 118896 - DNA, 964 bp, Homo sapiens
  Payload ID: 3289
  Gene Symbol: C21orf62
  Gene Name: chromosome 21 open reading frame 62
  Uniprot ID: Q9NYP8
  ENST ID: ENST00000479548
  CDS Start-End: 264-923
ctgtggagtggagaggcgaggcctcacggtggaactctcagatgacagcatgcaggcaccaagagagtggacgcacatacagaagacagccatgcactgagctggggacatgcaacaataacaggccatacaatgaaagtcgctgaagaagaatatgaattttgcctgcggatttgctaacactcgacaatcctaggaggtgagttccaacaaattggttcaaaaagaggggggataaacacgctggcccatgctgggcaagcatggcaccaccttccaggcactgtcttcttctgatcagcactctgggtgtctttgcacttaactgcttcaccaaaggtcagaagaacagcacgctcatcttcacaagggaaaacaccattcggaactgcagctgttctgcggacatccgggattgtgactacagtttggccaacctgatgtgcaactgtaaaaccgtcctgccccttgcagtagagcgaaccagctacaatggccatctgaccatctggttcacggacacatctgcgctgggccacctgctgaacttcacgctggtccaagacctgaagctttccctgtgcagcaccaacactctccccactgaatacctggctatttgtggtctgaagaggctgcgcatcaacatggaggccaagcatcccttcccagagcagagcttactcatccatagcggtggggacagtgactccagagagaagcccatgtggttacacaaaggctggcagccatgtatgtatatctcattcttagatatggctcttttcaacagggactcagccttaaaatcatatagtattgaaaacgttaccagcattgccaacaactttcctgacttttcttactttagaaccttcccaatgccaagcaacaaaagctatgttgtcacatttatttactagcataataactgtgtccagctgcctggaactttggcaaatga

SEQ ID NO: 118897 - DNA, 1155 bp, Homo sapiens
  Payload ID: 3289
  Gene Symbol: C21orf62
  Gene Name: chromosome 21 open reading frame 62
  Uniprot ID: Q9NYP8
  ENST ID: ENST00000490358
  CDS Start-End: 298-957
cctccgaagacggaaaagaacagcaagtgcaagaccacgcattccaccctggcttgcagattaaaccagctgtcaagccagggtgaaggatccgtggccaggcagaggtctgtggagtggagaggcgaggcctcacggtggaactctcagatgacagcatgcaggcaccaagagagtggacgcacatacagaagacagccatgcactgagctggggacatgcaacaataacaggtgagttccaacaaattggttcaaaaagaggggggataaacacgctggcccatgctgggcaagcatggcaccaccttccaggcactgtcttcttctgatcagcactctgggtgtctttgcacttaactgcttcaccaaaggtcagaagaacagcacgctcatcttcacaagggaaaacaccattcggaactgcagctgttctgcggacatccgggattgtgactacagtttggccaacctgatgtgcaactgtaaaaccgtcctgccccttgcagtagagcgaaccagctacaatggccatctgaccatctggttcacggacacatctgcgctgggccacctgctgaacttcacgctggtccaagacctgaagctttccctgtgcagcaccaacactctccccactgaatacctggctatttgtggtctgaagaggctgcgcatcaacatggaggccaagcatcccttcccagagcagagcttactcatccatagcggtggggacagtgactccagagagaagcccatgtggttacacaaaggctggcagccatgtatgtatatctcattcttagatatggctcttttcaacagggactcagccttaaaatcatatagtattgaaaacgttaccagcattgccaacaactttcctgacttttcttactttagaaccttcccaatgccaagcaacaaaagctatgttgtcacatttatttactagcataataactgtgtccagctgcctggaactttggcaaatgatgaataatttgcagaaggaatctggaaataaggccgtgagataggtatccctacccacaactgtgcctctctccgcaggctccatttgcaacacagccacacataccaataaccagctctctgttctgctctgtgcccaactgcgagaacacttttg

SEQ ID NO: 118898 - DNA, 3889 bp, Homo sapiens
  Payload ID: 3289
  Gene Symbol: C21orf62
  Gene Name: chromosome 21 open reading frame 62
  Uniprot ID: Q9NYP8
  ENST ID: ENST00000536776
  CDS Start-End: 142-801
aggccatacaatgaaagtcgctgaagaagaatatgaattttgcctgcggatttgctaacactcgacaatcctaggaggtgagttccaacaaattggttcaaaaagaggggggataaacacgctggcccatgctgggcaagcatggcaccaccttccaggcactgtcttcttctgatcagcactctgggtgtctttgcacttaactgcttcaccaaaggtcagaagaacagcacgctcatcttcacaagggaaaacaccattcggaactgcagctgttctgcggacatccgggattgtgactacagtttggccaacctgatgtgcaactgtaaaaccgtcctgccccttgcagtagagcgaaccagctacaatggccatctgaccatctggttcacggacacatctgcgctgggccacctgctgaacttcacgctggtccaagacctgaagctttccctgtgcagcaccaacactctccccactgaatacctggctatttgtggtctgaagaggctgcgcatcaacatggaggccaagcatcccttcccagagcagagcttactcatccatagcggtggggacagtgactccagagagaagcccatgtggttacacaaaggctggcagccatgtatgtatatctcattcttagatatggctcttttcaacagggactcagccttaaaatcatatagtattgaaaacgttaccagcattgccaacaactttcctgacttttcttactttagaaccttcccaatgccaagcaacaaaagctatgttgtcacatttatttactagcataataactgtgtccagctgcctggaactttggcaaatgatgaataatttgcagaaggaatctggaaataaggccgtgagataggtatccctacccacaactgtgcctctctccgcaggctccatttgcaacacagccacacataccaataaccagctctctgttctgctctgtgcccaactgcgagaacacttttgaaaaacaaaagaaaaagaaaccaaaaaaccaacttgattccgtccagggacatgtcttgggagccagctaggcttggtctctgcaactagaagcctgcagggaaatgtcccgtcagaaatggagaaagcaatacaccctagagactgcttagtggagctcctcctagaaggtgacccccaagaaacatatcttctttcaaaatactgccttaatttttttctgtttcattttgtgaaattgcttggaattcccctaagtagagaataatcaatttcagaggtttggggactatgagttttataaaatggtcgggcacagtggctcacacctgtaatcccagcactttgggaggccgaggcgggcggatcacctgaggtcgggagttcaagaccagcctgaccaacatggagaaaccccatctctactaaaaatacaaaattagccgggcatggtggcacatgcctgtaatcccagctactcggaggctgagcaggagaatcgcttgaacctgggaggcggaggttgcagtgagccaaaatcgtgccactgcactctacactccagcctgggtgacagagtcagagatcacaccattgcactccagcctgggcaacaagagcgaaactccatctcaaaaaaaaaaaaaataataataataaaatgattaggttctcttaaactgatcttttctaaataccttgctaagaatagatgcaccaagaaataagaggttggagactgtgtttgttggggtggaggtaccacaggcatggatagggtaagaccttaggatcaaatggggggaccagtgttccagagagagggatgcagcagtgaaaattggaggacacaaaacacatttgcatctatctcaaaattttgcttagagcacagcctaactgcaaggaaagttcttcacttctagcctttcacattcttttccttttctttctttgcatggtctgtctttgcccctgctataccatttcaccaatttctcttctcattttcatcttctttctcctactccttttcctcttgctccaaaaatcagaacttagatgaataccattcaagctatgtttaactacattaggggctagcctgggaatttactcaccacttacaacattatttctattgttaaaagtgctcaaattattaacagataattaacaaaaaaacatctaaggctcaatccatttggaaggttaagattgcaaagtgaaggcattttatatgacacggttaacacaaaatgattttatgtgtgctgataaaaggaaccaaagcaacatacttttgaaaaaattaaatggattcattattgtacaaagaaaattttccctcatagagacgcaacttgccattaaagtggactgtaaagaatccatggcttgggaggccgaggcaggcggatcacctgaggtcgggagttcgagaccagcctgaccaacatggagaaaccctgtctctactaaaaatacaaaataagccaggcgtggtggtgcatgcctgtaatcccagctactcaggaggctgaggcaggagagtcacttgaacctgggaggcggaggttgcagtgagccaagattgcgccactgcactccagcctgggcaacaagagcaaaactccatctcaaaaaaaaaaaaagaaaagaaaaaagaatccactgcaattgtgatacaaatgtctaaacctggagtggaatgaatttgaaacattattgcattcatgataccataatgataagaaatagtccatgacttaacaggatatcctggggttgatgactttagatcacatacatcacttttttttttttttcacttaaccttaacatagagtaactgaaataatctgcaatttctacatttgcttaattggtgggggatttagccattcaggctaattagcatgagcccatgtcagtgtttaaattaggccaaaacaaagaccaaagtatgaattttaatagaaaaatgtgacctcattactgacattgtactgcagataatgttaaagtgaaagaaaaaataaggaaaaggggaaaaaggaggaaaaaggaaagcaagaaaagacaagtgaaaagattagtaatatattcattgtcattagttactgaaaatataacaaattgaattttaataatttttattaataaagtataaaattaaatgatgatagaaagtatatgcctcctataaatatcttccatttggtagcttttaatagtttcaaagccctttcacatatgttttaagtaagtcttttgagaaatacttgtgagttaatgggacttaaaccaacagaaaaggaaagctaatttagttataaatcaagcctgaggtttcagatttctggactaaaaatatggttcagtttgtgctgctgtgggatgaagaatgggcagagaaaatccacagtgcaggcatggggattaatggcatttggcacttagctgcagggtttgggggacaacagggagtggtgggatggtggttaagtaagggtgcatgccccacctgaagctctacagtggctcagctccaactgagtgttgccatgggaaaatctgatggggccagatctgatccttcagagaatgaggaattccaggttgttatgtgaattctcacaatttgtaaatgtcggcttgccattcagcttttttgtttgtttgttttaaataatatcatgtgggtcaaacaaactatgttaatggtagccatctggcctggggctagtagcttattgcctctggccagtggtgtgctaacaaaagtttaaccagcagctctccaacaaaaaagggaggtgggctgctctgcctatgcagtagccatgcttttattcctttactttgttaataaacttgctttcacttt

SEQ ID NO: 118899 - DNA, 1009 bp, Homo sapiens; identical to SEQ ID NO: 118895
  Payload ID: 3289
  Gene Symbol: C21orf62
  Gene Name: chromosome 21 open reading frame 62
  Uniprot ID: Q9NYP8
  ENST ID: ENST00000576061
  CDS Start-End: 153-812

SEQ ID NO: 118900 - DNA, 878 bp, Homo sapiens; identical to SEQ ID NO: 118894
  Payload ID: 3289
  Gene Symbol: C21orf62
  Gene Name: chromosome 21 open reading frame 62
  ENST ID: ENST00000573131
  CDS Start-End: 1-801

SEQ ID NO: 118901 - DNA, 1155 bp, Homo sapiens; identical to SEQ ID NO: 118897
  Payload ID: 3289
  Gene Symbol: C21orf62
  Gene Name: chromosome 21 open reading frame 62
  Uniprot ID: Q9NYP8
  ENST ID: ENST00000576372
  CDS Start-End: 298-957

SEQ ID NO: 118902 - DNA, 964 bp, Homo sapiens; identical to SEQ ID NO: 118896
  Payload ID: 3289
  Gene Symbol: C21orf62
  Gene Name: chromosome 21 open reading frame 62
  Uniprot ID: Q9NYP8
  ENST ID: ENST00000571812
  CDS Start-End: 264-923

SEQ ID NO: 118903 - DNA, 3889 bp, Homo sapiens; identical to SEQ ID NO: 118898
  Payload ID: 3289
  Gene Symbol: C21orf62
  Gene Name: chromosome 21 open reading frame 62
  Uniprot ID: Q9NYP8
  ENST ID: ENST00000610926
  CDS Start-End: 142-801

SEQ ID NO: 118904 - DNA, 5433 bp, Homo sapiens
  Payload ID: 3290
  Gene Symbol: C21orf91
  Gene Name: chromosome 21 open reading frame 91
  Uniprot ID: Q9NYK6
  ENST ID: ENST00000284881
  CDS Start-End: 92-985
gcggccgcctctgctgcggccggaaacaatagtggaggaacccgagccgcacggaacggcggtggtggcccgcggagccggacggggcactatgaacgaagaggagcagtttgtaaacattgatttgaatgatgacaacatttgcagtgtttgtaaactgggaacagacaaagaaacactctccttctgccacatttgttttgagctaaatattgagggggtaccaaagtctgatctcttgcacaccaaatcattaaggggccataaagactgctttgaaaaataccatttaattgcaaaccagggttgtcctcgatctaagctttcaaaaagtacttatgaagaagttaaaaccattttgagtaagaagataaactggattgtgcagtatgcacaaaataaggatctggattcagattctgaatgttctaaaaacccccagcatcatctgtttaatttcaggcataagccagaagaaaaattactcccacagtttgactcccaagtaccaaaatattctgcaaaatggatagatggaagtgcaggtggcatctctaactgtacacaaagaattttggagcagagggaaaatacagactttggactttctatgttacaagattcaggtgccactttatgtcgtaacagtgtattgtggcctcatagtcacaaccaggcacagaaaaaagaagagacaatctctagtccagaggctaatgtccagacccagcatccacattacagcagagaggaattgaattcgatgactcttggtgaggtagagcaactgaatgcaaagctcctacagcaaatccaggaagtttttgaagagttaactcaccaagtgcaagaaaaagattctttggcctcacagctccatgtccgccacgttgccatcgaacagcttctgaagaactgttctaagttaccatgtctgcaagtagggcgaacaggaatgaagtcgcacctacccataaacaactgacctaaacagacttacttcgtatgccctgccctttattggtctcccagacatgcaaactttgaagaagtttgaagaaagttgtggtccgtttttttatggtcattaaatttgccaaacataaggcagtatttaacatctttgtcaaataaagcagatcattatactctagtcttctagggctaatcattttggctcatttggggactcttttttcccagaattactaaacaaattttatcacatgtgactacttaaatatactgttacagtgtcattttattaaacattttaattcacctgtcaaaacaacagattaactccttagtgtaaactactagagataatttttaagagggaaatggaattcatatcacctcttatttattatgagcaatattttaatataaaaattttatatgtgaaaatgctattttaggtactttgccattctctttataaatgtgtatttgagtggttctgtatatttatttacattatcatgtgtgaatatgttcacccatatttcaggtcactgcattttattctcttaatacaatgttttcacaacggttaccttgctttccaaagataaatatattttggattagaaatctgagttgttttaatttctaatacctcttgtaaaagaagaattaataactttttaaagcagtattcaggtaaatacaatacattattttgttttctaacaaaagcagttcttagttcaggaagaaaagactaatctggcttctatgtcaatttgtctccatagaaatgaaagcctcctcttgcttctttcattattagcttcacaccagtgactgtgatgcattagaatttggacagagtaagtcaagcctcacttccaattcaaatataatgtctatcttcaaattgagtgtgctgtgaaattgttctgtctttgaaaaaaaaaagtaagattattttgtgtgccactttgggtaaagtttcaagaatacttaaactgtccaaattgtattatcaccatcattgaacttagtgctcaaagaaagcattgtgaggtatttttctaaactttagactctatagagaaatataggattgttctacagaagaaaagcaaaactcctaattaaaaaaaaataaacctatgtattaagagaatgttctcgtaagttgcctatgatgcttccaaagagtttttatctaacagattgtgccaaacagctagataaattttaataatgtattacagtaaaggctataaccaatgcagaattaaaatgggctctaaattctgtttttaactcatgtttagaatgtacttatgaggtagatccttgcttgaaagtatctgctgaaaagcccagtaacgtggcagcttcatgcataaagatataaatgacatttgccttaaatttggcagcctaccctggcttgggtcagattttgttgttgaacacaagaaagtatttaagcaaagaaacacttcagtttaattgaaaacaactttttgtaatgctgacgtgttaaattggcctgagggtattaattgatatctgttgattttgtttttctttgaagtataacattactttttggagggaatttttgaaagatgctttcgatttctctcaattctttaagtcatgcaaaatgaatttaaaatccagggagtatggatgcattgccttagttttgatgagctttaaattaaatgtgtgcaatatcaaaatattcaaacttacaagctgggtaaatacatttcctgattaatatcttagtgcttaattgttcccacattttcaaatttgactttactcttttttggcgtaattcagtaagattgttaccagccagtgtgtttgcacacatttgggtttgtgtttagatgagttagggacagtcataaaagttggggatatgttgcatttgatatcaatagtagcatatttccagaatatgagccataagttgcagtcctgaatacaacagtgttatccaaagaaaggagttttctgacaaatatacatagctttgctaatgagtacggaacaagtggatgaacgtgtgcatgtgctaaggtcttaagtgggactctgatttattccatttagatatttctacttaagctctaaaaaggagaggtgctcttaaaaaaaactttgtggtgctggtactcacactactttatttggatgagttcctagtaaaaaaaactttttgttgaagtattttgcacagcagtttatccaaatgtttggtaaacttataatttagtcctatgttagttttcttaatcaaatatgcaattactgtgtatgcaaatataagtatcaggtacagagttgagttctaacaagagaacatgaaatatcacaaatattgttttccacacttggctattctctacagttgttagtaatttttgagaatgttttgaagcatatctcatgtactactgtttaaaaagtggcaaaacagactgccagtcatccattactaaattttcagagcttatatgattaaggggagtgagataagacaaatctttttcacgttcagttttataatttgacacgttaaattgagttttaaaaattagaaaagtgtttttgaccacacaggttgttctctttaaagttcagccttataatgaagctaaaaatcaattatgttttactttgagattatcatcttatcctttgatcctcatattaatatctaaattagtcttttttaaaaggcatgcacttgagactccagtaatagatgattcaggcagcagaatagtgttttgttgtgtcgttgactatgcacaatggtggagcaaagacacattcttagtttttcaaaacacatgttcattttaccacaaagtgcccatttttatatacatttaaggattattttttcaatgtcaagttcatgttagtgatttcagaaatatagtcaaaatatatagtcaaatatatcttgacaggcatcttgagatttggtttttcattttactatatttatgactgaaaatggttttgtgttttctttatgttgtttatatattttttaccttagtgtttacactggtaaggcttgttagtccatttttgtagtttttttaaagtaagcttttagatctatttgtgttttaatgtttcccagtttgggttttgttttgttttggaagaatctgctttcattattaaattataaaatgtaaatgctctaaagtaggaatttttaaagagtaaattatttgtgtagcttattaggaggttcaggttagtgaccataaagtgggttacttgtacatgaaaatttgaaatggtaccatgtaaaattcttctattgtcaactttttctgatgtatgccagttcatttactgacaaatgttgttactaagtgcttattaagaagtgtaatacgctataaaaaagttaatactttttgttcagatgtaaggcaaagataattgatgccgtttcagtgtatgattgtatttttaacttttacgttggtgggagtaactatttgaggaaatttgtggtgagaattagtaagagataaaacccccaacagtttattcttaccaagtaaagttttgtggtcatggggcagggaagagtttatttaccagaatactagagccctcacacaaaataaaggtaacttggaggagggctataatgcttgcatctcagtattttcatttcacttcatcctttcataattgccttgattatggtgcagtctaacctattaagcaacttctggctatggtaacattgatatgaaccatattatatcaagtctccaaaacatctagtttgttaacatacactttccctgttctttttagtttgagtccacattactaatacattttaataatatttaattatttcacaattttaagtttaccaaagtaaacaaaaattcatgaagatgagtattgccctctcccaaaaaaggtttaaagattagttgaacttccctcaactacacctaaagcaaaggggaattttagtaagtgtgtgtaccttgtttctttcagacgcatctagaatgtttttctttcaccgtacctccaaaagaggcaatttagaaagtattaagtagtgacttttgttcagttccattttgtgtgtgtgtgtgtgtgtgtgtgtgtgtgtgtgaaccttgctttaaaacagtagcgtatactatggtcattgaacttaatctctctggtgttagaaatttactttacaaaattgtgttaagacttttggaaaaagaaaatgaaactgctgtggtaaaaaccaagtttgtttcaaaaaagtaggcaattatttggctgttatattttctttgaaaactgcaataatttatatatttgtattgctctgcttgggaactgtatatatgcttgtctactatttttaattttacaacaataaaataagtattttgttatctgcta

SEQ ID NO: 118905 - DNA, 1090 bp, Homo sapiens
  Payload ID: 3290
  Gene Symbol: C21orf91
  Gene Name: chromosome 21 open reading frame 91
  Uniprot ID: Q9NYK6
  ENST ID: ENST00000400558
  CDS Start-End: 92-757
gcggccgcctctgctgcggccggaaacaatagtggaggaacccgagccgcacggaacggcggtggtggcccgcggagccggacggggcactatgaacgaagaggagcagtttgtaaacattgatttgaatgatgacaacatttgcagtgtttgtaaactgggaacagacaaagaaacactctccttctgccacatttgttttgagctaaatattgagggggtaccaaagtctgatctcttgcacaccaaatcattaaggggccataaagactgctttgaaaaataccatttaattgcaaaccagggttgtcctcgatctaagctttcaaaaagtacttatgaagaagttaaaaccattttgagtaagaagataaactggattgtgcagtatgcacaaaataaggatctggattcagattctgaatgttctaaaaacccccagcatcatctgtttaatttcaggcataagccagaagaaaaattactcccacagtttgactcccaagtaccaaaatattctgcaaaatggatagatggaagtgcaggtggcatctctaactgtacacaaagaattttggagcagagggaaaatacagactttggactttctatgttacaagattcaggtgccactttatgtcgtaacagtgtattgtggcctcatagtcacaaccaggcacagaaaaaagaagagacaatctctagtccagaggctaatgtccagacccagcatccacattacagcagagaggaataagtttttgaagagttaactcaccaagtgcaagaaaaagattctttggcctcacagctccatgtccgccacgttgccatcgaacagcttctgaagaactgttctaagttaccatgtctgcaagtagggcgaacaggaatgaagtcgcacctacccataaacaactgacctaaacagacttacttcgtatgccctgccctttattggtctcccagacatgcaaactttgaagaagtttgaagaaagttgtggtccgtttttttatggtcattaaatttgccaaacataaggcagtatttaacatctttgtcaaataaagcagatcattatactcta

SEQ ID NO: 118906 - DNA, 1593 bp, Homo sapiens
  Payload ID: 3290
  Gene Symbol: C21orf91
  Gene Name: chromosome 21 open reading frame 91
  Uniprot ID: Q9NYK6
  ENST ID: ENST00000400559
  CDS Start-End: 92-982
gcggccgcctctgctgcggccggaaacaatagtggaggaacccgagccgcacggaacggcggtggtggcccgcggagccggacggggcactatgaacgaagaggagcagtttgtaaacattgatttgaatgatgacaacatttgcagtgtttgtaaactgggaacagacaaagaaacactctccttctgccacatttgttttgagctaaatattgagggggtaccaaagtctgatctcttgcacaccaaatcattaaggggccataaagactgctttgaaaaataccatttaattgcaaaccagggttgtcctcgatctaagctttcaaaaagtacttatgaagaagttaaaaccattttgagtaagaagataaactggattgtgcagtatgcacaaaataaggatctggattcagattctgaatgttctaaaaacccccagcatcatctgtttaatttcaggcataagccagaagaaaaattactcccacagtttgactcccaagtaccaaaatattctgcaaaatggatagatggaagtgcaggtggcatctctaactgtacacaaagaattttggagcagagggaaaatacagactttggactttctatgttacaagattcaggtgccactttatgtcgtaacagtgtattgtggcctcatagtcacaaccaggcacagaaaaaagaagagacaatctctagtccagaggctaatgtccagacccagcatccacattacagcagagaggaattgaattcgatgactcttggtgaggtagagcaactgaatgcaaagctcctacagcaaatccaggtttttgaagagttaactcaccaagtgcaagaaaaagattctttggcctcacagctccatgtccgccacgttgccatcgaacagcttctgaagaactgttctaagttaccatgtctgcaagtagggcgaacaggaatgaagtcgcacctacccataaacaactgacctaaacagacttacttcgtatgccctgccctttattggtctcccagacatgcaaactttgaagaagtttgaagaaagttgtggtccgtttttttatggtcattaaatttgccaaacataaggcagtatttaacatctttgtcaaataaagcagatcattatactctagtcttctagggctaatcattttggctcatttggggactcttttttcccagaattactaaacaaattttatcacatgtgactacttaaatatactgttacagtgtcattttattaaacattttaattcacctgtcaaaacaacagattaactccttagtgtaaactactagagataatttttaagagggaaatggaattcatatcacctcttatttattatgagcaatattttaatataaaaattttatatgtgaaaatgctattttaggtactttgccattctctttataaatgtgtatttgagtggttctgtatatttatttacattatcatgtgtgaatatgttcacccatatttcaggtcactgcattttattctcttaatacaatgttttcacaacggttaccttgctttccaaagataaatatattttggattagaaa

SEQ ID NO: 118907 - DNA, 896 bp, Homo sapiens
  Payload ID: 3290
  Gene Symbol: C21orf91
  Gene Name: chromosome 21 open reading frame 91
  ENST ID: ENST00000405964
  CDS Start-End: 170-896
cccggagcgatgggacgaggctctcccgcccgccgggctccaggatgccgcggctctcccagctccggcttgggcccctccggcggtgcccggccggtaccgtgaagccgccgctcggccttcggtgtagttgccccggacacggcgggacgccctccccgggggcactatgaacgaagaggagcagtttgtaaacattgatttgaatgatgacaacatttgcagtgtttgtaaactgggaacagacaaagaaacactctccttctgccacatttgttttgagctaaatattgagggggtaccaaagtctgatctcttgcacaccaaatcattaaggggccataaagactgctttgaaaaataccatttaattgcaaaccagggttgtcctcgatctaagctttcaaaaagtacttatgaagaagttaaaaccattttgagtaagaagataaactggattgtgcagtatgcacaaaataaggatctggattcagattctgaatgttctaaaaacccccagcatcatctgtttaatttcaggcataagccagaagaaaaattactcccacagtttgactcccaagtaccaaaatattctgcaaaatggatagatggaagtgcaggtggcatctctaactgtacacaaagaattttggagcagagggaaaatacagactttggactttctatgttacaagattcaggtgccactttatgtcgtaacagtgtattgtggcctcatagtcacaaccaggcacagaaaaaagaagagacaatctctagtccagaggctaatgtccagacccagcatccacattacagcagagaggaattgaattcgatgactcttggtgaggtagagcaactgaatgcaaagctcctacagcaaatccagg

SEQ ID NO: 118908 - DNA, 681 bp, Homo sapiens
  Payload ID: 3291
  Gene Symbol: C22orf15
  Gene Name: chromosome 22 open reading frame 15
  ENST ID: ENST00000305199
  CDS Start-End: 101-574
cccggccctgaagcaggtctctgctccacgcttttccttagttggggaatcgagagttgggggatcaaagccccccacatctccctcacccgctgcagctatgtttatcaaggtgatgtttggggctggctgctcggtgctggtgaacacctcttgcaggctggtgaacctcaccgcccacctgaggcagaaagcagggttgcccccagatgcgaccattgctctcctggctgaggatggcaacctagtgagcctggaggaggacctgaaggaaggggcttcccgggcccagaccatgggcaactccctactgaaggagcgagccatatatgtcctcgttcggatcatcagtaagagggagaggacatggcctccacccgctatgagtccctattggagaacctggatgaccattacccagagctggcagaggaactgcgcaggctgtcaggcctctcctctgtgggccacaactggaggaagcgtatgggcactcggcgaggccgccatgagcaaagccccacttcaaggcccagaaagggccctgattaaggggatggattgcacactgtagtgagacatccatcctgaccccacctcatcagccagggagctccctgaagacaggccatcgagagaggcacacaacaggctgtggtctaaaataaacttttaattgca

SEQ ID NO: 118909 - DNA, 646 bp, Homo sapiens
  Payload ID: 3291
  Gene Symbol: C22orf15
  Gene Name: chromosome 22 open reading frame 15
  Uniprot ID: Q8WYQ4
  ENST ID: ENST00000382821
  CDS Start-End: 85-513
gtctctgctccacgcttttccttagttggggaatcgagagttgggggatcaaagccccccacatctccctcacccgctgcagctatgtttatcaaggtgatgtttggggctggctgctcggtgctggtgaacacctcttgcaggctggtgaacctcaccgcccacctgaggcagaaagcagggttgcccccagatgcgaccattgctctcctggctgaggatggcaacctagtgagcctggaggaggacctgaaggaaggggcttcccgggcccagaccatgggcaactccctactgaaggagcgagccatatatgtcctcgttcggatcatcagtaaggtggcccaagagggagaggacatggcctccacccgctatgagtccctattggagaacctggatgaccattacccagagctggcaggtgcaaacagacaacaacccagcaggactcctcttgcagaatctggaattgctgagaagttgcatcagcaagaggggcaagggccctgattaaggggatggattgcacactgtagtgagacatccatcctgaccccacctcatcagccagggagctccctgaagacaggccatcgagagaggcacacaacaggctgtggtctaaaataaacttttaattgca

SEQ ID NO: 118910 - DNA, 829 bp, Homo sapiens
  Payload ID: 3291
  Gene Symbol: C22orf15
  Gene Name: chromosome 22 open reading frame 15
  Uniprot ID: Q8WYQ4
  ENST ID: ENST00000402217
  CDS Start-End: 254-700
gggctcagtggggaggaagaggaggccaggagtcttggactagctgcagggtttgagctaggctgaagcagcagaaccacagaggtggctgagcaggggcctggccctgggacccagccatccacactcacacatccacttctccctccagagcccggccctgaagcaggtctctgctccacgcttttccttagttggggaatcgagagttgggggatcaaagccccccacatctccctcacccgctgcagctatgtttatcaaggtgatgtttggggctggctgctcggtgctggtgaacacctcttgcaggctggtgaacctcaccgcccacctgaggcagaaagcagggttgcccccagatgcgaccattgctctcctggctgaggatggcaacctagtgagcctggaggaggacctgaaggaaggggcttcccgggcccagaccatgggcaactccctactgaaggagcgagccatatatgtcctcgttcggatcatcaagggagaggacatggcctccacccgctatgagtccctattggagaacctggatgaccattacccagagctggcagaggaactgcgcaggctgtcaggcctctcctctgtgggccacaactggaggaagcgtatgggcactcggcgaggccgccatgagcaaagccccacttcaaggcccagaaagggccctgattaaggggatggattgcacactgtagtgagacatccatcctgaccccacctcatcagccagggagctccctgaagacaggccatcgagagaggcacacaacaggctgtggtctaaaataaacttttaattgca

SEQ ID NO: 118911 - DNA, 476 bp, Homo sapiens
  Payload ID: 3291
  Gene Symbol: C22orf15
  Gene Name: chromosome 22 open reading frame 15
  ENST ID: ENST00000614752
  CDS Start-End: 56-454
ccctgtccggcctcccacctcggctggggacctagccccaatccatccctacccaatgctctgctcccagcctggactagcaaacagttccagagtgagaggcagagtagggaccattaggccagtcaggtgtccttcatcgtctctccacatgtcacagagggagaggacatggcctccacccgctatgagtccctattggagaacctggatgaccattacccagagctggcaggtgagtgtcagggtacagcccagggggagggcacaccttctccctaacccctaccaacaggacttcctgggccttccagaggaactgcgcaggctgtcaggcctctcctctgtgggccacaactggaggaagcgtatgggcactcggcgaggccgccatgagcaaagccccacttcaaggcccagaaaggtgagctccctgccacccaggagttgctagctggggcagggagccaggtaca

SEQ ID NO: 118912 - DNA, 537 bp, Homo sapiens
  Payload ID: 3291
  Gene Symbol: C22orf15
  Gene Name: chromosome 22 open reading frame 15
  ENST ID: ENST00000627601
  CDS Start-End: 1-404
ctggctgctcggtgctggtgaacacctcttgcaggctggtgaacctcaccgcccacctgaggcagaaagcagggttgcccccagatgcgaccattgctctcctggctgaggatggcaacctagtgagcctggaggaggacctgaaggaaggggcttcccgggcccagaccatgggcaactccctactgaaggagcgagccatatatgtcctcgttcggatcatcagtaaggtggcccaagagggagaggacatggcctccacccgctatgagtccctattggagaacctggatgaccattacccagagctggcaggtgcaaacagacaacaacccagcaggactcctcttgcagaatctggaattgctgagaagttgcatcagcaagaggggcaagggccctgattaaggggatggattgcacactgtagtgagacatccatcctgaccccacctcatcagccagggagctccctgaagacaggccatcgagagaggcacacaacaggctgtggtctaaaataaacttttaattgca

SEQ ID NO: 118913 - DNA, 556 bp, Homo sapiens
  Payload ID: 3291
  Gene Symbol: C22orf15
  Gene Name: chromosome 22 open reading frame 15
  ENST ID: ENST00000626888
  CDS Start-End: 1-449
ctggctgctcggtgctggtgaacacctcttgcaggctggtgaacctcaccgcccacctgaggcagaaagcagggttgcccccagatgcgaccattgctctcctggctgaggatggcaacctagtgagcctggaggaggacctgaaggaaggggcttcccgggcccagaccatgggcaactccctactgaaggagcgagccatatatgtcctcgttcggatcatcagtaagagggagaggacatggcctccacccgctatgagtccctattggagaacctggatgaccattacccagagctggcagaggaactgcgcaggctgtcaggcctctcctctgtgggccacaactggaggaagcgtatgggcactcggcgaggccgccatgagcaaagccccacttcaaggcccagaaagggccctgattaaggggatggattgcacactgtagtgagacatccatcctgaccccacctcatcagccagggagctccctgaagacaggccatcgagagaggcacacaacaggctgtggtctaaaataaacttttaattgca

SEQ ID NO: 118914 - DNA, 551 bp, Homo sapiens
  Payload ID: 3291
  Gene Symbol: C22orf15
  Gene Name: chromosome 22 open reading frame 15
  ENST ID: ENST00000630973
  CDS Start-End: 1-422
ctggctgctcggtgctggtgaacacctcttgcaggctggtgaacctcaccgcccacctgaggcagaaagcagggttgcccccagatgcgaccattgctctcctggctgaggatggcaacctagtgagcctggaggaggacctgaaggaaggggcttcccgggcccagaccatgggcaactccctactgaaggagcgagccatatatgtcctcgttcggatcatcaagggagaggacatggcctccacccgctatgagtccctattggagaacctggatgaccattacccagagctggcagaggaactgcgcaggctgtcaggcctctcctctgtgggccacaactggaggaagcgtatgggcactcggcgaggccgccatgagcaaagccccacttcaaggcccagaaagggccctgattaaggggatggattgcacactgtagtgagacatccatcctgaccccacctcatcagccagggagctccctgaagacaggccatcgagagaggcacacaacaggctgtggtctaaaataaacttttaattgca

SEQ ID NO: 118915 - DNA, 1560 bp, Homo sapiens
  Payload ID: 3292
  Gene Symbol: C22orf23
  Gene Name: chromosome 22 open reading frame 23
  Uniprot ID: Q9BZE7
  ENST ID: ENST00000249079
  CDS Start-End: 258-911
agcgagaggcgctagctgccagctccagcagcccagatcgcgcagtatttctgcgtggcaccggtgcggatgcggctgtaaagcagtggtcaccgcctccgggagcccacttctatgtggagaggggagcacccagagagggtcttagggtgaaatttcaattttggcatatcactcagtgggtactgttgtgaccatggctgtgttaacactccctcccgaggagacttccctgccacaggcgctggagtcctcccatggcttcacagaagcagatggaggtagtgaccaaaggaactgggttccggcgccgccccaagaccatcacttacaccccggggacctgcgagctgctcagagtgatgatgaaggaatccaaactgacgaacatccagcagcgccacatcatggacatcatgaaaagaggagatgctttgcccctacagtgcagcccaacatccagccagagagtcttaccttccaagcaaatagcctcgcccatctacctgcctcccatcctcgcagcccgtccccacctccggcctgccaacatgtgtcaagccaatggggcctacagccgggagcagttcaagcctcaagccaccagggatttggagaaggagaaacaaagactccaaaatatctttgccacagggaaggacatggaggaacggaaaagaaaggcccctcctgcacgacagaaggctccagcccctgagctagaccgatttgaagagctggtgaaggaaatccaggagaggaaagaattcctggctgacatggaggccctgggacagggcaaacagtaccgaggaatcatccttgctgaaatctcccagaaactccgggaaatggaagacattgaccacagaaggagtgaggaacttaggaagggtcttgccaccacttaatctgtctccagagacgggcagggtagcccaagctcgaccactggagtccactcctctgccaggcagggccatcctcaggccagcccatcctaccagccttctgccacgtcaggtggtggcatagcactgccctgcagtaccccaaggcatactcagcagcctagcccctgccccggaatgcagatggagcctctgagactcacagccccgtccgcagagaagcaaagcccgagcatccctactaggacatgtgtctaaaggtatccactgggcctgcttcccaccacttctgacctgtggcctgttcatttagttttctgaattcaggaatgaatatgattcctttcttcctgttttaggatttacttatttgatttcttaccgccttaggcaagtattcaaccacaatgattaactggccaataaaacatatttaacgtgggtcattacaagcaccattttgttttcagagggataagcttatttgttcaaggcattagactttgtcaagcccagatggtttctagctacctgtttgcatatttcaagtggcaacgggaaccaacctcttgggcaccccatggctggctgctgtggcgggtgctgaattccactctgttaatgatctcaataaacctctgcaacggtt

SEQ ID NO: 118916 - DNA, 765 bp, Homo sapiens
  Payload ID: 3292
  Gene Symbol: C22orf23
  Gene Name: chromosome 22 open reading frame 23
  Uniprot ID: Q9BZE7
  ENST ID: ENST00000403026
  CDS Start-End: 62-715
aatcacttccgggaggcaggacagagcggggaaagtgcgcatgcgctgactgagtcctcccatggcttcacagaagcagatggaggtagtgaccaaaggaactgggttccggcgccgccccaagaccatcacttacaccccggggacctgcgagctgctcagagtgatgatgaaggaatccaaactgacgaacatccagcagcgccacatcatggacatcatgaaaagaggagatgctttgcccctacagtgcagcccaacatccagccagagagtcttaccttccaagcaaatagcctcgcccatctacctgcctcccatcctcgcagcccgtccccacctccggcctgccaacatgtgtcaagccaatggggcctacagccgggagcagttcaagcctcaagccaccagggatttggagaaggagaaacaaagactccaaaatatctttgccacagggaaggacatggaggaacggaaaagaaaggcccctcctgcacgacagaaggctccagcccctgagctagaccgatttgaagagctggtgaaggaaatccaggagaggaaagaattcctggctgacatggaggccctgggacagggcaaacagtaccgaggaatcatccttgctgaaatctcccagaaactccgggaaatggaagacattgaccacagaaggagtgaggaacttaggaagggtcttgccaccacttaatctgtctccagagacgggcagggtagcccaagctcgaccactggagtcca

SEQ ID NO: 118917 - DNA, 1517 bp, Homo sapiens
  Payload ID: 3292
  Gene Symbol: C22orf23
  Gene Name: chromosome 22 open reading frame 23
  Uniprot ID: Q9BZE7
  ENST ID: ENST00000403305
  CDS Start-End: 210-863
agagcggggaaagtgcgcatgcgctgactggtgtgtgcgcgtttctatagtagcgagaggcgctagctgccagctccagcagcccagatcgcgcagtatttctgcgtggcaccggtgcggatgcggctgtaaagcagtggtcaccgcctccgggagcccacttctatgtggagaggggagcacccagagagggtcttaggagtcctcccatggcttcacagaagcagatggaggtagtgaccaaaggaactgggttccggcgccgccccaagaccatcacttacaccccggggacctgcgagctgctcagagtgatgatgaaggaatccaaactgacgaacatccagcagcgccacatcatggacatcatgaaaagaggagatgctttgcccctacagtgcagcccaacatccagccagagagtcttaccttccaagcaaatagcctcgcccatctacctgcctcccatcctcgcagcccgtccccacctccggcctgccaacatgtgtcaagccaatggggcctacagccgggagcagttcaagcctcaagccaccagggatttggagaaggagaaacaaagactccaaaatatctttgccacagggaaggacatggaggaacggaaaagaaaggcccctcctgcacgacagaaggctccagcccctgagctagaccgatttgaagagctggtgaaggaaatccaggagaggaaagaattcctggctgacatggaggccctgggacagggcaaacagtaccgaggaatcatccttgctgaaatctcccagaaactccgggaaatggaagacattgaccacagaaggagtgaggaacttaggaagggtcttgccaccacttaatctgtctccagagacgggcagggtagcccaagctcgaccactggagtccactcctctgccaggcagggccatcctcaggccagcccatcctaccagccttctgccacgtcaggtggtggcatagcactgccctgcagtaccccaaggcatactcagcagcctagcccctgccccggaatgcagatggagcctctgagactcacagccccgtccgcagagaagcaaagcccgagcatccctactaggacatgtgtctaaaggtatccactgggcctgcttcccaccacttctgacctgtggcctgttcatttagttttctgaattcaggaatgaatatgattcctttcttcctgttttaggatttacttatttgatttcttaccgccttaggcaagtattcaaccacaatgattaactggccaataaaacatatttaacgtgggtcattacaagcaccattttgttttcagagggataagcttatttgttcaaggcattagactttgtcaagcccagatggtttctagctacctgtttgcatatttcaagtggcaacgggaaccaacctcttgggcaccccatggctggctgctgtggcgggtgctgaattccactctgttaatgatctcaataaacctctgcaacggttcatta

SEQ ID NO: 118918 - DNA, 563 bp, Homo sapiens
  Payload ID: 3292
  Gene Symbol: C22orf23
  Gene Name: chromosome 22 open reading frame 23
  ENST ID: ENST00000418863
  CDS Start-End: 78-563
atagtagcgagaggcgctagctgccagctccagcagcccagatcgcgcagtatttctgcgtggcaccgagtcctcccatggcttcacagaagcagatggaggtagtgaccaaaggaactgggttccggcgccgccccaagaccatcacttacaccccggggacctgcgagctgctcagagtgatgatgaaggaatccaaactgacgaacatccagcagcgccacatcatggacatcatgaaaagaggagatgctttgcccctacagtgcagcccaacatccagccagagagtcttaccttccaagcaaatagcctcgcccatctacctgcctcccatcctcgcagcccgtccccacctccggcctgccaacatgtgtcaagccaatggggcctacagccgggagcagttcaagcctcaagccaccagggatttggagaaggagaaacaaagactccaaaatatctttgccacagggaaggacatggaggaacggaaaagaaaggcccctcctgcacgacagaaggctccagcccctgagctagaccgatttgaagagctggtg

SEQ ID NO: 118919 - DNA, 758 bp, Homo sapiens
  Payload ID: 3292
  Gene Symbol: C22orf23
  Gene Name: chromosome 22 open reading frame 23
  ENST ID: ENST00000422191
  CDS Start-End: 397-758
tgcgtggcaccggtgcggatgcggctgtaaagcagtggtcaccgcctccgggagcccacttctatgtggagaggggagcacccagagagggtcttagggtgaaatttcaattttggcatatcactcagtgggtactgttgtgaccatggctgtgttaacactccctcccgaggagacttccctgccacaggcgctgggtcagaatgaggactgtgtgtgtgtatctgtgtgtctggatgggaggtttgggcactgtcgcaatattaactggcggcatcattctctggctcgatccccgcttccagacttctgggggtgttgggcgtcggggaacagagattagggacaggagacagggggtgtgtcattgcgtctttccctcctcagagtcctcccatggcttcacagaagcagatggaggtagtgaccaaaggaactgggttccggcgccgccccaagaccatcacttacaccccggggacctgcgagctgctcagagtgatgatgaaggaatccaaactgacgaacatccagcagcgccacatcatggacatcatgaaaagaggagatgctttgcccctacagtgcagcccaacatccagccagagagtcttaccttccaagcaaatagcctcgcccatctacctgcctcccatcctcgcagcccgtccccacctccggcctgccaacatgtgtcaagccaatggggcctacagccgggagcagttcaagcctcaagccaccagggatttggagaa

SEQ ID NO: 118920 - DNA, 1777 bp, Homo sapiens
  Payload ID: 3292
  Gene Symbol: C22orf23
  Gene Name: chromosome 22 open reading frame 23
  ENST ID: ENST00000619227
  CDS Start-End: 62-652
aatcacttccgggaggcaggacagagcggggaaagtgcgcatgcgctgactgagtcctcccatggcttcacagaagcagatggaggtagtgaccaaaggaactgggttccggcgccgccccaagaccatcacttacaccccggggacctgcgagctgctcagaggaggagatgctttgcccctacagtgcagcccaacatccagccagagagtcttaccttccaagcaaatagcctcgcccatctacctgcctcccatcctcgcagcccgtccccacctccggcctgccaacatgtgtcaagccaatggggcctacagccgggagcagttcaagcctcaagccaccagggatttggagaaggagaaacaaagactccaaaatatctttgccacagggaaggacatggaggaacggaaaagaaaggcccctcctgcacgacagaaggctccagcccctgagctagaccgatttgaagagctggtgaaggaaatccaggagaggaaagaattcctggctgacatggaggccctgggacagggcaaacagtaccgaggaatcatccttgctgaaatctcccagaaactccgggaaatggaagacattgaccacagaaggagtgaggaacttaggaagggtcttgccaccacttaatctgtctccagagacgggcagggtagcccaagctcgaccactggagtccactcctctgccaggcagggccatcctcaggccagcccatcctaccagccttctgccacgtcaggtggtggcatagcactgccctgcagtaccccaaggcatactcagcagcctagcccctgccccggaatgcagatggagcctctgagactcacagccccgtccgcagagaagcaaagcccgagcatccctactaggacatgtgtctaaaggtatccactgggcctgcttcccaccacttctgacctgtggcctgttcatttagttttctgaattcaggaatgaatatgattcctttcttcctgttttaggatttacttatttgatttcttaccgccttaggcaagtattcaaccacaatgattaactggccaataaaacatatttaacgtgggtcattacaagcaccattttgttttcagagggataagcttatttgttcaaggcattagactttgtcaagcccagatggtttctagctacctgtttgcatatttcaagtggcaacgggaaccaacctcttgggcaccccatggctggctgctgtggcgggtgctgaattccactctgttaatgatctcaataaacctctgcaacggttcattatccctctgtgaaaactaagtctcaacaagataccacaaccaagggcatttacctggcaagcagtgcattcaggattaaaagttggctttagctttatgtctttccactatacccatggccacagaaagaaacatgaaaaggtgggagcgacctagagccctggcctgggagttccaatccctgcatgtgccgcgtgacctttcttgggcaaaacccaccagctccgtgcttgtgcatctgcgaggccctgctgggaaggagtcacctgacaccttgtcctgtacacagcacatctgtccccctcccctctggctcctgacacccacgatccctgccttctccggtattctgtcatttgcttgtcccactaaatcaccaaaatattttggaaatatcaaccttgtctcgggcacctggagggagtcccataatcccatcaggtcacatgacccaagtttcggtttgcagaat

SEQ ID NO: 118921 - DNA, 6619 bp, Homo sapiens
  Payload ID: 3293
  Gene Symbol: C22orf29
  Gene Name: chromosome 22 open reading frame 29
  Uniprot ID: Q7L3V2
  ENST ID: ENST00000328554
  CDS Start-End: 504-1598
gttcccgactccggcaagagggtcagtgtggaggcgggagcccgggcggccggcttgaactccgtgcacgcgggcctggagctgcgcccctgcgtcttttcccgacttctgatccgcagaggggcactcggagccccagcctgggtcgcagtgccttcggtctgcgggcctcagtttctcggtggcgcctggactctcgccctcagagggaggcccgtcccacggtctgtggctacggatcccaggaccctcttcgcgggcgattcgcgtagcctcagattgcctcggatgatggcctgcgactgacagtctctcagctcttctcagctctcctgaggctgcagctgtcagctccctgatcctcagcacttgcctggaccagtgcgggtctgccacgccctgttcagccatccctgtcctgttgtgtcgtgcaagccacatctgtccacacccccaccacccaccagtgctggctctcctctcttctcccctgtgctcccagcatgcctcgtggccggtgccgtcagcagggccctcgcattcccatctgggcagccgccaattatgccaacgcacatccatggcagcagatggacaaggcgtctcctggggtggcatacaccccccttgtggatccctggattgagcggccctgctgtggggacaccgtgtgtgtgcgaacgaccatggagcagaagagcacagctagtggcacttgtggcggtaaacctgcagaaaggggtcccctagctgggcacatgcccagctcccgaccccacagggtggacttctgctgggtaccaggctcagacccaggcacctttgatggctccccgtggctactggaccgcttcttggcccagctgggcgattacatgtccttccactttgagcactatcaggacaacatcagccgtgtctgcgagatcctcaggcgcctaacaggccgagcccaggcctgggcagccccctaccttgatggggacctgcccctgcctgacgattacgagctcttctgccaggatctcaaggaagttgttcaagacccgaacagttttgctgagtaccatgctgtggttacctgtcccctgcccctggcctccagccagctgccagtggcccctcagctgcctgtggtgaggcaatacttagctaggttcttagagggcctggcactcgacatgggtactgcccccaggtctttaccagccgccatggccacccctgctgtgtctgggtccaactctgtatctagaagtgctctgttcgagcagcagctgaccaaggagagcacccctgggcccaaggagcccccagtcctgcccagttctacatgtagctccaagcctggtcctgtggaaccagcctcttcccagccagaggaggcagcccccacacctgtccctagactgtcggagtcagctaatcctcctgcccagagaccagacccagctcatccaggaggtccaaaaccccagaaaacagaggaggaggttttggagacagagggagaccaggaggtgtccttaggtaccccacaggaggtggtggaggccccggagaccccaggagagccaccactttctcctgggttctgaacacagcccaggtgggaacaatgctgcccctcatgatgaagtggcctgtgtggcttgagcgccccatagtccccagtcagagcagagtggtgtccccagatgacttcagaccccatagctgggcaagatgcgcttgttttggactctgcgctgagcagaaccagctcccccaactccagcagagcttgacctccgccctgtgccctttccctgctgctggctctctgctgcatccctgcccgtcttctgggagtgccgtctcacccaggcctgctcccacgagggggtcgttttgtagatcaactctcagcagatagttgcatcatctttgtcacctccacccccataaaacaccccccttggtgtcttccacactggctgggactgaactgggtctgccacgtctgccctgttgggacctcgttcctgtatggggtttctgtgtctgtccccctagccccaccctctctgctccctgtgacttctgtcccagctggaatgtgaggaaggctgcctggaggaagtggccactttgattctgggggatgagtgggatagcatcttggcaaagaatgatgtttcctgtgggattaccagcagttctgggcagctggaaggtttggatgcaggaaggtgggatgcaagccccttgccaggctcagctgcaggcattcgccctttgtgtgttaacactgtagctctaatcgtgcctggtgttctgaagcaggctcctcttccctgctgctgtgctgccatcccctgctcactccgcactcgcatgcattgcggattcagcacttaagccctagtgtgtaaatgacttggatctccctcctggcagactgtgaccctcagcacaggggctctgtcttagtcagctctgtggcctggtacacaattggtgctcattaaacacgtgttggattactggctgaggtggtgcagtggctgcctaccagcaagtctttgtttcccattctgtcaggagcagaggcctggccatgagcattccaggtcagcattgcagctgtggtttctggcaggggctttgagggtccaagggtctgatcaaagaagctgggtggggctgagtagggggtgggtggctctgcaggtagagaactgacttccgagagctgtaggtgaagtgaggaccaggcagcagtccagagctgtgaggccccaggcccagaggaatggaatgaagaaagacctgttccacacaaggaggggttttctagtggaagctgagcttggaagctcctggagccaagtttaccacaggataggcaggtacagccgcccagtgtgtgcagtgtgtgcccactctggtgcttggacaagaagttcaagtccctttcaggtttacaattgtgaaaacaacaaaacaacaccttcctggaaagtaggaagaaaaagcagaaatgtgaattggaaatacagccaactattttaggaaaaactaattagcaagcatctgattaaacttattcagaaactggccgggagcagtgtctcacacctgtaatcccagcactctgggaggccaaggtgggtggatcacctgaggtcaggagttcaagaccagcctgaccagcatggagaaatccatctctcctaaaaatacaaaattagccaagtgtggtggtgcatgcctgtaatctcagctacttgggaggctgaggcagaagaattgcttgaacccaggaggcagagggtgtggtgagccgagatcacgccattgcactccagcctggacaacaagagtgaaactccatcccaaaaaaaaaaaaacaacaaaaaacaaaaaccttatttagaaaaatataaattgttgggattattttatggtaactatcactagaaaaggctctgggttcagatggttttatgtgtgagttatttcagggcacagataccttgtaggtaaaacaactggaaaccttggaaataggtgggaagctatttttagaaagcaggtatagccctggtagcaaagcaagtgagctggcagaagaaacccattttcagtcttgattctggtcagatgtgagaagtccctggatgtcctggcccagccccatgcttctgtgccaggtcacagctgccctccgtccgatgactcaggccccatccccccttttgtgggttgggtcagactgctccctgatgcctacctccagtgcactgtggcctggctcacctgtgggtctggcagtagaacccagagttgctctctaggatggacagcctagtcacccagctgacctttaccctgtcccacaggcttctggacaggccaccttccccatctccctttagtggacctgaagtggatactccagcctgggattgctgccttctcttttgaaccctgtcctattggggctttggggcttttgtgcccttgggacccaggcagctcctgggggtgtgtgagttatggtctgccgtgtgtctgagggccagtcatgcagcatccacctaggcaggcttgagagtccttgggagagtccaggtgacctggtttttaattaaaacgcgtcctgtttattgtggttgggctctgcccagaaaggaaggtagggccttgaagtggtgatgtccaggtttcctgcacaggtagggtggaggcaacgatggactctggcatggccttccagacaggcagtgcacacagctcctttcagagtggctttgttgccagctgctgcagcacctgctttcagacagatgatgaccaagctgctttcctgctgggggaaggaggcattccccctgggttgtttttctcttctggcccccacacactggcagacccgaaggcagggtgctcaggagctgcagagcctggcagggtttgctggacatgctcagggacgggccatggtgctggctctgctttctaatcatggtgtcagtccttcacttcccttggaaatacccagagattttatttcctgaagataggacatgatgggtgctgtgagatggtatttaaagtacctgtctgcaaggaaaactttaaaataggaagtactaaggataaggtcctatgggatattggaatattttataaagccacaatagttaaagcacttagatgtggacagatgagcagagaatagaggactttgaaacgggccaaataaatatggaaatttagtacaggctagaggtgtttccaattaacgagtaaaatggattattcagtaaaagcagttggccctctggaaaatagtaaagccatgtatgtgcctcactctttatgccagtacatattccagattaaagatttcaatgttacaattatgaaagtactagaggaaaatatgggtgaatttttttttttttttttttttgcctatgattccaggattttaaaagttttagatgcccagagttgtggaggtatggagaagtggaccttctcatactgttggtgggaatacacaataatataatttgaccacgtaacaattctaggcacatgcatgctgtgactacttgctaggtgcatgaaggctcttgccaggggtggtcatggttcggtaccactacatgggggtttagagcagggactggaggttggccttgcctcctcccctccccgcatgagctgagggtccttacctgacctttttgagctgtgaccagagtttttcctcatggggtggttagaagggttgaatgagaatgatgcccatgcagtgccttggctggggtctgggccctctaacacccacctcatgggtgtcactgttttttgaacagcagaactggaaaagcccaaagatccagcaataaaggagcaaggcaaataaagctgttaccctgcaggatcagtcagcatgagccagattgtgctgcagtaacaaagatctccaacagcgcagcggctacagttggcactgcttatttcttgcttgcacctgtgggccaccgtggctggggcctgtcagacctgtgctgacgacagcctacctggacatatttctccatgctcactgaggcaggggaaaggccacagcaggccacaagtaatgtgtgtcaccccacttccatttctgtggccaaaggaagccacagagccacacctgagttccataggacggcagcagctgatcatcctatgggctggggtgctcagtatggagaagtacaagcagccacccagcgtggggctggttggtgctgctgaggatgggaggatgggaggggcctgcatccatcccagggcaacatacctgtttgtctgctggggctgcctgacaaaggaccgcaggctaggggacttaaacaacagacatttcctcatgattctggagctagaagcctgagatcaaggtgtgggcagggttggtttctcctgaggcctcgctccttggcctgcagatagccatcttcttgccgtgtccctgtctgtgtctgtgtcctaatctctcataagctcactagtctattggatcagggcccaccctcatgacctcatttaaccctgaattacctctttaaagaccctgtcttcaaatgtaagtactaggggttaggacttgaacataaaaatattgaagggacatagttctgcccacagcggtgcccgcgataggcttctctggttttgtctttgctgttcctggcagcgctatattgggcaggcttctgtggtctccacatgcctgtgtgcagagtcccccaggccctgggttctggggcccatactgaggagtggggatggccaagccttggctgttgagtaggcagtgcccagttgtgctgtatgggatgctgtttctcacttaagaaatctttccctacctggggggtacaaaggcattatcctgtattcccaggttgtaactttctgcctttgacattcaaccttgagtccacctgtaagtgtaactgcggcagaagggaggggtctgctgtcatccttgatagcctgtgatgagcagagcccctctgccgaccgcgatgcacatgtaatatgagcaagaaataaatttttgatgtgcgaa

SEQ ID NO: 118922 - DNA, 6785 bp, Homo sapiens
  Payload ID: 3293
  Gene Symbol: C22orf29
  Gene Name: chromosome 22 open reading frame 29
  Uniprot ID: Q7L3V2
  ENST ID: ENST00000405640
  CDS Start-End: 670-1764
gatgtaatcggtctctggacgctgcgcggcgctcctaggagcaggcgttcccgactccggcaagagggtcagtgtggaggcgggagcccgggcggccggcttgaactccgtgcacgcgggcctggagctgcgcccctgcgtcttttcccgacttctgatccgcagaggggcactcggagccccagcctgggtcgcagtgccttcggtctgcgggcctcagtttctcggtccgcgccgggggtttgtgggggcacctggagacatttgggccgttctcgcagtctcgggaagccgcgcccgctccttgcctggcctcacggcggccgatctcgttctccactttctaggtggcgcctggactctcgccctcagagggaggcccgtcccacggtctgtggctacggatcccaggaccctcttcgcgggcgattcgcgtagcctcagattgcctcggatgatggcctgcgactgacagtctctcagctcttctcagctctcctgaggctgcagctgtcagctccctgatcctcagcacttgcctggaccagtgcgggtctgccacgccctgttcagccatccctgtcctgttgtgtcgtgcaagccacatctgtccacacccccaccacccaccagtgctggctctcctctcttctcccctgtgctcccagcatgcctcgtggccggtgccgtcagcagggccctcgcattcccatctgggcagccgccaattatgccaacgcacatccatggcagcagatggacaaggcgtctcctggggtggcatacaccccccttgtggatccctggattgagcggccctgctgtggggacaccgtgtgtgtgcgaacgaccatggagcagaagagcacagctagtggcacttgtggcggtaaacctgcagaaaggggtcccctagctgggcacatgcccagctcccgaccccacagggtggacttctgctgggtaccaggctcagacccaggcacctttgatggctccccgtggctactggaccgcttcttggcccagctgggcgattacatgtccttccactttgagcactatcaggacaacatcagccgtgtctgcgagatcctcaggcgcctaacaggccgagcccaggcctgggcagccccctaccttgatggggacctgcccctgcctgacgattacgagctcttctgccaggatctcaaggaagttgttcaagacccgaacagttttgctgagtaccatgctgtggttacctgtcccctgcccctggcctccagccagctgccagtggcccctcagctgcctgtggtgaggcaatacttagctaggttcttagagggcctggcactcgacatgggtactgcccccaggtctttaccagccgccatggccacccctgctgtgtctgggtccaactctgtatctagaagtgctctgttcgagcagcagctgaccaaggagagcacccctgggcccaaggagcccccagtcctgcccagttctacatgtagctccaagcctggtcctgtggaaccagcctcttcccagccagaggaggcagcccccacacctgtccctagactgtcggagtcagctaatcctcctgcccagagaccagacccagctcatccaggaggtccaaaaccccagaaaacagaggaggaggttttggagacagagggagaccaggaggtgtccttaggtaccccacaggaggtggtggaggccccggagaccccaggagagccaccactttctcctgggttctgaacacagcccaggtgggaacaatgctgcccctcatgatgaagtggcctgtgtggcttgagcgccccatagtccccagtcagagcagagtggtgtccccagatgacttcagaccccatagctgggcaagatgcgcttgttttggactctgcgctgagcagaaccagctcccccaactccagcagagcttgacctccgccctgtgccctttccctgctgctggctctctgctgcatccctgcccgtcttctgggagtgccgtctcacccaggcctgctcccacgagggggtcgttttgtagatcaactctcagcagatagttgcatcatctttgtcacctccacccccataaaacaccccccttggtgtcttccacactggctgggactgaactgggtctgccacgtctgccctgttgggacctcgttcctgtatggggtttctgtgtctgtccccctagccccaccctctctgctccctgtgacttctgtcccagctggaatgtgaggaaggctgcctggaggaagtggccactttgattctgggggatgagtgggatagcatcttggcaaagaatgatgtttcctgtgggattaccagcagttctgggcagctggaaggtttggatgcaggaaggtgggatgcaagccccttgccaggctcagctgcaggcattcgccctttgtgtgttaacactgtagctctaatcgtgcctggtgttctgaagcaggctcctcttccctgctgctgtgctgccatcccctgctcactccgcactcgcatgcattgcggattcagcacttaagccctagtgtgtaaatgacttggatctccctcctggcagactgtgaccctcagcacaggggctctgtcttagtcagctctgtggcctggtacacaattggtgctcattaaacacgtgttggattactggctgaggtggtgcagtggctgcctaccagcaagtctttgtttcccattctgtcaggagcagaggcctggccatgagcattccaggtcagcattgcagctgtggtttctggcaggggctttgagggtccaagggtctgatcaaagaagctgggtggggctgagtagggggtgggtggctctgcaggtagagaactgacttccgagagctgtaggtgaagtgaggaccaggcagcagtccagagctgtgaggccccaggcccagaggaatggaatgaagaaagacctgttccacacaaggaggggttttctagtggaagctgagcttggaagctcctggagccaagtttaccacaggataggcaggtacagccgcccagtgtgtgcagtgtgtgcccactctggtgcttggacaagaagttcaagtccctttcaggtttacaattgtgaaaacaacaaaacaacaccttcctggaaagtaggaagaaaaagcagaaatgtgaattggaaatacagccaactattttaggaaaaactaattagcaagcatctgattaaacttattcagaaactggccgggagcagtgtctcacacctgtaatcccagcactctgggaggccaaggtgggtggatcacctgaggtcaggagttcaagaccagcctgaccagcatggagaaatccatctctcctaaaaatacaaaattagccaagtgtggtggtgcatgcctgtaatctcagctacttgggaggctgaggcagaagaattgcttgaacccaggaggcagagggtgtggtgagccgagatcacgccattgcactccagcctggacaacaagagtgaaactccatcccaaaaaaaaaaaaacaacaaaaaacaaaaaccttatttagaaaaatataaattgttgggattattttatggtaactatcactagaaaaggctctgggttcagatggttttatgtgtgagttatttcagggcacagataccttgtaggtaaaacaactggaaaccttggaaataggtgggaagctatttttagaaagcaggtatagccctggtagcaaagcaagtgagctggcagaagaaacccattttcagtcttgattctggtcagatgtgagaagtccctggatgtcctggcccagccccatgcttctgtgccaggtcacagctgccctccgtccgatgactcaggccccatccccccttttgtgggttgggtcagactgctccctgatgcctacctccagtgcactgtggcctggctcacctgtgggtctggcagtagaacccagagttgctctctaggatggacagcctagtcacccagctgacctttaccctgtcccacaggcttctggacaggccaccttccccatctccctttagtggacctgaagtggatactccagcctgggattgctgccttctcttttgaaccctgtcctattggggctttggggcttttgtgcccttgggacccaggcagctcctgggggtgtgtgagttatggtctgccgtgtgtctgagggccagtcatgcagcatccacctaggcaggcttgagagtccttgggagagtccaggtgacctggtttttaattaaaacgcgtcctgtttattgtggttgggctctgcccagaaaggaaggtagggccttgaagtggtgatgtccaggtttcctgcacaggtagggtggaggcaacgatggactctggcatggccttccagacaggcagtgcacacagctcctttcagagtggctttgttgccagctgctgcagcacctgctttcagacagatgatgaccaagctgctttcctgctgggggaaggaggcattccccctgggttgtttttctcttctggcccccacacactggcagacccgaaggcagggtgctcaggagctgcagagcctggcagggtttgctggacatgctcagggacgggccatggtgctggctctgctttctaatcatggtgtcagtccttcacttcccttggaaatacccagagattttatttcctgaagataggacatgatgggtgctgtgagatggtatttaaagtacctgtctgcaaggaaaactttaaaataggaagtactaaggataaggtcctatgggatattggaatattttataaagccacaatagttaaagcacttagatgtggacagatgagcagagaatagaggactttgaaacgggccaaataaatatggaaatttagtacaggctagaggtgtttccaattaacgagtaaaatggattattcagtaaaagcagttggccctctggaaaatagtaaagccatgtatgtgcctcactctttatgccagtacatattccagattaaagatttcaatgttacaattatgaaagtactagaggaaaatatgggtgaatttttttttttttttttttttgcctatgattccaggattttaaaagttttagatgcccagagttgtggaggtatggagaagtggaccttctcatactgttggtgggaatacacaataatataatttgaccacgtaacaattctaggcacatgcatgctgtgactacttgctaggtgcatgaaggctcttgccaggggtggtcatggttcggtaccactacatgggggtttagagcagggactggaggttggccttgcctcctcccctccccgcatgagctgagggtccttacctgacctttttgagctgtgaccagagtttttcctcatggggtggttagaagggttgaatgagaatgatgcccatgcagtgccttggctggggtctgggccctctaacacccacctcatgggtgtcactgttttttgaacagcagaactggaaaagcccaaagatccagcaataaaggagcaaggcaaataaagctgttaccctgcaggatcagtcagcatgagccagattgtgctgcagtaacaaagatctccaacagcgcagcggctacagttggcactgcttatttcttgcttgcacctgtgggccaccgtggctggggcctgtcagacctgtgctgacgacagcctacctggacatatttctccatgctcactgaggcaggggaaaggccacagcaggccacaagtaatgtgtgtcaccccacttccatttctgtggccaaaggaagccacagagccacacctgagttccataggacggcagcagctgatcatcctatgggctggggtgctcagtatggagaagtacaagcagccacccagcgtggggctggttggtgctgctgaggatgggaggatgggaggggcctgcatccatcccagggcaacatacctgtttgtctgctggggctgcctgacaaaggaccgcaggctaggggacttaaacaacagacatttcctcatgattctggagctagaagcctgagatcaaggtgtgggcagggttggtttctcctgaggcctcgctccttggcctgcagatagccatcttcttgccgtgtccctgtctgtgtctgtgtcctaatctctcataagctcactagtctattggatcagggcccaccctcatgacctcatttaaccctgaattacctctttaaagaccctgtcttcaaatgtaagtactaggggttaggacttgaacataaaaatattgaagggacatagttctgcccacagcggtgcccgcgataggcttctctggttttgtctttgctgttcctggcagcgctatattgggcaggcttctgtggtctccacatgcctgtgtgcagagtcccccaggccctgggttctggggcccatactgaggagtggggatggccaagccttggctgttgagtaggcagtgcccagttgtgctgtatgggatgctgtttctcacttaagaaatctttccctacctggggggtacaaaggcattatcctgtattcccaggttgtaactttctgcctttgacattcaaccttgagtccacctgtaagtgtaactgcggcagaagggaggggtctgctgtcatccttgatagcctgtgatgagcagagcccctctgccgaccgcgatgcacatgtaatatgagcaagaaataaatttttgatgtgcgaa

SEQ ID NO: 118923 - DNA, 6523 bp, Homo sapiens
  Payload ID: 3293
  Gene Symbol: C22orf29
  Gene Name: chromosome 22 open reading frame 29
  Uniprot ID: Q7L3V2
  ENST ID: ENST00000407472
  CDS Start-End: 400-1494
gtggctgcgcgatgtaatcggtctctggacgctgcgcggcgctcctaggagcaggcgttcccgactccggcaagagggtggcgcctggactctcgccctcagagggaggcccgtcccacggtctgtggctacggatcccaggaccctcttcgcgggcgattcgcgtagcctcagattgcctcggatgatggcctgcgactgacagtctctcagctcttctcagctctcctgaggctgcagctgtcagctccctgatcctcagcacttgcctggaccagtgcgggtctgccacgccctgttcagccatccctgtcctgttgtgtcgtgcaagccacatctgtccacacccccaccacccaccagtgctggctctcctctcttctcccctgtgctcccagcatgcctcgtggccggtgccgtcagcagggccctcgcattcccatctgggcagccgccaattatgccaacgcacatccatggcagcagatggacaaggcgtctcctggggtggcatacaccccccttgtggatccctggattgagcggccctgctgtggggacaccgtgtgtgtgcgaacgaccatggagcagaagagcacagctagtggcacttgtggcggtaaacctgcagaaaggggtcccctagctgggcacatgcccagctcccgaccccacagggtggacttctgctgggtaccaggctcagacccaggcacctttgatggctccccgtggctactggaccgcttcttggcccagctgggcgattacatgtccttccactttgagcactatcaggacaacatcagccgtgtctgcgagatcctcaggcgcctaacaggccgagcccaggcctgggcagccccctaccttgatggggacctgcccctgcctgacgattacgagctcttctgccaggatctcaaggaagttgttcaagacccgaacagttttgctgagtaccatgctgtggttacctgtcccctgcccctggcctccagccagctgccagtggcccctcagctgcctgtggtgaggcaatacttagctaggttcttagagggcctggcactcgacatgggtactgcccccaggtctttaccagccgccatggccacccctgctgtgtctgggtccaactctgtatctagaagtgctctgttcgagcagcagctgaccaaggagagcacccctgggcccaaggagcccccagtcctgcccagttctacatgtagctccaagcctggtcctgtggaaccagcctcttcccagccagaggaggcagcccccacacctgtccctagactgtcggagtcagctaatcctcctgcccagagaccagacccagctcatccaggaggtccaaaaccccagaaaacagaggaggaggttttggagacagagggagaccaggaggtgtccttaggtaccccacaggaggtggtggaggccccggagaccccaggagagccaccactttctcctgggttctgaacacagcccaggtgggaacaatgctgcccctcatgatgaagtggcctgtgtggcttgagcgccccatagtccccagtcagagcagagtggtgtccccagatgacttcagaccccatagctgggcaagatgcgcttgttttggactctgcgctgagcagaaccagctcccccaactccagcagagcttgacctccgccctgtgccctttccctgctgctggctctctgctgcatccctgcccgtcttctgggagtgccgtctcacccaggcctgctcccacgagggggtcgttttgtagatcaactctcagcagatagttgcatcatctttgtcacctccacccccataaaacaccccccttggtgtcttccacactggctgggactgaactgggtctgccacgtctgccctgttgggacctcgttcctgtatggggtttctgtgtctgtccccctagccccaccctctctgctccctgtgacttctgtcccagctggaatgtgaggaaggctgcctggaggaagtggccactttgattctgggggatgagtgggatagcatcttggcaaagaatgatgtttcctgtgggattaccagcagttctgggcagctggaaggtttggatgcaggaaggtgggatgcaagccccttgccaggctcagctgcaggcattcgccctttgtgtgttaacactgtagctctaatcgtgcctggtgttctgaagcaggctcctcttccctgctgctgtgctgccatcccctgctcactccgcactcgcatgcattgcggattcagcacttaagccctagtgtgtaaatgacttggatctccctcctggcagactgtgaccctcagcacaggggctctgtcttagtcagctctgtggcctggtacacaattggtgctcattaaacacgtgttggattactggctgaggtggtgcagtggctgcctaccagcaagtctttgtttcccattctgtcaggagcagaggcctggccatgagcattccaggtcagcattgcagctgtggtttctggcaggggctttgagggtccaagggtctgatcaaagaagctgggtggggctgagtagggggtgggtggctctgcaggtagagaactgacttccgagagctgtaggtgaagtgaggaccaggcagcagtccagagctgtgaggccccaggcccagaggaatggaatgaagaaagacctgttccacacaaggaggggttttctagtggaagctgagcttggaagctcctggagccaagtttaccacaggataggcaggtacagccgcccagtgtgtgcagtgtgtgcccactctggtgcttggacaagaagttcaagtccctttcaggtttacaattgtgaaaacaacaaaacaacaccttcctggaaagtaggaagaaaaagcagaaatgtgaattggaaatacagccaactattttaggaaaaactaattagcaagcatctgattaaacttattcagaaactggccgggagcagtgtctcacacctgtaatcccagcactctgggaggccaaggtgggtggatcacctgaggtcaggagttcaagaccagcctgaccagcatggagaaatccatctctcctaaaaatacaaaattagccaagtgtggtggtgcatgcctgtaatctcagctacttgggaggctgaggcagaagaattgcttgaacccaggaggcagagggtgtggtgagccgagatcacgccattgcactccagcctggacaacaagagtgaaactccatcccaaaaaaaaaaaaacaacaaaaaacaaaaaccttatttagaaaaatataaattgttgggattattttatggtaactatcactagaaaaggctctgggttcagatggttttatgtgtgagttatttcagggcacagataccttgtaggtaaaacaactggaaaccttggaaataggtgggaagctatttttagaaagcaggtatagccctggtagcaaagcaagtgagctggcagaagaaacccattttcagtcttgattctggtcagatgtgagaagtccctggatgtcctggcccagccccatgcttctgtgccaggtcacagctgccctccgtccgatgactcaggccccatccccccttttgtgggttgggtcagactgctccctgatgcctacctccagtgcactgtggcctggctcacctgtgggtctggcagtagaacccagagttgctctctaggatggacagcctagtcacccagctgacctttaccctgtcccacaggcttctggacaggccaccttccccatctccctttagtggacctgaagtggatactccagcctgggattgctgccttctcttttgaaccctgtcctattggggctttggggcttttgtgcccttgggacccaggcagctcctgggggtgtgtgagttatggtctgccgtgtgtctgagggccagtcatgcagcatccacctaggcaggcttgagagtccttgggagagtccaggtgacctggtttttaattaaaacgcgtcctgtttattgtggttgggctctgcccagaaaggaaggtagggccttgaagtggtgatgtccaggtttcctgcacaggtagggtggaggcaacgatggactctggcatggccttccagacaggcagtgcacacagctcctttcagagtggctttgttgccagctgctgcagcacctgctttcagacagatgatgaccaagctgctttcctgctgggggaaggaggcattccccctgggttgtttttctcttctggcccccacacactggcagacccgaaggcagggtgctcaggagctgcagagcctggcagggtttgctggacatgctcagggacgggccatggtgctggctctgctttctaatcatggtgtcagtccttcacttcccttggaaatacccagagattttatttcctgaagataggacatgatgggtgctgtgagatggtatttaaagtacctgtctgcaaggaaaactttaaaataggaagtactaaggataaggtcctatgggatattggaatattttataaagccacaatagttaaagcacttagatgtggacagatgagcagagaatagaggactttgaaacgggccaaataaatatggaaatttagtacaggctagaggtgtttccaattaacgagtaaaatggattattcagtaaaagcagttggccctctggaaaatagtaaagccatgtatgtgcctcactctttatgccagtacatattccagattaaagatttcaatgttacaattatgaaagtactagaggaaaatatgggtgaatttttttttttttttttttttgcctatgattccaggattttaaaagttttagatgcccagagttgtggaggtatggagaagtggaccttctcatactgttggtgggaatacacaataatataatttgaccacgtaacaattctaggcacatgcatgctgtgactacttgctaggtgcatgaaggctcttgccaggggtggtcatggttcggtaccactacatgggggtttagagcagggactggaggttggccttgcctcctcccctccccgcatgagctgagggtccttacctgacctttttgagctgtgaccagagtttttcctcatggggtggttagaagggttgaatgagaatgatgcccatgcagtgccttggctggggtctgggccctctaacacccacctcatgggtgtcactgttttttgaacagcagaactggaaaagcccaaagatccagcaataaaggagcaaggcaaataaagctgttaccctgcaggatcagtcagcatgagccagattgtgctgcagtaacaaagatctccaacagcgcagcggctacagttggcactgcttatttcttgcttgcacctgtgggccaccgtggctggggcctgtcagacctgtgctgacgacagcctacctggacatatttctccatgctcactgaggcaggggaaaggccacagcaggccacaagtaatgtgtgtcaccccacttccatttctgtggccaaaggaagccacagagccacacctgagttccataggacggcagcagctgatcatcctatgggctggggtgctcagtatggagaagtacaagcagccacccagcgtggggctggttggtgctgctgaggatgggaggatgggaggggcctgcatccatcccagggcaacatacctgtttgtctgctggggctgcctgacaaaggaccgcaggctaggggacttaaacaacagacatttcctcatgattctggagctagaagcctgagatcaaggtgtgggcagggttggtttctcctgaggcctcgctccttggcctgcagatagccatcttcttgccgtgtccctgtctgtgtctgtgtcctaatctctcataagctcactagtctattggatcagggcccaccctcatgacctcatttaaccctgaattacctctttaaagaccctgtcttcaaatgtaagtactaggggttaggacttgaacataaaaatattgaagggacatagttctgcccacagcggtgcccgcgataggcttctctggttttgtctttgctgttcctggcagcgctatattgggcaggcttctgtggtctccacatgcctgtgtgcagagtcccccaggccctgggttctggggcccatactgaggagtggggatggccaagccttggctgttgagtaggcagtgcccagttgtgctgtatgggatgctgtttctcacttaagaaatctttccctacctggggggtacaaaggcattatcctgtattcccaggttgtaactttctgcctttgacattcaaccttgagtccacctgtaagtgtaactgcggcagaagggaggggtctgctgtcatccttgatagcctgtgatgagcagagcccctctgccgaccgcgatgcacatgtaatatgagcaagaaataaatttttgatgtgcgaagccactga

SEQ ID NO: 118924 - DNA, 730 bp, Homo sapiens
  Payload ID: 3293
  Gene Symbol: C22orf29
  Gene Name: chromosome 22 open reading frame 29
  ENST ID: ENST00000416337
  CDS Start-End: 458-730
agtgtggaggcgggagcccgggcggccggcttgaactccgtgcacgcgggcctggagctgcgcccctgcgtcttttcccgacttctgatccgcagaggggcactcggagccccagcctgggtcgcagtgccttcggtggcgcctggactctcgccctcagagggaggcccgtcccacggtctgtggctacggatcccaggaccctcttcgcgggcgattcgcgtagcctcagattgcctcggatgatggcctgcgactgacagtctctcagctcttctcagctctcctgaggctgcagctgtcagctccctgatcctcagcacttgcctggaccagtgcgggtctgccacgccctgttcagccatccctgtcctgttgtgtcgtgcaagccacatctgtccacacccccaccacccaccagtgctggctctcctctcttctcccctgtgctcccagcatgcctcgtggccggtgccgtcagcagggccctcgcattcccatctgggcagccgccaattatgccaacgcacatccatggcagcagatggacaaggcgtctcctggggtggcatacaccccccttgtggatccctggattgagcggccctgctgtggggacaccgtgtgtgtgcgaacgaccatggagcagaagagcacagctagtggcacttgtggcggtaaacctgcagaaaggggtcccctagctgggcacatgcccagctcccgaccc

SEQ ID NO: 118925 - DNA, 995 bp, Homo sapiens
  Payload ID: 3294
  Gene Symbol: C22orf31
  Gene Name: chromosome 22 open reading frame 31
  Uniprot ID: O95567
  ENST ID: ENST00000216071
  CDS Start-End: 53-925
tatttcttccccttactaagctagcgaaaataaaatttaaggcaactgaaatatgcacccaatcaatgtgagacgagaccccagcatccctatctatggactccgacagtccatcttattaaataccaggcttcaggactgctatgtggactcaccggctctcaccaacatctggatggccagaacatgtgcaaagcagaacattaatgccccagcaccagctaccacttcctcttgggaagttgtaaggaacccattaattgccagttccttctccctggttaagcttgtactcaggcggcaactgaagaataagtgctgcccaccaccatgcaagtttggagaaggaaaactctcgaagagattaaagcacaaggacgattcagtgatgaaagccacccagcaggccaggaaaagaaacttcatcagttccaagagcaagcagccagcagggcataggaggcctgcaggaggcatcagagagagtaaagaaagttcaaaggagaaaaaactaacagtccgccaagatcttgaggacagatatgctgaacatgtggctgccacccaagcgctaccccaggacagtgggacagcagcctggaagggccgagtgttgcttcctgaaacccaaaagagacagcagttgtcggaggacacgctaaccatccatggtctccccacagagggttaccaggctctgtaccacgctgtggtggagccaatgctgtggaatccttcagggacccccaagaggtacagcctggagctgggcaaggccattaaacaaaagctctgggaggctctttgcagtcagggtgccatctctgaaggtgctcagagggaccggttccctggcaggaagcagccaggtgtccacgaggagcctgtactcaagaaatggcccaagttaaagagcaaaaaataggaacaagaactcatgggattagagtattctctgctagagatctgaaaaataaacacaactttgcaccttc

SEQ ID NO: 118926 - DNA, 1221 bp, Homo sapiens
  Payload ID: 3295
  Gene Symbol: C22orf39
  Gene Name: chromosome 22 open reading frame 39
  ENST ID: ENST00000333059
  CDS Start-End: 10-327
cgcccagacatggcggacggcagcggctggcagccgccgcgcccctgcgaggcctaccgcgccgagtggaagctctgccgcagcgccaggcacttcctacaccactactacgtccacggcgagcggccggcctgcgaacagtggcagcgcgacctggccagctgccgcgactgggaggagcgccggaacgccgaggcccagcaatccctctgtgagagcgagcgggcacgagtccgggctgcacggaagcacatcctggtgtgggccccgaggcagagcccccctccagactggcatctccctctgccacaggagaaggacgagtgacaagcatccctgccattggcctgtgcagcttcctcagtctgtttcaagttgctgttgcacagccctggggactgtgaccagcctacacagtctggtgggtccctgtgagctcttgctcacaggaacatggagcaggacattgctagccctacttgcccacccctcacctgcatgcaggataccctgacactgcgatgttctgcaggacaattgcaccgctttagagcttccaggaggccaagcattatggcaggtacttgtgagcagccaggtcaggctgggcatggtagcataggagatggcggtcctgaggtctaggcttctcaggtaaactgaagggtagccctgacctgtgtggacacacaggtgggtcataatgaggtagctaaacagttgtgccactgtgaatgtctttcctagtccttgggaaactgcctgccacgtcccaggtttggtgagcattgtgagtgctcacactctgctccactcgctcagttccactgcacatgcaggcaggtgtgccgagcaggtagggcttgctggcccctctgcaccagcaggcttcacttcttaggctcccaggtcggcccctggagactctggtttttaagaaatgcacacagctacagaacacacaaccttgcataaagagggtttgtggactcagctgaagaaatccaagtccaagacatatggaattaagcactccttccctcaaaatttcccctggtggttaatgtatcaaaagctatttcatctgatttcaaatagaagctgaaaattaagttcacacttgttagattttgtgtgtaacagtgttgtacctggacagtattagaaatttgtatgcttattctcttgttaagtgttttaaaatgtatgaaccaccaaaaa

SEQ ID NO: 118927 - DNA, 3350 bp, Homo sapiens
  Payload ID: 3295
  Gene Symbol: C22orf39
  Gene Name: chromosome 22 open reading frame 39
  Uniprot ID: Q6P5X5
  ENST ID: ENST00000399562
  CDS Start-End: 434-862
atatgtcatgcccaaccaatctcagttactttgcgagttcacctccatcctgagtggacgctcaagcaagactgctggagctgcagatctgggaggttcgctgcaccaccttgatgctcagtatgtacttttgaaaatataccggattgttgagatttgagaaaatctcataaagctgctgaaaagaactggccagagccgtgtgatttgagaggcggctgacgtaaggtagctgcgcggcccaggatgcccgcctggcccggggtgaatggcgctgtcgtcgcggtggtcgcgtaggcttcgcgccaggtctcgccccggatttaccctgcgaccccggccctccgcgcgcgccgcagccgccctcggttgctattggttgctcgtcctgtttgtcggcgcttctcgaagaagggggcgaagacgtgattgaatgtgtcggtgctcattagttcttctgtcagtcgatcacgaggtgccgttttcttcatttttcattggctggcggactgaggggcgggcttggcgcgccggtcgcccagacatggcggacggcagcggctggcagccgccgcgcccctgcgaggcctaccgcgccgagtggaagctctgccgcagcgccaggcacttcctacaccactactacgtccacggcgagcggccggcctgcgaacagtggcagcgcgacctggccagctgccgcgactgggaggagcgccggaacgccgaggcccagcaatccctctgtgagagcgagcgggcacgagtccgggctgcacggaagcacatcctggtgtgggccccgaggcagagcccccctccagactggcatctccctctgccacaggagaaggacgagtgacaagcatccctgccattggcctgtgcagcttcctcagtctgtttcaagttgctgttgcacagccctggggactgtgaccagcctacacagtctggtgggtccctgtgagctcttgctcacaggaacatggagcaggacattgctagccctacttgcccacccctcacctgcatgcaggataccctgacactgcgatgttctgcaggacaattgcaccgctttagagcttccaggaggccaagcattatggcaggtacttgtgagcagccaggtcaggctgggcatggtagcataggagatggcggtcctgaggtctaggcttctcaggtaaactgaagggtagccctgacctgtgtggacacacaggtgggtcataatgaggtagctaaacagttgtgccactgtgaatgtctttcctagtccttgggaaactgcctgccacgtcccaggtttggtgagcattgtgagtgctcacactctgctccactcgctcagttccactgcacatgcaggcaggtgtgccgagcaggtagggcttgctggcccctctgcaccagcaggcttcacttcttaggctcccaggtcggcccctggagactctggtttttaagaaatgcacacagctacagaacacacaaccttgcataaagagggtttgtggactcagctgaagaaatccaagtccaagacatatggaattaagcactccttccctcaaaatttcccctggtggttaatgtatcaaaagctatttcatctgatttcaaatagaagctgaaaattaagttcacacttgttagattttgtgtgtaacagtgttgtacctggacagtattagaaatttgtatgcttattctcttgttaagtgttttaaaatgtatgaaccaccaaaaacactatttcttgaagaggtctgtttattactaatagaatggtttctcatcctatggtggccctgttgtgtgatgctgagggctaggctgggtctgtgcccagcaccctccctgctctcttcctggacacaggcagcaagttgaatatcttttaatttgttctttggggcagaataatctatcacgttagaagggtgtccattaaagaacagtatttccctgcttgagtgtgttttctcctgtgctccctaagagcccctgtgtctgtgaacagtgggggtgggggtgggggttgtgctcacgggatcccaagagcaggagcatctaaagaggagccagcgttcccccatcatcaggggagtactgatgtgtctaaggcaaccagggtgcctccagcatggctgtggctggtttaataatgagcatttccacccagtgagggaagagaggaagactgctagagatctacaaggtttttcttactcttaaacacagggacggggcatctgaatttgcagtctgctgtaatcccagcactttgggaggccaaggtgggtggatcacttgaggtctggagtttgagaccagcctggccaacatggttgaaaccccccatctctattaaaaatacaaaaattaactgggcatggtggcacgtgcctgtgatcccagctactcgggaagctgagacaggagaattgcttgaaccccagaggcagaggttgcagtgagctgagatcgtgccactgtactccagcctgggcgacagagtgagactcttgtctcaaagataaaataataaaatgagtttgcagcctgcatgtgatgcctgggattgcagcagctgccttcaggttcctggggcagagctggagagtgcagcaaaagccagggcatgccagccagcaccccagtccatgaggggcttcccctcagtgcagccacgctccctgccacctgcttgtttagcaaggtatgcattgtgcggctgcatgctctgttaggaagcattaagtcctgcctctgtagtgtgactatcatgttttgcctcctccttcactactcaagttccacatcaacagataatctctctggacaggatgttcctgcatttgtttctatgtcaattgcttcacaacatctgagtgtccacatgttggacagggtttgaggcttataagaccacagttttgaaacagacaagttgtcttcaaagagtttctgttgtagtttgggtaaaagacagacattaaacatcaataaataggaatttaaaacggtggctggatgtggtggctcacggctgttatcccagcactttgggaggctgaggtgggaggattgcttgagcccaggagttcgagaccagcctgggcaacgtaacaagaccccatctctacaaaaaataaatgagctatgcatggtggcgtgcatttgtagttccagctacttcggaggctgagataggaggattgtttgagcccaggagtttgaggctgcagtgagccatgattgtgccccactgcacttcaacctgggtgacagagcaatatcctgtctcaaaataaataaaaataaaatggtggtaatttctg

SEQ ID NO: 118928 - DNA, 1005 bp, Homo sapiens
  Payload ID: 3295
  Gene Symbol: C22orf39
  Gene Name: chromosome 22 open reading frame 39
  ENST ID: ENST00000399568
  CDS Start-End: 5-247
agacatggcggacggcagcggctggcagccgccgcgcccctgcgaggcctaccgcgccgagtggaagctctgccgcagcgccaggcacttcctacaccactactacgtccacggcgagcggccggcctgcgaacagtggcagcgcgacctggccagctgccgcgactgggaggagcgccggaacgccgaggcccaggtgctaagtgtggtggctcacacctgtaatctcagctacttgggaggctgaggcagaagaatcacttgaggataggagtttgaggttgcagtcagctatgatcgtgccactgcactccagcctgggcaacagagcaagaccccatctctaaataaatgttttaaaaataaaaataaatgttttggataaaaccccatattaataataagtattttacattattatctggcatagactgttatatatagcatattattgttgaaatacaaaacaatatgtatccgtactgtatgtgatatagtgccattttcagtaactgctgtacacacagcaactcagatgaaactcaaggaaattcttcagagcaaaaacagccaatcttgaaaacatacatgtagcaggattccatttatgtaacattggtgaaataatgtaattatagagatggaaaacagattaaaggttaccaggggtttaggttagggatggtgagggggtggttcatacgagggagtcctgtggtgttgaaaaccatctgtcagcctgactggtggttacacagggctatacatgaagttaaaattgtgtagagttaggtacacaaaggagtacagatgtaactggggaaactgagtatgttctgtagactgtaccaatgtcaatttctgcgtcctgatgctgtgctgtagtgtataaggtgttaacattgggggaggctggggcaagggtacccaggacctccctagacaacctcctatgcaacctcctgtgaatctataattacttcaaaataaaaagttgaaaacaaa

SEQ ID NO: 118929 - DNA, 2979 bp, Homo sapiens
  Payload ID: 3295
  Gene Symbol: C22orf39
  Gene Name: chromosome 22 open reading frame 39
  ENST ID: ENST00000509549
  CDS Start-End: 4-282
gacatggcggacggcagcggctggcagccgccgcgcccctgcgaggcctaccgcgccgagtggaagctctgccgcagcgccaggcacttcctacaccactactacgtccacggcgagcggccggcctgcgaacagtggcagcgcgacctggccagctgccgcgactgggaggagcgccggaacgccgaggcccaggcaagccgattttttcagttgatattcaccctgacgggaccaagttcgcaactggaggacaagggcaggattctgggaaggttgtgatctggaatatgtctccagtcctccaggaggatgacgagaaggatgaaaatattcccaagatgctttgccagatggacaatcacttagcatgtgtgaactgtgtgcggtggtcaaacagtgggatgtatttagcttctgggggagatgacaaactgattatggtgtggaagcgggctacgtacatcggccccagcaccgtgttcggctccagtggtaagcttgccaatgtggagcagtggcggtgtgtctctatcctccggaatcattcaggcgatgtgatggatgtagcatggtctccccacgatgcctggctagcctcatgcagcgtggataacactgtcgtcatctggaatgctgtaaagttcccagaaattctagctactctgagaggtcattctggcttggtcaaagggttgacatgggaccctgttggtaaatacatagcttctcaagctgatgaccgcagcctaaaggtgtggaggacgctggactggcagttggagaccagcatcaccaagccttttgatgagtgtggaggaacgacccatgtgttgcggctcagctggtcacctgatgggcattacctggtgtctgcccatgccatgaacaactcaggccccactgcccagatcatcgaacgggagggatggaagaccaacatggactttgttgggcaccggaaagctgtgactgtcgtgaaattcaacccaaaaatcttcaaaaagaagcagaagaatgggagttctgcgaagcctagctgcccgtactgctgctgtgctgttggcagcaaggaccgctcgctttctgtctggctcacatgtctgaaacggccgctggtggtcatccatgaactgtttgacaaatccatcatggatatttcctggactctgaatgggctgggcatcttggtatgctctatggacggctctgtggcattcctcgacttctcccaggatgagcttggcgatcccctgagcgaggaggagaagagccgcattcaccagtccacctatggcaagagcctagccatcatgaccgaggcccagctctccacagccgtcattgagaaccctgagatgctcaagtaccagcgaaggcagcagcagcagcagctggaccagaagagtgctgcgaccagggagatgggctcagccacctcagtcgcaggcgttgtcaacggggagagtcttgaagatatcaggaagaatcttttgaagaaacaagttgagactcggacagcagatggccggagaagaatcacgcctctctgcatagcacagctggacactggggacttctccacggcattctttaacagcatccccctctcgggctccctggcgggcaccatgctctcttctcatagcagtccacagctactgccactggactccagtacccctaactccttcggcgcctcgaagccttgcacagagcctgtggtggctgccagtgccagacctgcaggcgattctgtcaataaagacagtatgaatgctacctctactcctgctgcattgtcaccttctgtgttaacgaccccgtccaagatcgaacccatgaaagcgtttgactcccggttcacagagcggtccaaagccacaccaggtgctcctgccctgaccagcatgactccgacagctgtggaaaggttaaaagagcagaaccttgtgaaagagctgaggccccgagacctcctggagagcagcagtgacagcgatgagaaagtccctttggctaaggcttcctcactgtccaagcgaaaacttgagcttgaggtagagacagtagagaagaagaagaaagggcggcctcggaaggactctcgtctcatgcctgtgtctctgtctgtccagtctccagctgccctaaccgcagagaaggaggccatgtgtctgtctgcaccagcacttgcactgaagctgccaattccaagcccccagagagcattcaccctccaggtcagctccgatccttccatgtacattgaggtggagaatgaagtgacagtggtggggggcgtgaagctgagccgcctgaagtgcaaccgggaagggaaggagtgggagacggtactcaccagccggatcctcactgctgcgggcagctgtgacgtggtgtgtgtcgcctgtgaaaaaaggatgctgtcagtgttctccacctgtggtcgccgtctcctctctcccatcctcctgccatccccgatctctactttgcattgcacaggctcctacgtcatggcgctcaccgctgcagccacactctctgtctgggatgttcacagacaggtggttgtggtgaaagaagagtctctacactccatcctggcaggaacctggtttctgacaagcaggactcactggctcagtgtgcagactttaggagcagcctgccatcccaggacgccatgctgtgctcaggaccgttagccataatccagggccgcacctccaactcgggaaggcaggctgcccggctcttctccgtgcctcatgtggtgcagcaagagaccaccctggcctacctagagaaccaggtggcagcagcactcaccctgcagtccagccacgagtaccgccattggctcctcgtctacgcacggtacctcgtaaacgaagggtttgaataccgacttcgagaaatatgcaaggacttactgggtccggttcactactccactggaagccagtgggagtc

SEQ ID NO: 118930 - DNA, 1523 bp, Homo sapiens
  Payload ID: 3295
  Gene Symbol: C22orf39
  Gene Name: chromosome 22 open reading frame 39
  Uniprot ID: Q6P5X5
  ENST ID: ENST00000542103
  CDS Start-End: 434-787
atatgtcatgcccaaccaatctcagttactttgcgagttcacctccatcctgagtggacgctcaagcaagactgctggagctgcagatctgggaggttcgctgcaccaccttgatgctcagtatgtacttttgaaaatataccggattgttgagatttgagaaaatctcataaagctgctgaaaagaactggccagagccgtgtgatttgagaggcggctgacgtaaggtagctgcgcggcccaggatgcccgcctggcccggggtgaatggcgctgtcgtcgcggtggtcgcgtaggcttcgcgccaggtctcgccccggatttaccctgcgaccccggccctccgcgcgcgccgcagccgccctcggttgctattggttgctcgtcctgtttgtcggcgcttctcgaagaagggggcgaagacgtgattgaatgtgtcggtgctcattagttcttctgtcagtcgatcacgaggtgccgttttcttcatttttcattggctggcggactgaggggcgggcttggcgcgccggtcgcccagacatggcggacggcagcggctggcagccgccgcgcccctgcgaggcctaccgcgccgagtggaagctctgccgcagcgccaggcacttcctacaccactactacgtccacggcgagcggccggcctgcgaacagtggcagcgcgacctggccagctgccgcgactgggaggagcgccggaacgccgaggcccaggtgctaagtgtggtggctcacacctgtaatctcagctacttgggaggctgaggcagaagaatcacttgaggataggagtttgaggttgcagtcagctatgatcgtgccactgcactccagcctgggcaacagagcaagaccccatctctaaataaatgttttaaaaataaaaataaatgttttggataaaaccccatattaataataagtattttacattattatctggcatagactgttatatatagcatattattgttgaaatacaaaacaatatgtatccgtactgtatgtgatatagtgccattttcagtaactgctgtacacacagcaactcagatgaaactcaaggaaattcttcagagcaaaaacagccaatcttgaaaacatacatgtagcaggattccatttatgtaacattggtgaaataatgtaattatagagatggaaaacagattaaaggttaccaggggtttaggttagggatggtgagggggtggttcatacgagggagtcctgtggtgttgaaaaccatctgtcagcctgactggtggttacacagggctatacatgaagttaaaattgtgtagagttaggtacacaaaggagtacagatgtaactggggaaactgagtatgttctgtagactgtaccaatgtcaatttctgcgtcctgatgctgtgctgtagtgtataaggtgttaacattgggggaggctggggcaagggtacccaggacctccctagacaacctcctatgcaacctcctgtgaatctataattacttc

SEQ ID NO: 118931 - DNA, 1977 bp, Homo sapiens
  Payload ID: 3295
  Gene Symbol: C22orf39
  Gene Name: chromosome 22 open reading frame 39
  Uniprot ID: Q6P5X5
  ENST ID: ENST00000611555
  CDS Start-End: 434-862
atatgtcatgcccaaccaatctcagttactttgcgagttcacctccatcctgagtggacgctcaagcaagactgctggagctgcagatctgggaggttcgctgcaccaccttgatgctcagtatgtacttttgaaaatataccggattgttgagatttgagaaaatctcataaagctgctgaaaagaactggccagagccgtgtgatttgagaggcggctgacgtaaggtagctgcgcggcccaggatgcccgcctggcccggggtgaatggcgctgtcgtcgcggtggtcgcgtaggcttcgcgccaggtctcgccccggatttaccctgcgaccccggccctccgcgcgcgccgcagccgccctcggttgctattggttgctcgtcctgtttgtcggcgcttctcgaagaagggggcgaagacgtgattgaatgtgtcggtgctcattagttcttctgtcagtcgatcacgaggtgccgttttcttcatttttcattggctggcggactgaggggcgggcttggcgcgccggtcgcccagacatggcggacggcagcggctggcagccgccgcgcccctgcgaggcctaccgcgccgagtggaagctctgccgcagcgccaggcacttcctacaccactactacgtccacggcgagcggccggcctgcgaacagtggcagcgcgacctggccagctgccgcgactgggaggagcgccggaacgccgaggcccagcaatccctctgtgagagcgagcgggcacgagtccgggctgcacggaagcacatcctggtgtgggccccgaggcagagcccccctccagactggcatctccctctgccacaggagaaggacgagtgacaagcatccctgccattggcctgtgcagcttcctcagtctgtttcaagttgctgttgcacagccctggggactgtgaccagcctacacagtctggtgggtccctgtgagctcttgctcacaggaacatggagcaggacattgctagccctacttgcccacccctcacctgcatgcaggataccctgacactgcgatgttctgcaggacaattgcaccgctttagagcttccaggaggccaagcattatggcaggtacttgtgagcagccaggtcaggctgggcatggtagcataggagatggcggtcctgaggtctaggcttctcaggtaaactgaagggtagccctgacctgtgtggacacacaggtgggtcataatgaggtagctaaacagttgtgccactgtgaatgtctttcctagtccttgggaaactgcctgccacgtcccaggtttggtgagcattgtgagtgctcacactctgctccactcgctcagttccactgcacatgcaggcaggtgtgccgagcaggtagggcttgctggcccctctgcaccagcaggcttcacttcttaggctcccaggtcggcccctggagactctggtttttaagaaatgcacacagctacagaacacacaaccttgcataaagagggtttgtggactcagctgaagaaatccaagtccaagacatatggaattaagcactccttccctcaaaatttcccctggtggttaatgtatcaaaagctatttcatctgatttcaaatagaagctgaaaattaagttcacacttgttagattttgtgtgtaacagtgttgtacctggacagtattagaaatttgtatgcttattctcttgttaagtgttttaaaatgtatgaaccaccaaaaacactatttcttgaagaggtctgtttattactaatagaatggtttctcatcctatggtggccctgttgtgtgatgctgagggctaggctgggtctgtgcccagcaccctccctgctctcttcctggacacaggcagcaagttgaatatcttttaatttgttctttggggcagaataatctatcacgttagaagggtgtccattaaagaacagtatttccctg

SEQ ID NO: 118932 - DNA, 1363 bp, Homo sapiens
  Payload ID: 3296
  Gene Symbol: C22orf42
  Gene Name: chromosome 22 open reading frame 42
  Uniprot ID: Q6IC83
  ENST ID: ENST00000382097
  CDS Start-End: 74-829
gtagaaggaggaggagctccgactacattctgtccttgtgcctcttggacttttttgtgtgtttaggtgcccaatggggagcaaactgacttgctgcctgggccccagcgggggcctcaactgtgactgctgcaggccagatgtgggaccctgccatgagtgtgagattcctgagactgtggcagccacagcaccagcatccaccactgcaaagcctgccaaattggatttgaaagctaagaaggcccaactcatgcagtacctcagcctcccgaagacgccgaagatgctgaagatgtccaaaggtttggacgcccgctccaagcgctggttaaaaataatatggagacggcacgggatttggcctctagaaaatataggtcccactgaagatgtgcaggcgtctgcacacggcggtgtggaggagaatatgacatcagatattgaaatacctgaggccaagcacgaccaccgtcccactgaagatgtgcaggtgtctgcacacggcggtgtggaggagaatataacgtcagatattgaaatatctgaggccaagcacgaccaccatttggtcgaagatctcagtgaaagcctatctgtctgtcttgaagacttcatgacatcggatctcagtgaaagcctatctgtctctcttgaagacttcatgacatcaggtctcagtgaaagcctatctgtctctcttgaagacctcatgacaccggagatggcaaaggagagatatgaagattacctctgctgggttaagatggcacggtctcggctcaatgaacccatcagcagccaggttctaggacttctccggctttagtgttccaagtagctgggattacagacgcctgccatcacgcccagctcaaatcattttatgaatgcatatttccatctgggtgaaaaaaaaatcacaagcctctctctcttcctactgagcacctgtgaacagtgacctgcagtttgtggctgcagccagtcctcttgcagcctggtgttcttacatttcattctgaggctcacattctcagtcaccatgcagaagaacacccgccccatcctgggtcattacagagtgggtcaatccatctgctgcatctgaagagctgggtccagcttctacagtgaatccatatatttctgtatttcctggataaggaagagcaaaggagctgagctggtggaggaagaagaactaatattaactgactccttattttgtgctagtactgtgctagttacatattttatctcatgtaattcttaccaaactgtaagggggtttcggagtgatggagacaatattgatgttatctccattttagggtgagaaaataaaggctcagaaatgtta

SEQ ID NO: 118933 - DNA, 4975 bp, Homo sapiens
  Payload ID: 3297
  Gene Symbol: C22orf46
  Gene Name: chromosome 22 open reading frame 46
  Uniprot ID: C9J442
  ENST ID: ENST00000402966
  CDS Start-End: 86-817
ggctatcctactgcagctggctgcatcagatgtgccaggcctgccctctagctcccaacaccatctgcctgatctaagctttgccatgttgttgtcactgctgggtgcctgtgctgtggtggggccattccatggccctgagtgggagccagtgcagggcctgctctcccagaatcacagctgcagggaccctcagtgctgtggcaacctgcttgtcctctgcctctttctggtctggcaggtccggcactgttggcaccaggtcaccaggacccgcttcagcacaaggaatgtcatcaaggtgccactgcagaagcgggcagtgccctccatgaggtgcgaaactgtcttcaagctgactcctgaattcttcagtcctggaaagtccaggggcctagattctcaacaatgcgcacaaaggcagagatggggataccggaggagcctccaggaatcatgggcccagaacctgctctctccacagcacccatgtccaggcccaccttcgggtgtccacacccactctgagcccatcttttgtaccacctccatttcaaacacctgtttactgcctcagaacagttcctggaaagcatggcaggtgccttggtgtctccatgatggtcagactcgccctgccttggacatgtgtcaagagatggagcagctgctgcttcactcacaggaaaggttggtgtcactggagcctgtcatcagtgtgaggtctcgccccacctccatgaccttaaccacctctcttccaaacttactttcagctgagaggctgcagttctgcccccagagagctcctgcctgatccttcccaccaaacactgagaatgtgcacttggaagtcttggcactgtcgaccagaggcctgggaaccagggggtaaaaaccagaaagcaggcagagaggatagtagagagacccaggctccaaggtgggtgaaccagacagggagcagacgggaggatgcttcagaaatccaggcatctggggagtagttcccagtagactttggaatggagggtgatgcagagactaacgtgttggagtgtgcaaaccagagactagtaataagtgaaactgatggcgagatcttgacaccagggtgggacacccaggaccggatgggagttgagagtagaaccaacattcaggaactagggaatagaaaccagagggaggctggaggtgagaatctccctgaaacccaggcacatatgggagagaaccaagaacagttaagatgtaaaattgatgcagagacccaaacacctgagtgggagaaccaggataagaatggaagtgaggatgctgtggagacccagacatttgagaagaaggacaagaaagaggctggagaggaggatggggaagagatccaggctcaaggattggggaagcaaggccagactggagatgagaatggtgaggagacccagacaccacagtgggagaaacaagatcagatgaaaggtgatgcggatgtggaaattcagatggaagaggggagaaacaaggatcaggttggaggtcaggatgctgcacaaacccaatcatgtgggagggagaacgtgggagaagtaaaaaaagagaatagtgtagagacccaggccttggattggggaaaacaggaatgtgttggaaatgggaatgttacagagatccagacaccaaggtgggagaagcatgatcaaggtggaagtaagaaagctaagaagacccaagcatctgggggagagaaccagaaacaattaagtcatgaaattcaagtggggtggggaaataagggcctgagaagagatgaagatgctaaggaaacccagatagctaccaagaagaagctcagggagataagagaaggattgggtggtgatccaggcactatggtggggaaaccggagacaagtagcaagtgaaatttatagagaatttgagatactatgttgggagaatcagaactggattggaggtgaacatagagcagaaattcaggcatcagagaagagagaccaaagaaaggatggatgtgaggatggcacaaatatcctggcacccgaggctgagatccaggaacaattaaaaggtgaaactgatgtggagactcagagcaatgagccacttagagaagaggatggtacagacattcagtcactagggaggagagaggttaaaggtgaggatgataaagacacccaggaacttgggaggaaaaatcagggtcagttaggaaatgaatttagtggaaagattcacataccaaaggggaagaatcaggaacatattagaggcgaagatggtgcacatacccagatatctgagtcagggaactggggcaaattaacaagtcaaattgatggagaaatgcattcagcagaatggaagaaagatcagcagattggaggtgagaatggggcagaaattcagatacaagggaagagaaacctgagagaagttggaggtgaggacggtgtaaagacctgggcacctgggaaagaaacccagagtcagtttagaagtgatcttggtagaaagatccttttatcagagtggaagagccagaagcagatgggaagtgagaatggaacagaaattcaggctccagtggagagaaaccagagagaacctggaggtgaggacggtgtaaagactcagagacctaagagagagaacgaggaccagttagatagtgaaattggagggagccattcaccagggaggaggaactgggagctgattggaaaggatgttgcagaaaatcaggcatcagagaagagaaaccagagagaggttggaaacgaggacggtagaatgatctggaggcttaggggaaaaaactggaggcttagagcgaagaaacagactgttaaaaagtaaagataatggaaagacccgtttatcagagtggaagaaccaggaacagggtggaggtgggaatgatgaagaaattcaaatacaggggaagagaaacctgagagggaccacagctgatgatggtacagagacccaggctcctgcaggagatgaccagggacagttaagagttgaaattgctgaagagatccaggtacaagggcaaggaaataagaatgacggtggagttgaggatgttgcagaactccaggatataggaagccagagaaagtgcacagatgaggatgttggagagcctcgagcaccaaggggaggaaacaaggatctggtcagaggagaggatgctgtgagggacagtctccaagtcgactgttctgggagtgagaggcccacaggcaggaagcacagcctaccatggcctccagccttcactggctatggatgtgggacccgggaacaggaacaggcagtggctgtgaatggtttcatctctgccccctgtcctgagatgaatcctgtcccccactggggtgaagtcttcctgctggtgggtggggagggagagcatctggccagccagggcacaacccctgccagggatcatagagtggggatcagtccagcctcccagcaggcccaacctgaatcctggagaagacgacaaagggacaaaggggtggatccagagaaggcccccagcctgactcggcagtcccaaaaccctccgtctctgacagctcccttgggcatgccctctgcctgctcctgtctcccgtgtggcccagccccggaagctgccatcattctagcgggtcctcccaccgccctcactgtcctgcccaaggggacaggcctcaagaagagcaaacgactgctcctggagtccctcatgcggaggaggattgcacacctgaagtggggtcttccccggcggatcctggagtcctatttcctgtttaacttcttaggatcttgctcattgacccttgctggggcgaggctctctggactgaacacaggccaggagctccaagcccagcaggaaaggtattgtgaggcccaaggctccccaccaggccttaagtccccagagaggttccagagggttcagcgcccagacagaaaaagctcgaaacttcctatacaagccagagctctggagaggaacagaccgcacatgtcagagcccattaagcatttccatccagcctgaaaaggccaggagagtcaggccaccagggggcgccagagaaccacaggagatccaggaagcgcttgctaggaccaagctcccagctcccaggacccccaggccggcagcggagtccaggagctggtgtggcccacaaagggtcggagagcctcccagtgagaacagtaggggcaggaaaatgatcaggtcaagggtctcccagctggcagagagggctcccagcagagtgaggacttcattctctagggcagaccacgcccactggaggaaggaatgtacatcctgggaggcctctaagctccccagactcaaatgccagcagctcacatactggagaagaggaagcctggaatctacagggtgcagaggggctgggcagcagccttcctgccattctgcagaacctgtcagcttcaaagggaggctccactctgcggtggcaaagctgggcctgacccttctggccaagatgtcctggtccccacagctcgccaagcgcaagcacttggcccctaacctgagcctgagggaacctgattctactctgcctcccaaagtgggtgatcctcgtgcaggggaggacagcatcggagatcacactgcttcacagagggatcttcagctgcaaggtcactgctgtactggggccacccttcctaagacagagagtccccagggccaggaggcacctgggaacccaaatggggctccacagaatacacgagcctccaaaaagtttagtattatgaagcatctgaatttttttctcttccagaatggctttaaaaagtagactcaggcccagagtcctcaggacatatcagaaaagctttgagagtgtcctgatccctgcaaagcctctaataaattggtcatttgggc

SEQ ID NO: 118934 - DNA, 690 bp, Homo sapiens
  Payload ID: 3298
  Gene Symbol: C3orf14
  Gene Name: chromosome 3 open reading frame 14
  Uniprot ID: Q9HBI5
  ENST ID: ENST00000232519
  CDS Start-End: 47-433
ggtgccttcccggaagggctcagaggcgggctcgctttgattaaagatgacttccttgtttgctcaagaaattcgcctttctaaaagacatgaagaaatagtatcacaaagattaatgttacttcaacaaatggagaataaattgggtgatcaacacacagaaaaggcatctcaactccaaactgttgagactgcttttaaaaggaaccttagtcttttaaaggatatagaagcagcagaaaagtcactacagaccaggattcacccacttccacggcctgaggtggtttctcttgagactcgttactgggcatcagtagaagaatatattcccaaatgggaacagtttcttttaggaagagcaccatatccttttgctgttgaaaatcaaaatgaagcagaaaataccattcaaaatgaggcacagcgataacttcttcacatgctatttcaaaaagcctgtttaataaagctgaatgttaaggtgtatgtaggttattgcaggaactttaggaattaaatatgttcatattcttcgattatctcctaagtgacagtgaagatatgagaatttactggcaagtcacatgttatcacctactactatttcaaggtcatgaatttgctttctaccaaacccatagatgtgttaaacacgaatattaaaaggtggactctttattaattaaa

SEQ ID NO: 118935 - DNA, 3525 bp, Homo sapiens
  Payload ID: 3298
  Gene Symbol: C3orf14
  Gene Name: chromosome 3 open reading frame 14
  Uniprot ID: Q9HBI5
  ENST ID: ENST00000494481
  CDS Start-End: 315-701
agaggcgggctcggtgagtggagtcggacagtgggtgggtgccctgactgcctgacggccgcgcagggccttgcaggaccgctggggaggatgttgttaacgtaaagagccaggctgatgaggaaggttcatgagtcctttgggtataagcgggagttggggcggccggagggcagatgactctgagaagggcaagcactttaaccttttaagcccaaccagatgagttgcctgcagttttggaggccttcagagcatttcactagacctctgtctgtgtcggtccagtgtctttagccaagctttgattaaagatgacttccttgtttgctcaagaaattcgcctttctaaaagacatgaagaaatagtatcacaaagattaatgttacttcaacaaatggagaataaattgggtgatcaacacacagaaaaggcatctcaactccaaactgttgagactgcttttaaaaggaaccttagtcttttaaaggatatagaagcagcagaaaagtcactacagaccaggattcacccacttccacggcctgaggtggtttctcttgagactcgttactgggcatcagtagaagaatatattcccaaatgggaacagtttcttttaggaagagcaccatatccttttgctgttgaaaatcaaaatgaagcagaaaataccattcaaaatgaggcacagcgataacttcttcacatgctatttcaaaaagcctgtttaataaagctgaatgttaaggtgtatgtaggttattgcaggaactttaggaattaaatatgttcatattcttcgattatctcctaagtgacagtgaagatatgagaatttactggcaagtcacatgttatcacctactactatttcaaggtcatgaatttgctttctaccaaacccatagatgtgttaaacacgaatattaaaaggtggactctttattaattaaattattgtcagtgttgtgagtgtgttgctttaaaaaaaaaaaaatttacaatcattctcctctaagcaggtatcttggttctggttttaagttaagttttttagaatccttactttttagggacaaggtataggatcaacatggttcttttttttttttaaaccattattgtttcttttaacaaattaaaagacaatgacacctaaactgctctagcaaaataacttatgagaaaataaattcataggattttgtccctcacagatagccaaagctctgcaagttctggagacagaaagaactgaactataaagcagtcaataagtagccagtttcaggaagactcagacttggttttgaaaaaggatgccttttagagctgggaaaggttattggattttgacttggttatttaaagattgccaaccttgtgaatgcaaataaccccactcttgtcttttcatctttaaacttccccttcccgcttccttctaatttcattattcctgaaaaaactgtcagtcagaaagcgttgggtcacaaccctaaacagctttgagattcctcagtccaccactgcttgagcacttaaaaaaaaaaaagaaaaaaaaaatatgtatatataactttccagctatagaggcagcctctgctagtaaagggtacctatgctatattacaatgaaatgttttaaatttcaaactggtttatgtttttaaaagaagacaataggaaaagctaaatacacagcaacaacaacaactatattgaaacgtccgttgtgccgataagttcctttaaactaccatcttggaaatatcctgttgagtgggtgttggtgtgggtaacaataatgttgttttcataatatgtgctggcagattagcacacttctctacagtgttaacagttgtaattaaggaataaacagcacagggtgtcagtccgatgacaatttcatctatagtgtcacaatacaaaatgtcacaaaatattagaactgttatataactataaaaagtatcagcttaaaagctaaaagcctttgaaaaaagaagacagaggaaggaagaaaaaagaaaactggcatagcaaccagaacaattttataccttctcaagaatgttctgtcatgaaaataaattgataatttttttctgttacattacagtttggtttctagccatccagttgatttagcaggagaatgcaggtttttttagcagctttgaattggtaaacagatttagatgtagtagaaaggaacatgaggaagttgtttttttttttaacatccaatctttcccagcatatgcacataagaaggtgaatgaagcaatgtgaaacttacttctctttagtcaagtgaaaaaaaggctaaacatttgttagatggtaaaatattgtgtcaagcgagtaggcaaattccaaaattacacagtggttgatacattaacatcctcaaatatttgagcatgcacttcctttgagatctgtaaattaaatcaccagtgggttagataaaaatacaaaacaaatggcaatctaaccatctcagaaaaggttcaggtttttttctccctaaaactgagaacttgctaaataatttttgaaaagcataaacgtaatacaccctgggttacgatcgagggcagaagggaaggcatttccaaggctcctgctgtagtgtttttcccatttttgttaatacctcaaaaactcccagagatgactttattcctggcccctgcagagctcccctccccacccccaccttgtagactgtaacagattgcaccacatggtgtctgtttaaaaaaaaaaaaaaaattcccatagggacctggatatcccattaatgggctttatgttcctcatggcaaattagctttacacaggaatttccaaacattgttttctgttaagaagggaggaataccatatataatgtatattttttctacaattagtaggaatcagacaaggaaaaggaaatgtcatctattcatacctttctctccaaattcagtgttctttccatatgctccattgtactccaccactcttctccatgaaaactatgaatttatggtttttttttagaaaaatggagttttcaaaatgaaagtcaaataattttttccaaagccgtttgtggactgttgcaaatgcataaatattcaaagctcattttctgcagaaacacttctggtatatgaaattattaaactgtagaatgctaaagatcagaagaagctacagtttttctttaaacttgaaaaaaaattaagaagtattaaggaaaaagcttaatactctggaaaccagacatctggtctttctcatgcgtagggagcagtgtgaatgaaagtgaagtcaaacggacagtttttttctgcattatgcacaaggtgttttaaattgtcagcttaaggtttagatgaagataatctttaactttgtttacaatttttgctattttgcattatccccctttttccataaaaaataaagtgaatatgtgtgcatatttattttgaatcaaaattaaacttattttgagatta

SEQ ID NO: 118936 - DNA, 465 bp, Homo sapiens
  Payload ID: 3298
  Gene Symbol: C3orf14
  Gene Name: chromosome 3 open reading frame 14
  ENST ID: ENST00000465142
  CDS Start-End: 278-465
cggaagggctcagaggcgggctcgtgctgatagtgggcctcacagaaaagttaccatgaaccgactttccgggattcccttggcgctgcattaattggcctcgttgcaaaaggaaaccgagaggaaggcggcaagacttggcctgcgggtgatggcaagcactttaaccttttaagcccaaccagatgagttgcctgcagttttggaggccttcagagcatttcactagacctctgtctgtgtcggtccagtgtctttagccaagctttgattaaagatgacttccttgtttgctcaagaaattcgcctttctaaaagacatgaagaaatagtatcacaaagattaatgttacttcaacaaatggagaataaattgggtgatcaacacacagaaaaggcatctcaactccaaactgttgagactgcttttaaaaggaaccttagtcttttaaaggatatagaagc

SEQ ID NO: 118937 - DNA, 631 bp, Homo sapiens
  Payload ID: 3298
  Gene Symbol: C3orf14
  Gene Name: chromosome 3 open reading frame 14
  Uniprot ID: Q9HBI5
  ENST ID: ENST00000462069
  CDS Start-End: 208-594
gtgaccacgccctggcctgcgctaaggccccggcgtcggcgcagtagctggtgccttcccggaagggctcagaggcgggctcgggcaagcactttaaccttttaagcccaaccagatgagttgcctgcagttttggaggccttcagagcatttcactagacctctgtctgtgtcggtccagtgtctttagccaagctttgattaaagatgacttccttgtttgctcaagaaattcgcctttctaaaagacatgaagaaatagtatcacaaagattaatgttacttcaacaaatggagaataaattgggtgatcaacacacagaaaaggcatctcaactccaaactgttgagactgcttttaaaaggaaccttagtcttttaaaggatatagaagcagcagaaaagtcactacagaccaggattcacccacttccacggcctgaggtggtttctcttgagactcgttactgggcatcagtagaagaatatattcccaaatgggaacagtttcttttaggaagagcaccatatccttttgctgttgaaaatcaaaatgaagcagaaaataccattcaaaatgaggcacagcgataacttcttcacatgctatttcaaaaagcctgtttaataa

SEQ ID NO: 118938 - DNA, 768 bp, Homo sapiens
  Payload ID: 3298
  Gene Symbol: C3orf14
  Gene Name: chromosome 3 open reading frame 14
  Uniprot ID: Q9HBI5
  ENST ID: ENST00000542214
  CDS Start-End: 125-511
ggcaagcactttaaccttttaagcccaaccagatgagttgcctgcagttttggaggccttcagagcatttcactagacctctgtctgtgtcggtccagtgtctttagccaagctttgattaaagatgacttccttgtttgctcaagaaattcgcctttctaaaagacatgaagaaatagtatcacaaagattaatgttacttcaacaaatggagaataaattgggtgatcaacacacagaaaaggcatctcaactccaaactgttgagactgcttttaaaaggaaccttagtcttttaaaggatatagaagcagcagaaaagtcactacagaccaggattcacccacttccacggcctgaggtggtttctcttgagactcgttactgggcatcagtagaagaatatattcccaaatgggaacagtttcttttaggaagagcaccatatccttttgctgttgaaaatcaaaatgaagcagaaaataccattcaaaatgaggcacagcgataacttcttcacatgctatttcaaaaagcctgtttaataaagctgaatgttaaggtgtatgtaggttattgcaggaactttaggaattaaatatgttcatattcttcgattatctcctaagtgacagtgaagatatgagaatttactggcaagtcacatgttatcacctactactatttcaaggtcatgaatttgctttctaccaaacccatagatgtgttaaacacgaatattaaaaggtggactctttattaattaaa

SEQ ID NO: 118939 - DNA, 4992 bp, Homo sapiens
  Payload ID: 3299
  Gene Symbol: C3orf17
  Gene Name: chromosome 3 open reading frame 17
  Uniprot ID: Q6NW34
  ENST ID: ENST00000314400
  CDS Start-End: 193-1896
aatatacagatgactgggtccttcccagtcccacgcgtttactcgatgaaggcagcctcccgccgggctcctggccccgcccgagccccaccccctgctcccttccggcccggactgggtcccatcgccccacctccggtcgctggacgtgctctcgcgtagctccgcctttcgtaagtccccccgcctcgcatgatggctgcggtgccgccgggcctggagccgtggaaccgtgtgagaatccctaaggcggggaaccgcagcgcagtgacagtgcagaaccccggcgcggcccttgacctttgcattgcagctgtaattaaagaatgccatctcgtcatactgtcgctgaagagccaaaccttagatgcagaaacagatgtgttatgtgcagtcctttacagcaatcacaacagaatgggccgccacaaaccccatttggccctcaaacaggttgagcaatgtttaaagcgtttgaaaaacatgaatttggagggctcaattcaagacctgtttgagttgttttcttccaatgaaaatcagcccttaactaccaaagtatgtgttgtccccagtcagccagtggtggagttggtgttgatgaaggttttgggagcctgcaagttgttgctccgcttgttggactgctgctgcaaaacttttcttttgactgtgaaacatctaggtttgcaagagttcattattttaaaccttgtgatggttgggctggtgagcaggttatgggttctctataaaggtgtcttaaaaaggttgattttgttatatgagcctttgtttggattgcttcaagaggtcgctaggattcaaccaatgccttacttcaaagattttacctttccttctgatatcactgaatttttaggacagccatattttgaagcctttaagaaaaaaatgcctatagcttttgcagctaaaggaataaataaattgctaaataaactgtttttaataaatgagcagtcaccaagagccagtgaagaaaccttgcttggaatttcaaaaaaagctaaacaaatgaagatcaatgtacagaataatgtggatcttggacagccagtaaagaataagagagtcttcaaagaagagtcatcagaatttgatgtgagggctttctgcaaccagctgaaacacaaagctactcaggagaccagttttgattttaaatgttctcaatccagactaaagacaaccaagtattcttctcagaaagtgataggaactcctcatgccaaaagttttgtgcaaagattccgagaggctgagtccttcacacaactttctgaagaaatccagatggcagttgtatggtgcaggagcaaaaaactcaaggctcaggccatttttctgggtaacaaacttcttaaaagcaaccggcttaaacatctggaagctcaaggtactagtttgccaaagaaactagagtgcataaaaacgtctatttgcaaccaccttcttcgtggctcaggtatcaaaacttcaaagcatcatctgagacagagaagatcacagaataaatttttacggagacaaaggaaaccacagagaaagttgcagtcgactcttttaagggaaattcagcagttctctcaagggactcggaagagtgctacagataccagtgctaagtggagactctcacactgtactgtgcatagaactgatctctaccctaacagtaagcagctcttgaatagtggagtttcaatgcctgtcatacaaactaaggagaaaatgattcatgaaaatcttagaggcatccatgaaaatgaaactgattcgtggacggtgatgcaaataaataaaaacagtacatcaggaaccattaaggagacagatgacattgatgatatttttgctttaatgggagtttagatgttcgttcatatgtgagacttttaagtgattaacaaggctagttcagtgttctaagtagaactgctaagatctggaagtaccacctggactcacagaggagctgctttagtgcagcattgcacaggagttcatttcagttcagtctacatttaaagtagcattgtgtcatttcatcaacaagtatttcttttttggcttcaactacatgtcaggtgttaatatgaaaaatctgccacagcctacccttgagaagcagatgtaattccttgagtgaggctagtaagtctctgaaaaactgaataattttatgacttactaggcaatttaataatcgtttgcaaaaaccattgtgtcttgaggtaaatgaggagcgggggtgggagatagcaaggaaacacctgaaaggtcaatttggtcttattggctccattatacataggtccgcctctgaatactaaagtttgtagctcctgacatttatgttttcttgtttatatgttggaattgatcaacaaggtttgccactgcttgtattaccagggactggttacaaccattatttctcttcatttgcttggcttatctcatattaaagtgagtttggagttctccaaaacgttttaattttatttatttgggtaccagtgattgattccaaataaacctttttacaaaaaggcaataaggtggtttatggttacatatgaaatataataggataacaggtagatgagaaagtaaaatgaaaaaatgaggttaggagatacaaagtagacccaggaatgaggctagaacatttataatttggtgttgatgctgtcatctgataggggatgttgctcgtactgttgctctgaggggagtacatcttgagtattttcaaataatgatgtgaagtttgaggtaggtatctttccaatgttctaactttactagaattaggttattaagcttctctagtgcccttaacttttgttacatagagatttaaagaaaaagaaagtagtaccttagtatgtaccgcatccttcttttcctcagccaccctatcataacagaagttatttcccttccattctttatttggctttgttctttccctgtctgccttctccattttctcagttatctctaccagtggttctcaaactttagactttttgagaatcacctggtgggttgctaaaagatgcagattagccctttcccagagactgataaacaggggccagaaacctgcatttttaacatggagcccaagtgattttgatccaggtggcccccaaatccagttatataaacactactttagcttctctcctgaagccttaagtaaactggtttaattcttaatctgtagtcagttttcatattccttttggctttctaccaagtggtagtatccatttagtgccttaaaatacagacaataccaaggagatttcattctagacaagtctagaaatggccattaacttctaagtgtccttgtgttcaatgaatatcctttacctattgggaaatagaaggtaaattagtaagagaactggtgtatagctttgtggaccatagggcttatttgctgagagttgtctatattcatgcacccagtcccctaagtagcctcttttaatacttcatttagctgattcagaaaaaaactccctgggaattaggagatttaaggttcagtcttgcttctcctacttgtggcttcactgagctagtcagtttcctcaggcttaggtttctggatttgaagtggaattttttcaagaatgaaacttttatagctgaaataaactttggagcttatctttcattggaaaaaccagggtggttcagtgagttaaggacaatatagcatggactgggctgccagtctagcatttgtttccaaattcattcatgttcttttggagtatcttcatctcctctcattttcccatcttctgccctttactattctgggaaaatggcaaaaaagcttcacatgtgtccacaaaatgacaatttgtatgtttataaggaattcagtattctgtatcagttactttttccaaataaatccaaatatttaacatttaaaaaaatgcaatctaaagtataccaaactgtaacttacctagtaaatgagattagaaactattgtcagggtcatcgtagtgaattattattattattattttttgagacagagtcttgtgctgttgcccaggctggagcacagtggtatgatctcagttcactgcaccctccacctcctgggctcaagctattctcccacctcagccgcctgagtagctgacactataggcaccaccatgccctggctaattttttaaaaactttgtgtagagatagggtttcaccatgttgcttaggctggtctcaaactcctggactcaagggatccacccactttggtctcccaaagtgctgggattacccacatcctagtaccaactttatcacttctgatggcattaggacacacaggccatttataagagcagtgtttgagacctcctgtgtgtcacttccaatcctcttggccttcatactaaagtcactgctgtggcaaccagtttcaagcagggctgaaccttgcctcttgctctggggatgtctcacttcctgcccctgggcttctcaccagctacaggaactgcctagcacttgggtatgtacaacctggaagaggtgtggggccaccccatcccctcctcaaagaaattcacaggcacagtatgaggctaaagtaacttccatcttggatgctaatctaccatgttgacttctgataaccagttcctggaatgccctctaagatttctacttttatctattaaaagaacacacacacacacacacactgtaaatcctggccttaagcaagttataggctaagttgtaaacagcattcttgcctttccctgaggaggtgacttcagtgtctcacatgttccttcatgtacccccttttctctatggcatataagccctgggtcggggggtaactgtggggatcactgcctgagacatggcttctgtgcataagtccctattaaatgtttctttctgacaaactgg

SEQ ID NO: 118940 - DNA, 4672 bp, Homo sapiens
  Payload ID: 3299
  Gene Symbol: C3orf17
  Gene Name: chromosome 3 open reading frame 17
  Uniprot ID: Q6NW34
  ENST ID: ENST00000383675
  CDS Start-End: 87-1580
ggcccggactgggtcccatcgccccacctccggtcgctggacgtgctctcgcgtagctccgcctttcgtaagtccccccgcctcgcatgatggctgcggtgccgccgggcctggagccgtggaaccgtgtgagaatccctaaggcggggaaccgcagcgcagtgacagtgcagaaccccggcgcggcccttgacctttgcattgcagctgtaattaaagaatgccatctcgtcatactgtcgctgaagagccaaaccttagatgcagaaacagatgtgttatgtgcagtcctttacagcaatcacaacagaatgggccgccacaaaccccatttggccctcaaacaggttgagcaatgtttaaagcgtttgaaaaacatgaatttggagggctcaattcaagacctgtttgagttgttttcttccaaggttctctataaaggtgtcttaaaaaggttgattttgttatatgagcctttgtttggattgcttcaagaggtcgctaggattcaaccaatgccttacttcaaagattttacctttccttctgatatcactgaatttttaggacagccatattttgaagcctttaagaaaaaaatgcctatagcttttgcagctaaaggaataaataaattgctaaataaactgtttttaataaatgagcagtcaccaagagccagtgaagaaaccttgcttggaatttcaaaaaaagctaaacaaatgaagatcaatgtacagaataatgtggatcttggacagccagtaaagaataagagagtcttcaaagaagagtcatcagaatttgatgtgagggctttctgcaaccagctgaaacacaaagctactcaggagaccagttttgattttaaatgttctcaatccagactaaagacaaccaagtattcttctcagaaagtgataggaactcctcatgccaaaagttttgtgcaaagattccgagaggctgagtccttcacacaactttctgaagaaatccagatggcagttgtatggtgcaggagcaaaaaactcaaggctcaggccatttttctgggtaacaaacttcttaaaagcaaccggcttaaacatctggaagctcaaggtactagtttgccaaagaaactagagtgcataaaaacgtctatttgcaaccaccttcttcgtggctcaggtatcaaaacttcaaagcatcatctgagacagagaagatcacagaataaatttttacggagacaaaggaaaccacagagaaagttgcagtcgactcttttaagggaaattcagcagttctctcaagggactcggaagagtgctacagataccagtgctaagtggagactctcacactgtactgtgcatagaactgatctctaccctaacagtaagcagctcttgaatagtggagtttcaatgcctgtcatacaaactaaggagaaaatgattcatgaaaatcttagaggcatccatgaaaatgaaactgattcgtggacggtgatgcaaataaataaaaacagtacatcaggaaccattaaggagacagatgacattgatgatatttttgctttaatgggagtttagatgttcgttcatatgtgagacttttaagtgattaacaaggctagttcagtgttctaagtagaactgctaagatctggaagtaccacctggactcacagaggagctgctttagtgcagcattgcacaggagttcatttcagttcagtctacatttaaagtagcattgtgtcatttcatcaacaagtatttcttttttggcttcaactacatgtcaggtgttaatatgaaaaatctgccacagcctacccttgagaagcagatgtaattccttgagtgaggctagtaagtctctgaaaaactgaataattttatgacttactaggcaatttaataatcgtttgcaaaaaccattgtgtcttgaggtaaatgaggagcgggggtgggagatagcaaggaaacacctgaaaggtcaatttggtcttattggctccattatacataggtccgcctctgaatactaaagtttgtagctcctgacatttatgttttcttgtttatatgttggaattgatcaacaaggtttgccactgcttgtattaccagggactggttacaaccattatttctcttcatttgcttggcttatctcatattaaagtgagtttggagttctccaaaacgttttaattttatttatttgggtaccagtgattgattccaaataaacctttttacaaaaaggcaataaggtggtttatggttacatatgaaatataataggataacaggtagatgagaaagtaaaatgaaaaaatgaggttaggagatacaaagtagacccaggaatgaggctagaacatttataatttggtgttgatgctgtcatctgataggggatgttgctcgtactgttgctctgaggggagtacatcttgagtattttcaaataatgatgtgaagtttgaggtaggtatctttccaatgttctaactttactagaattaggttattaagcttctctagtgcccttaacttttgttacatagagatttaaagaaaaagaaagtagtaccttagtatgtaccgcatccttcttttcctcagccaccctatcataacagaagttatttcccttccattctttatttggctttgttctttccctgtctgccttctccattttctcagttatctctaccagtggttctcaaactttagactttttgagaatcacctggtgggttgctaaaagatgcagattagccctttcccagagactgataaacaggggccagaaacctgcatttttaacatggagcccaagtgattttgatccaggtggcccccaaatccagttatataaacactactttagcttctctcctgaagccttaagtaaactggtttaattcttaatctgtagtcagttttcatattccttttggctttctaccaagtggtagtatccatttagtgccttaaaatacagacaataccaaggagatttcattctagacaagtctagaaatggccattaacttctaagtgtccttgtgttcaatgaatatcctttacctattgggaaatagaaggtaaattagtaagagaactggtgtatagctttgtggaccatagggcttatttgctgagagttgtctatattcatgcacccagtcccctaagtagcctcttttaatacttcatttagctgattcagaaaaaaactccctgggaattaggagatttaaggttcagtcttgcttctcctacttgtggcttcactgagctagtcagtttcctcaggcttaggtttctggatttgaagtggaattttttcaagaatgaaacttttatagctgaaataaactttggagcttatctttcattggaaaaaccagggtggttcagtgagttaaggacaatatagcatggactgggctgccagtctagcatttgtttccaaattcattcatgttcttttggagtatcttcatctcctctcattttcccatcttctgccctttactattctgggaaaatggcaaaaaagcttcacatgtgtccacaaaatgacaatttgtatgtttataaggaattcagtattctgtatcagttactttttccaaataaatccaaatatttaacatttaaaaaaatgcaatctaaagtataccaaactgtaacttacctagtaaatgagattagaaactattgtcagggtcatcgtagtgaattattattattattattttttgagacagagtcttgtgctgttgcccaggctggagcacagtggtatgatctcagttcactgcaccctccacctcctgggctcaagctattctcccacctcagccgcctgagtagctgacactataggcaccaccatgccctggctaattttttaaaaactttgtgtagagatagggtttcaccatgttgcttaggctggtctcaaactcctggactcaagggatccacccactttggtctcccaaagtgctgggattacccacatcctagtaccaactttatcacttctgatggcattaggacacacaggccatttataagagcagtgtttgagacctcctgtgtgtcacttccaatcctcttggccttcatactaaagtcactgctgtggcaaccagtttcaagcagggctgaaccttgcctcttgctctggggatgtctcacttcctgcccctgggcttctcaccagctacaggaactgcctagcacttgggtatgtacaacctggaagaggtgtggggccaccccatcccctcctcaaagaaattcacaggcacagtatgaggctaaagtaacttccatcttggatgctaatctaccatgttgacttctgataaccagttcctggaatgccctctaagatttctacttttatctattaaaagaacacacacacacacacacactgtaaatcctggccttaagcaagttataggctaagttgtaaacagcattcttgcctttccctgaggaggtgacttcagtgtctcacatgttccttcatgtacccccttttctctatggcatataagccctgggtcggggggtaactgtggggatcactgcctgagacatggcttctgtgcataagtccctattaaatgtttctttctgacaaa

SEQ ID NO: 118941 - DNA, 459 bp, Homo sapiens
  Payload ID: 3299
  Gene Symbol: C3orf17
  Gene Name: chromosome 3 open reading frame 17
  ENST ID: ENST00000472166
  CDS Start-End: 215-459
tttttcctgtacccgaggagcggtggacgtcacctaagcactgggactcaaactgcaatcttttcggacctctatctgcttatctgtgaaatggaacctttgcattgcagctgtaattaaagaatgccatctcgtcatactgtcgctgaagagccaaaccttagatgcagaaacagatgtgttatgtgcagtcctttacagcaatcacaacagaatgggccgccacaaaccccatttggccctcaaacaggttgagcaatgtttaaagcgtttgaaaaacatgaatttggagggctcaattcaagacctgtttgagttgttttcttccaatgaaaatcagcccttaactaccaaagtatgtgttgtccccagtcagccagtggtggagttggtgttgatgaaggttttgggagcctgcaagttgttgctccgcttgttggactgctgctgcaaaacttt

SEQ ID NO: 118942 - DNA, 1382 bp, Homo sapiens
  Payload ID: 3299
  Gene Symbol: C3orf17
  Gene Name: chromosome 3 open reading frame 17
  ENST ID: ENST00000462295
  CDS Start-End: 20-130
gtaagtccccccgcctcgcatgatggctgcggtgccgccgggcctggagccgtggaaccgtgtgagaatccctaaggcggggaaccgcagcgcagtgacagtgcagaaccccggcgcggcccttggttgagcaatgtttaaagcgtttgaaaaacatgaatttggagggctcaattcaagacctgtttgagttgttttcttccaatgaaaatcagcccttaactaccaaagtatgtgttgtccccagtcagccagtggtggagttggtgttgatgaaggttttgggagcctgcaagttgttgctccgcttgttggactgctgctgcaaaacttttcttttgactgtgaaacatctaggtttgcaagagttcattattttaaaccttgtgatggttgggctggtgagcaggttatgtcaccaagagccagtgaagaaaccttgcttggaatttcaaaaaaagctaaacaaatgaagatcaatgtacagaataatgtggatcttggacagccagtaaagaataagagagtcttcaaagaagagtcatcagaatttgatgtgagggctttctgcaaccagctgaaacacaaagctactcaggagaccagttttgattttaaatgttctcaatccagactaaagacaaccaagtattcttctcagaaagtgataggaactcctcatgccaaaagttttgtgcaaagattccgagaggctgagtccttcacacaactttctgaagaaatccagatggcagttgtatggtgcaggagcaaaaaactcaaggctcaggccatttttctgggtaacaaacttcttaaaagcaaccggcttaaacatctggaagctcaaggtactagtttgccaaagaaactagagtgcataaaaacgtctatttgcaaccaccttcttcgtggctcaggtatcaaaacttcaaagcatcatctgagacagagaagatcacagaataaatttttacggagacaaaggaaaccacagagaaagttgcagtcgactcttttaagggaaattcagcagttctctcaagggactcggaagagtgctacagataccagtgctaagtggagactctcacactgtactgtgcatagaactgatctctaccctaacagtaagcagctcttgaatagtggagtttcaatgcctgtcatacaaactaaggagaaaatgattcatgaaaatcttagaggcatccatgaaaatgaaactgattcgtggacggtgatgcaaataaataaaaacagtacatcaggaaccattaaggagacagatgacattgatgatatttttgctttaatgggagtttagatgttcgttcatatgtgagacttttaagtgattaacaaggctagttcagtgttct

SEQ ID NO: 118943 - DNA, 1817 bp, Homo sapiens
  Payload ID: 3299
  Gene Symbol: C3orf17
  Gene Name: chromosome 3 open reading frame 17
  ENST ID: ENST00000469169
  CDS Start-End: 18-128
aagtccccccgcctcgcatgatggctgcggtgccgccgggcctggagccgtggaaccgtgtgagaatccctaaggcggggaaccgcagcgcagtgacagtgcagaaccccggcgcggcccttggttgagcaatgtttaaagcgtttgaaaaacatgaatttggagggctcaattcaagacctgtttgagttgttttcttccaatcagccagtggtggagttggtgttgatgaaggttttgggagcctgcaagttgttgctccgcttgttggactgctgctgcaaaacttttcttttgactgtgaaacatctaggtttgcaagagttcattattttaaaccttgtgatggttgggctggtgagcaggttatgggttctctataaaggtgtcttaaaaaggttgattttgttatatgagcctttgtttggattgcttcaagaggtcgctaggattcaaccaatgccttacttcaaagattttacctttccttctgatatcactgaatttttaggacagccatattttgaagcctttaagaaaaaaatgcctatagcttttgcagctaaaggaataaataaattgctaaataaactgtttttaataaatgagcagtcaccaagagccagtgaagaaaccttgcttggaatttcaaaaaaagctaaacaaatgaagatcaatgtacagaataatgtggatcttggacagccagtaaagaataagagagtcttcaaagaagagtcatcagaatttgatgtgagggctttctgcaaccagctgaaacacaaagctactcaggagaccagttttgattttaaatgttctcaatccagactaaagacaaccaagtattcttctcagaaagtgataggaactcctcatgccaaaagttttgtgcaaagattccgagaggctgagtccttcacacaactttctgaagaaatccagatggcagttgtatggtgcaggagcaaaaaactcaaggctcaggccatttttctgggtaacaaacttcttaaaagcaaccggcttaaacatctggaagctcaaggtactagtttgccaaagaaactagagtgcataaaaacgtctatttgcaaccaccttcttcgtggctcaggtatcaaaacttcaaagcatcatctgagacagagaagatcacagaataaatttttacggagacaaaggaaaccacagagaaagttgcagtcgactcttttaagggaaattcagcagttctctcaagggactcggaagagtgctacagataccagtgctaagtggagactctcacactgtactgtgcatagaactgatctctaccctaacagtaagcagctcttgaatagtggagtttcaatgcctgtcatacaaactaaggagaaaatgattcatgaaaatcttagaggcatccatgaaaatgaaactgattcgtggacggtgatgcaaataaataaaaacagtacatcaggaaccattaaggagacagatgacattgatgatatttttgctttaatgggagtttagatgttcgttcatatgtgagacttttaagtgattaacaaggctagttcagtgttctaagtagaactgctaagatctggaagtaccacctggactcacagaggagctgctttagtgcagcattgcacaggagttcatttcagttcagtctacatttaaagtagcattgtgtcatttcatcaacaagtatttcttttttggcttcaactacatgtcaggtgttaatatgaaaaatctgccacagcctacccttgagaagcagatgtaattccttgagtgaggctagtaagtctctg

SEQ ID NO: 118944 - DNA, 2056 bp, Homo sapiens
  Payload ID: 3299
  Gene Symbol: C3orf17
  Gene Name: chromosome 3 open reading frame 17
  ENST ID: ENST00000473284
  CDS Start-End: 215-325
acgcggccacgtgttggtaaccaatatacagatgactgggtccttcccagtcccacgcgtttactcgatgaaggcagcctcccgccgggctcctggccccgcccgagccccaccccctgctcccttccggcccggactgggtcccatcgccccacctccggtcgctggacgtgctctcgcgtagctccgcctttcgtaagtccccccgcctcgcatgatggctgcggtgccgccgggcctggagccgtggaaccgtgtgagaatccctaaggcggggaaccgcagcgcagtgacagtgcagaaccccggcgcggcccttggttgagcaatgtttaaagcgtttgaaaaacatgaatttggagggctcaattcaagacctgtttgagttgttttcttccaatgaaaatcagcccttaactaccaaagtatgtgttgtccccagtcagccagtggtggagttggtgttgatgaaggttttgggagcctgcaagttgttgctccgcttgttggactgctgctgcaaaacttttcttttgactgtgaaacatctaggtttgcaagagttcattattttaaaccttgtgatggttgggctggtgagcaggttatgggttctctataaaggtgtcttaaaaaggttgattttgttatatgagcctttgtttggattgcttcaagaggtcgctaggattcaaccaatgccttacttcaaagattttacctttccttctgatatcactgaatttttaggacagccatattttgaagcctttaagaaaaaaatgcctatagcttttgcagctaaaggaataaataaattgctaaataaactgtttttaataaatgagcagtcaccaagagccagtgaagaaaccttgcttggaatttcaaaaaaagctaaacaaatgaagatcaatgtacagaataatgtggatcttggacagccagtaaagaataagagagtcttcaaagaagagtcatcagaatttgatgtgagggctttctgcaaccagctgaaacacaaagctactcaggagaccagttttgattttaaatgttctcaatccagactaaagacaaccaagtattcttctcagaaagtgataggaactcctcatgccaaaagttttgtgcaaagattccgagaggctgagtccttcacacaactttctgaagaaatccagatggcagttgtatggtgcaggagcaaaaaactcaaggctcaggccatttttctgggtaacaaacttcttaaaagcaaccggcttaaacatctggaagctcaaggtactagtttgccaaagaaactagagtgcataaaaacgtctatttgcaaccaccttcttcgtggctcaggtatcaaaacttcaaagcatcatctgagacagagaagatcacagaataaatttttacggagacaaaggaaaccacagagaaagttgcagtcgactcttttaagggaaattcagcagttctctcaagggactcggaagagtgctacagataccagtgctaagtggagactctcacactgtactgtgcatagaactgatctctaccctaacagtaagcagctcttgaatagtggagtttcaatgcctgtcatacaaactaaggagaaaatgattcatgaaaatcttagaggcatccatgaaaatgaaactgattcgtggacggtgatgcaaataaataaaaacagtacatcaggaaccattaaggagacagatgacattgatgatatttttgctttaatgggagtttagatgttcgttcatatgtgagacttttaagtgattaacaaggctagttcagtgttctaagtagaactgctaagatctggaagtaccacctggactcacagaggagctgctttagtgcagcattgcacaggagttcatttcagttcagtctacatttaaagtagcattgtgtcatttcatcaacaagtatttcttttttggcttcaactacatgtcaggtgttaatatgaaaaatctgccacagcctacccttgagaagcagatgtaattccttgagtgaggctagtaagtctctg

SEQ ID NO: 118945 - DNA, 520 bp, Homo sapiens
  Payload ID: 3299
  Gene Symbol: C3orf17
  Gene Name: chromosome 3 open reading frame 17
  ENST ID: ENST00000496340
  CDS Start-End: 25-369
ctttcgtaagtccccccgcctcgcatgatggctgcggtgccgccgggcctggagccgtggaaccgtgtgagaatccctaaggcggggaaccgcagcgcagtgacagtgcagaaccccggcgcggcccttgacctttgcattgcagctgtaattaaagaatgccatctcgtcatactgtcgctgaagagccaaaccttagatgcagaaacagatgtgttatgtgcagtcctttacagcaatcacaacagaatgggccgccacaaaccccatttggccctcaaacaggttgagcaatgtttaaagcgtttgaaaaacatgaatttggagggctcaattcaagacctgtttgagttgttttcttccaagtaatgaaaatcagcccttaactaccaaagtatgtgttgtccccagtcagccagtggtggagttggtgttgatgaaggttttgggagcctgcaagttgttgctccgcttgttggactgctgctgcaaaacttttcttttgactgtgaaacatcta

SEQ ID NO: 118946 - DNA, 1048 bp, Homo sapiens
  Payload ID: 3299
  Gene Symbol: C3orf17
  Gene Name: chromosome 3 open reading frame 17
  ENST ID: ENST00000461381
  CDS Start-End: 25-741
ctttcgtaagtccccccgcctcgcatgatggctgcggtgccgccgggcctggagccgtggaaccgtgtgagaatccctaaggcggggaaccgcagcgcagtgacagtgcagaaccccggcgcggcccttgacctttgcattgcagctgtaattaaagaatgccatctcgtcatactgtcgctgaagagccaaaccttagatgcagaaacagatgtgttatgtgcagtcctttacagcaatcacaacagaatgggccgccacaaaccccatttggccctcaaacaggttgagcaatgtttaaagcgtttgaaaaacatgaatttggagggctcaattcaagacctgtttgagttgttttcttccaaggttctctataaaggtgtcttaaaaaggttgattttgttatatgagcctttgtttggattgcttcaagaggtcgctaggattcaaccaatgccttacttcaaagattttacctttccttctgatatcactgaatttttaggacagccatattttgaagcctttaagaaaaaaatgcctatagcttttgcagctaaaggaataaataaattgctaaataaactgtttttaataaatgagcagtcaccaagagccagtgaagaaaccttgcttggaatttcaaaaaaagctaaacaaatgaagatcaatgtacagaataatgtggatcttggacagccagtaaagaataagagagtcttcaaaggagaccagttttgattttaaatgttctcaatccagactaaagacaaccaagtattcttctcagaaagtgataggaactcctcatgccaaaagttttgtgcaaagattccgagaggctgagtccttcacacaactttctgaagaaatccagatggcagttgtatggtgcaggagcaaaaaactcaaggctcaggccatttttctgggtaacaaacttcttaaaagcaaccggcttaaacatctggaagctcaaggtactagtttgccaaagaaactagagtgcataaaaacgtctatttgcaaccaccttcttcgtggctca

SEQ ID NO: 118947 - DNA, 1212 bp, Homo sapiens
  Payload ID: 3299
  Gene Symbol: C3orf17
  Gene Name: chromosome 3 open reading frame 17
  ENST ID: ENST00000472705
  CDS Start-End: 18-137
aagtccccccgcctcgcatgatggctgcggtgccgccgggcctggagccgtggaaccgtgtgagaatccctaaggcggggaaccgcagcgcagtgacagtgcagaaccccggcgcggcccttggagaccagttttgattttaaatgttctcaatccagactaaagacaaccaagtattcttctcagaaagtgataggaactcctcatgccaaaagttttgtgcaaagattccgagaggctgagtccttcacacaactttctgaagaaatccagatggcagttgtatggtgcaggagcaaaaaactcaaggctcaggccatttttctgggtaacaaacttcttaaaagcaaccggcttaaacatctggaagctcaaggtactagtttgccaaagaaactagagtgcataaaaacgtctatttgcaaccaccttcttcgtggctcaggtatcaaaacttcaaagcatcatctgagacagagaagatcacagaataaatttttacggagacaaaggaaaccacagagaaagttgcagtcgactcttttaagggaaattcagcagttctctcaagggactcggaagagtgctacagataccagtgctaagtggagactctcacactgtactgtgcatagaactgatctctaccctaacagtaagcagctcttgaatagtggagtttcaatgcctgtcatacaaactaaggagaaaatgattcatgaaaatcttagaggcatccatgaaaatgaaactgattcgtggacggtgatgcaaataaataaaaacagtacatcaggaaccattaaggagacagatgacattgatgatatttttgctttaatgggagtttagatgttcgttcatatgtgagacttttaagtgattaacaaggctagttcagtgttctaagtagaactgctaagatctggaagtaccacctggactcacagaggagctgctttagtgcagcattgcacaggagttcatttcagttcagtctacatttaaagtagcattgtgtcatttcatcaacaagtatttcttttttggcttcaactacatgtcaggtgttaatatgaaaaatctgccacagcctacccttgagaagcagatgtaattccttgagtgaggctagtaagtctctgaaaaactgaataattttatgacttactaggcaatttaataatcgtttgcaaaaaccattgtgtcttg

SEQ ID NO: 118948 - DNA, 578 bp, Homo sapiens
  Payload ID: 3299
  Gene Symbol: C3orf17
  Gene Name: chromosome 3 open reading frame 17
  ENST ID: ENST00000491121
  CDS Start-End: 75-185
gtcccatcgccccacctccggtcgctggacgtgctctcgcgtagctccgcctttcgtaagtccccccgcctcgcatgatggctgcggtgccgccgggcctggagccgtggaaccgtgtgagaatccctaaggcggggaaccgcagcgcagtgacagtgcagaaccccggcgcggcccttggttgagcaatgtttaaagcgtttgaaaaacatgaatttggagggctcaattcaagacctgtttgagttgttttcttccaagtaaggttctctataaaggtgtcttaaaaaggttgattttgttatatgagcctttgtttggattgcttcaagaggtcgctaggattcaaccaatgccttacttcaaagattttacctttccttctgatatcactgaatttttaggacagccatattttgaagcctttaagaaaaaaatgcctatagcttttgcagctaaaggaataaataaattgctaaataaactgtttttaataaatgagcagtcaccaagagccagtgaagaaaccttgcttggaatttcaaaaaaagctaaacaaatgaagatcaatgtacaga

SEQ ID NO: 118949 - DNA, 741 bp, Homo sapiens
  Payload ID: 3299
  Gene Symbol: C3orf17
  Gene Name: chromosome 3 open reading frame 17
  ENST ID: ENST00000494164
  CDS Start-End: 205-315
gtgttggtaaccaatatacagatgactgggtccttcccagtcccacgcgtttactcgatgaaggcagcctcccgccgggctcctggccccgcccgagccccaccccctgctcccttccggcccggactgggtcccatcgccccacctccggtcgctggacgtgctctcgcgtagctccgcctttcgtaagtccccccgcctcgcatgatggctgcggtgccgccgggcctggagccgtggaaccgtgtgagaatccctaaggcggggaaccgcagcgcagtgacagtgcagaaccccggcgcggcccttggttgagcaatgtttaaagcgtttgaaaaacatgaatttggagggctcaattcaagacctgtttgagttgttttcttccaaggttctctataaaggtgtcttaaaaaggttgattttgttatatgagcctttgtttggattgcttcaagaggtcgctaggattcaaccaatgccttacttcaaagattttacctttccttctgatatcactgaatttttaggacagccatattttgaagcctttaagaaaaaaatgcctatagcttttgcagctaaaggaataaataaattgctaaataaactgtttttaataaatgagcagtcaccaagagccagtgaagaaaccttgcttggaatttcaaaaaaagctaaacaaatgaagatcaatgtacagaataatgtggatcttggacagccagtaaagaataagag

SEQ ID NO: 118950 - DNA, 947 bp, Homo sapiens
  Payload ID: 3299
  Gene Symbol: C3orf17
  Gene Name: chromosome 3 open reading frame 17
  ENST ID: ENST00000460410
  CDS Start-End: 186-296
agatgactgggtccttcccagtcccacgcgtttactcgatgaaggcagcctcccgccgggctcctggccccgcccgagccccaccccctgctcccttccggcccggactgggtcccatcgccccacctccggtcgctggacgtgctctcgcgtagctccgcctttcgtaagtccccccgcctcgcatgatggctgcggtgccgccgggcctggagccgtggaaccgtgtgagaatccctaaggcggggaaccgcagcgcagtgacagtgcagaaccccggcgcggcccttggttgagcaatgtttaaagcgtttgaaaaacatgaatttggagggctcaattcaagacctgtttgagttgttttcttccaagtaatgaaaatcagcccttaactaccaaagtatgtgttgtccccagtcagccagtggtggagttggtgttgatgaaggttttgggagcctgcaagttgttgctccgcttgttggactgctgctgcaaaacttttcttttgactgtgaaacatctaggtttgcaagagttcattattttaaaccttgtgatggttgggctggtgagcaggttatgggttctctataaaggtgtcttaaaaaggttgattttgttatatgagcctttgtttggattgcttcaagaggtcgctaggattcaaccaatgccttacttcaaagattttacctttccttctgatatcactgaatttttaggacagccatattttgaagcctttaagaaaaaaatgcctatagcttttgcagctaaaggaataaataaattgctaaataaactgtttttaataaatgagcagtcaccaagagccagtgaagaaaccttgcttggaatttcaaaaaaagctaaacaaatgaagatcaatgtacagaataatgtggatcttggacagccagtaaagaataagagagtcttcaaag

SEQ ID NO: 118951 - DNA, 2179 bp, Homo sapiens
  Payload ID: 3299
  Gene Symbol: C3orf17
  Gene Name: chromosome 3 open reading frame 17
  ENST ID: ENST00000472637
  CDS Start-End: 8-118
gcctcgcatgatggctgcggtgccgccgggcctggagccgtggaaccgtgtgagaatccctaaggcggggaaccgcagcgcagtgacagtgcagaaccccggcgcggcccttggttgagcaatgtttaaagcgtttgaaaaacatgaatttggagggctcaattcaagacctgtttgagttgttttcttccaagtaatgaaaatcagcccttaactaccaaagtatgtgttgtccccagtcagccagtggtggagttggtgttgatgaaggttttgggagcctgcaagttgttgctccgcttgttggactgctgctgcaaaacttttcttttgactgtgaaacatctaggtttgcaagagttcattattttaaaccttgtgatggttgggctggtgagcaggttatgggttctctataaaggtgtcttaaaaaggttgattttgttatatgagcctttgtttggattgcttcaagaggtcgctaggattcaaccaatgccttacttcaaagattttacctttccttctgatatcactgaatttttaggacagccatattttgaagcctttaagaaaaaaatgcctatagcttttgcagctaaaggaataaataaattgctaaataaactgtttttaataaatgagcagtcaccaagagccagtgaagaaaccttgcttggaatttcaaaaaaagctaaacaaatgaagatcaatgtacagaataatgtggatcttggacagccagtaaagaataagagagtcttcaaagaagagtcatcagaatttgatgtgagggctttctgcaaccagctgaaacacaaagctactcaggagaccagttttgattttaaatgttctcaatccagactaaagacaaccaagtattcttctcagaaagtgataggaactcctcatgccaaaagttttgtgcaaagattccgagaggctgagtccttcacacaactttctgaagaaatccagatggcagttgtatggtgcaggagcaaaaaactcaaggctcaggccatttttctgggtaacaaacttcttaaaagcaaccggcttaaacatctggaagctcaaggtactagtttgccaaagaaactagagtgcataaaaacgtctatttgcaaccaccttcttcgtggctcaggtatcaaaacttcaaagcatcatctgagacagagaagatcacagaataaatttttacggagacaaaggaaaccacagagaaagttgcagtcgactcttttaagggaaattcagcagttctctcaagggactcggaagagtgctacagataccagtgctaagtggagactctcacactgtactgtgcatagaactgatctctaccctaacagtaagcagctcttgaatagtggagtttcaatgcctgtcatacaaactaaggagaaaatgattcatgaaaatcttagaggcatccatgaaaatgaaactgattcgtggacggtgatgcaaataaataaaaacagtacatcaggaaccattaaggagacagatgacattgatgatatttttgctttaatgggagtttagatgttcgttcatatgtgagacttttaagtgattaacaaggctagttcagtgttctaagtagaactgctaagatctggaagtaccacctggactcacagaggagctgctttagtgcagcattgcacaggagttcatttcagttcagtctacatttaaagtagcattgtgtcatttcatcaacaagtatttcttttttggcttcaactacatgtcaggtgttaatatgaaaaatctgccacagcctacccttgagaagcagatgtaattccttgagtgaggctagtaagtctctgaaaaactgaataattttatgacttactaggcaatttaataatcgtttgcaaaaaccattgtgtcttgaggtaaatgaggagcgggggtgggagatagcaaggaaacacctgaaaggtcaatttggtcttattggctccattatacataggtccgcctctgaatactaaagtttgtagctcctgacatttatgttttcttgtttatatgttggaattgatcaacaaggtttgccactgcttgtattaccagggactggttacaaccattatttctcttcatttgcttggcttatctcatattaaagtgagtttggagttctccaaaa

SEQ ID NO: 118952 - DNA, 751 bp, Homo sapiens
  Payload ID: 3299
  Gene Symbol: C3orf17
  Gene Name: chromosome 3 open reading frame 17
  ENST ID: ENST00000496206
  CDS Start-End: 1-342
atggctgcggtgccgccgggcctggagccgtggaaccgtgtgagaatccctaaggcggggaaccgcagcgcagtgacagtgcagaaccccggcgcggcccttgacctttgcattgcagctgtaattaaagaatgccatctcgtcatactgtcgctgaagagccaaaccttagatgcagaaacagatgtgttatgtgcagtcctttacagcaatcacaacagaatgggccgccacaaaccccatttggccctcaaacaggttgagcaatgtttaaagcgtttgaaaaacatgaatttggagggctcaattcaagacctgtttgagttgttttcttccaagtaaggttctctataaaggtgtcttaaaaaggttgattttgttatatgagcctttgtttggattgcttcaagaggtcgctaggattcaaccaatgccttacttcaaagattttacctttccttctgatatcactgaatttttaggacagccatattttgaagcctttaagaaaaaaatgcctatagcttttgcagctaaaggaataaataaattgctaaataaactgtttttaataaatgagcagtcaccaagagccagtgaagaaaccttgcttggaatttcaaaaaaagctaaacaaatgaagatcaatgtacagaataatgtggatcttggacagccagtaaagaataagagagtcttcaaagaagagtcatcagaatttgatgtgagggctttctgcaaccagctgaaa

SEQ ID NO: 118953 - DNA, 1576 bp, Homo sapiens
  Payload ID: 3299
  Gene Symbol: C3orf17
  Gene Name: chromosome 3 open reading frame 17
  ENST ID: ENST00000489848
  CDS Start-End: 24-134
tttcgtaagtccccccgcctcgcatgatggctgcggtgccgccgggcctggagccgtggaaccgtgtgagaatccctaaggcggggaaccgcagcgcagtgacagtgcagaaccccggcgcggcccttggttgagcaatgtttaaagcgtttgaaaaacatgaatttggagggctcaattcaagacctgtttgagttgttttcttccaaggttctctataaaggtgtcttaaaaaggttgattttgttatatgagcctttgtttggattgcttcaagaggtcgctaggattcaaccaatgccttacttcaaagattttacctttccttctgatatcactgaatttttaggacagccatattttgaagcctttaagaaaaaaatgcctatagcttttgcagctaaaggaataaataaattgctaaataaactgtttttaataaatgagcagtcaccaagagccagtgaagaaaccttgcttggaatttcaaaaaaagctaaacaaatgaagatcaatgtacagaataatgtggatcttggacagccagtaaagaataagagagtcttcaaagaagagtcatcagaatttgatgtgagggctttctgcaaccagctgaaacacaaagctactcaggagaccagttttgattttaaatgttctcaatccagactaaagacaaccaagtattcttctcagaaagtgataggaactcctcatgccaaaagttttgtgcaaagattccgagaggctgagtccttcacacaactttctgaagaaatccagatggcagttgtatggtgcaggagcaaaaaactcaaggctcaggccatttttctgggtaacaaacttcttaaaagcaaccggcttaaacatctggaagctcaaggtactagtttgccaaagaaactagagtgcataaaaacgtctatttgcaaccaccttcttcgtggctcaggtatcaaaacttcaaagcatcatctgagacagagaagatcacagaataaatttttacggagacaaaggaaaccacagagaaagttgcagtcgactcttttaagggaaattcagcagttctctcaagggactcggaagagtgctacagataccagtgctaagtggagactctcacactgtactgtgcatagaactgatctctaccctaacagtaagcagctcttgaatagtggagtttcaatgcctgtcatacaaactaaggagaaaatgattcatgaaaatcttagaggcatccatgaaaatgaaactgattcgtggacggtgatgcaaataaataaaaacagtacatcaggaaccattaaggagacagatgacattgatgatatttttgctttaatgggagtttagatgttcgttcatatgtgagacttttaagtgattaacaaggctagttcagtgttctaagtagaactgctaagatctggaagtaccacctggactcacagaggagctgctttagtgcagcattgcacaggagttcatttcagttcagtctacatttaaagtagcattgtgtcatttcatcaacaagtatttcttttttggcttcaactacatgtca

SEQ ID NO: 118954 - DNA, 545 bp, Homo sapiens
  Payload ID: 3299
  Gene Symbol: C3orf17
  Gene Name: chromosome 3 open reading frame 17
  ENST ID: ENST00000470663
  CDS Start-End: 35-145
gtagctccgcctttcgtaagtccccccgcctcgcatgatggctgcggtgccgccgggcctggagccgtggaaccgtgtgagaatccctaaggcggggaaccgcagcgcagtgacagtgcagaaccccggcgcggcccttggttgagcaatgtttaaagcgtttgaaaaacatgaatttggagggctcaattcaagacctgtttgagttgttttcttccaatcagccagtggtggagttggtgttgatgaaggttttgggagcctgcaagttgttgctccgcttgttggactgctgctgcaaaacttttcttttgactgtgaaacatctaggtttgcaagagttcattattttaaaccttgtgatggttgggctggtgagcaggttatggtatgtacatacctctgacatccttcatttctttctcatctcctttcagcctaggtttcttattagtagttttcaaacttattttcttatggggttatggaaggtgcaggtattctctttcttggtttgatcagagttttttgagggtagattggga

SEQ ID NO: 118955 - DNA, 1512 bp, Homo sapiens
  Payload ID: 3299
  Gene Symbol: C3orf17
  Gene Name: chromosome 3 open reading frame 17
  ENST ID: ENST00000469809
  CDS Start-End: 12-122
ccccgcctcgcatgatggctgcggtgccgccgggcctggagccgtggaaccgtgtgagaatccctaaggcggggaaccgcagcgcagtgacagtgcagaaccccggcgcggcccttggttgagcaatgtttaaagcgtttgaaaaacatgaatttggagggctcaattcaagacctgtttgagttgttttcttccaagtaagagaccagttttgattttaaatgttctcaatccagactaaagacaaccaagtattcttctcagaaagtgataggaactcctcatgccaaaagttttgtgcaaagattccgagaggctgagtccttcacacaactttctgaagaaatccagatggcagttgtatggtgcaggagcaaaaaactcaaggctcaggccatttttctgggtaacaaacttcttaaaagcaaccggcttaaacatctggaagctcaaggtactagtttgccaaagaaactagagtgcataaaaacgtctatttgcaaccaccttcttcgtggctcaggtatcaaaacttcaaagcatcatctgagacagagaagatcacagaataaatttttacggagacaaaggaaaccacagagaaagttgcagtcgactcttttaagggaaattcagcagttctctcaagggactcggaagagtgctacagataccagtgctaagtggagactctcacactgtactgtgcatagaactgatctctaccctaacagtaagcagctcttgaatagtggagtttcaatgcctgtcatacaaactaaggagaaaatgattcatgaaaatcttagaggcatccatgaaaatgaaactgattcgtggacggtgatgcaaataaataaaaacagtacatcaggaaccattaaggagacagatgacattgatgatatttttgctttaatgggagtttagatgttcgttcatatgtgagacttttaagtgattaacaaggctagttcagtgttctaagtagaactgctaagatctggaagtaccacctggactcacagaggagctgctttagtgcagcattgcacaggagttcatttcagttcagtctacatttaaagtagcattgtgtcatttcatcaacaagtatttcttttttggcttcaactacatgtcaggtgttaatatgaaaaatctgccacagcctacccttgagaagcagatgtaattccttgagtgaggctagtaagtctctgaaaaactgaataattttatgacttactaggcaatttaataatcgtttgcaaaaaccattgtgtcttgaggtaaatgaggagcgggggtgggagatagcaaggaaacacctgaaaggtcaatttggtcttattggctccattatacataggtccgcctctgaatactaaagtttgtagctcctgacatttatgttttcttgtttatatgttggaattgatcaacaaggtttgccactgcttgtattaccagggactggttacaaccattatttctcttcatttgcttggc

SEQ ID NO: 118956 - DNA, 2655 bp, Homo sapiens
  Payload ID: 3300
  Gene Symbol: C3orf18
  Gene Name: chromosome 3 open reading frame 18
  Uniprot ID: Q9UK00
  ENST ID: ENST00000357203
  CDS Start-End: 541-1029
aggcgctgtagcttcggggatcccccgaggctgctcggcccggccccacctccgccgtgggtcccggccctacccaccctagctcaggccggcagagccagcgctcgcggatgcggctggtgcgcagtagcgggcctggccagcggctcggggcttgcagggagggcggatctcgggtcggacccgcagccccagacgccgggcttgggggttccccccgccccggcctcctgccagtcactaccacccctagcctctccaactgagctcggcgccgggagaggattaagtttgatcactatgatcatctcacccacagacagaggatgcagggcttcatttttgttcccaaaaacaggggcaccgtagatacgtaaacacccaggaaggcagggggctccctttatccaaggaggtggctgtgcaggtggccaccacaggtggcaggaaccacaggctggggcactccggagtcaggagtgagtgggcaggttgactggcatcaggcagcctctcagccagggccctctccgcatcagcatgaactccaggaccgcatctgctaggggctggttcagcagccgcccacccacctctgagtctgacctggaacctgccacagatgggccagcctccgagaccactaccctcagcccagaggccaccacctttaatgacaccagaatccctgatgcagctggtggcacggccggcgtgggtaccatgcttctgtcctttgggatcatcacggtgataggcctggctgtggccttggttttgtacatcaggaagaagaagaggctggagaagctacgccaccagctcatgcccatgtacaacttcgaccccacggaggaacaagatgagttggagcaggagctgctggagcatgggcgggacgccgcctctgtacaggctgctacttctgtgcaggccatgcagggcaagactactctgccctcccagggcccactgcagagacccagccggctggtgtttaccgatgtggccaatgccatccatgcgtgagtggcctgggacaagcctggacttctgatagagacccatcacggtgcctacagagctccccactccctgattgtcaagacctactctgaagatcttccctgccaagacacaagagggctgagccaggtcctagctgttctccagacccacctgctgactttagactctaagagagggccctagccaggctggacttctgaccactgacttctcctgacctgagggccctggcacagagggcatccctcatgctgagaaggtcaagagcctctgctggcttcctcatcccctgtccagatccctcacatcagggtctgccccgctaatgtggaggaaatgagggagatacggagtgggagggattgggggaggaaaggggaggtttccctctgttagggagagacctgttttttggaatctggagcctcctctggggtggggagaggaaaccacccaagttatagggacagggtagggcagcatctgttatgggccctgagaagcccagagatggagctgaaactgtccagtatgcaaggatgccaggagaagggcaattcacacccagggtccatccatactacggagggtccaggaggtctcccagccacccatccttggcaaccagatgttactggggccaagctaggatgggagctgagggggaaggaagtaggggaatggaagtggaaggatgcagcccccccagacctgccgagaggcctcatgcatgtgcatgagtgtgcccatgggcagacatgtgcctgtcccagcacagcgggcagaatgagattgtccacactggccccaccctccaagtcgacctctaccccatggtatgtagtggagcatcagggtaggctatcttctctgccttcaatcttcagggactgcagggaagagggaagcacgcacagcacggttcctctctccactgcattgtttcactgggctcacctgcttctgaaaacggctccctgtcttgggctctaatgaggatctggggttgggagaggctgttggtctgagggcagtaatcacaggctgcaggctagagggggcagttatgactgcctgaaagtgggtgagggattgcacttcagaaaaacatctaaaaaacttagtctatgtttgaattccccacctccatcccatctatgggaagagccgttcagtgtttagagagtggggagatgggtccctgcacttggcctctccataagccttggagggtcagggctgataccaggggtcctggcaagccattgggcagagacagaccacaagagcagggcatttttttacgctgggcatacatatgcacacaagcatgcacagaggcatgtcccgtgcccagcctctccaccgtcactgtccgctgctggctggaggggatgcaggggtagtgtatgcagaccttccactgggcaaatgccatgtgtcaggagggaaaggcctaggaagcccccatggggaaggttctggatttattccctcctctaaatgctataaatacgttagcacttgagtcgactggaggctgccaggaattcaggatgcatacagctgtaatttaacccagagcagctccacgtgagagcattaaagatgtaatgaagatgttta

SEQ ID NO: 118957 - DNA, 2486 bp, Homo sapiens
  Payload ID: 3300
  Gene Symbol: C3orf18
  Gene Name: chromosome 3 open reading frame 18
  Uniprot ID: Q9UK00
  ENST ID: ENST00000426034
  CDS Start-End: 366-854
ggccggcagagccagcgctcgcggatgcggctggtgcgcagtagcgggcctggccagcggctcggggcttgcagggagggcggatctcgggtcggacccgcagccccagacgccgggcttgggggttccccccgccccggcctcctgccagtcactaccacccctagcctctccaactgagctcggcgccgggagaggattaacacccaggaaggcagggggctccctttatccaaggaggtggctgtgcaggtggccaccacaggtggcaggaaccacaggctggggcactccggagtcaggagtgagtgggcaggttgactggcatcaggcagcctctcagccagggccctctccgcatcagcatgaactccaggaccgcatctgctaggggctggttcagcagccgcccacccacctctgagtctgacctggaacctgccacagatgggccagcctccgagaccactaccctcagcccagaggccaccacctttaatgacaccagaatccctgatgcagctggtggcacggccggcgtgggtaccatgcttctgtcctttgggatcatcacggtgataggcctggctgtggccttggttttgtacatcaggaagaagaagaggctggagaagctacgccaccagctcatgcccatgtacaacttcgaccccacggaggaacaagatgagttggagcaggagctgctggagcatgggcgggacgccgcctctgtacaggctgctacttctgtgcaggccatgcagggcaagactactctgccctcccagggcccactgcagagacccagccggctggtgtttaccgatgtggccaatgccatccatgcgtgagtggcctgggacaagcctggacttctgatagagacccatcacggtgcctacagagctccccactccctgattgtcaagacctactctgaagatcttccctgccaagacacaagagggctgagccaggtcctagctgttctccagacccacctgctgactttagactctaagagagggccctagccaggctggacttctgaccactgacttctcctgacctgagggccctggcacagagggcatccctcatgctgagaaggtcaagagcctctgctggcttcctcatcccctgtccagatccctcacatcagggtctgccccgctaatgtggaggaaatgagggagatacggagtgggagggattgggggaggaaaggggaggtttccctctgttagggagagacctgttttttggaatctggagcctcctctggggtggggagaggaaaccacccaagttatagggacagggtagggcagcatctgttatgggccctgagaagcccagagatggagctgaaactgtccagtatgcaaggatgccaggagaagggcaattcacacccagggtccatccatactacggagggtccaggaggtctcccagccacccatccttggcaaccagatgttactggggccaagctaggatgggagctgagggggaaggaagtaggggaatggaagtggaaggatgcagcccccccagacctgccgagaggcctcatgcatgtgcatgagtgtgcccatgggcagacatgtgcctgtcccagcacagcgggcagaatgagattgtccacactggccccaccctccaagtcgacctctaccccatggtatgtagtggagcatcagggtaggctatcttctctgccttcaatcttcagggactgcagggaagagggaagcacgcacagcacggttcctctctccactgcattgtttcactgggctcacctgcttctgaaaacggctccctgtcttgggctctaatgaggatctggggttgggagaggctgttggtctgagggcagtaatcacaggctgcaggctagagggggcagttatgactgcctgaaagtgggtgagggattgcacttcagaaaaacatctaaaaaacttagtctatgtttgaattccccacctccatcccatctatgggaagagccgttcagtgtttagagagtggggagatgggtccctgcacttggcctctccataagccttggagggtcagggctgataccaggggtcctggcaagccattgggcagagacagaccacaagagcagggcatttttttacgctgggcatacatatgcacacaagcatgcacagaggcatgtcccgtgcccagcctctccaccgtcactgtccgctgctggctggaggggatgcaggggtagtgtatgcagaccttccactgggcaaatgccatgtgtcaggagggaaaggcctaggaagcccccatggggaaggttctggatttattccctcctctaaatgctataaatacgttagcacttgagtcgactggaggctgccaggaattcaggatgcatacagctgtaatttaacccagagcagctccacgtgagagcattaaagatgtaatgaagatgtttacatgga

SEQ ID NO: 118958 - DNA, 551 bp, Homo sapiens
  Payload ID: 3300
  Gene Symbol: C3orf18
  Gene Name: chromosome 3 open reading frame 18
  ENST ID: ENST00000422619
  CDS Start-End: 87-419
aaaaaaagaggcatgaaggtgaagggggagtggtgtatgtgtcattaggacggggacccacgggtctcttgttcatcagcctcagcatgtccccatccagaagggctgctgggttcctcagggcctcctctccttgccatttgatgctgctccttctcttgcaggttttgtacatcaggaagaagaagaggctggagaagctacgccaccagctcatgcccatgtacaacttcgaccccacggaggaacaagatgagttggagcaggagctgctggagcatgggcgggacgccgcctctgtacaggctgctacttctgtgcaggccatgcagggcaagactactctgccctcccagggcccactgcagagacccagccggctggtgtttaccgatgtggccaatgccatccatgcgtgagtggcctgggacaagcctggacttctgatagagacccatcacggtgcctacagagctccccactccctgattgtcaagacctactctgaagatcttccctgccaagacacaagagggctgagccaggtccta

SEQ ID NO: 118959 - DNA, 1520 bp, Homo sapiens
  Payload ID: 3300
  Gene Symbol: C3orf18
  Gene Name: chromosome 3 open reading frame 18
  ENST ID: ENST00000430746
  CDS Start-End: 381-695
acccaccctagctcaggccggcagagccagcgctcgcggatgcggctggtgcgcagtagcgggcctggccagcggctcggggcttgcagggagggcggatctcgggtcggacccgcagccccagacgccgggcttgggggttccccccgccccggcctcctgccagtcactaccacccctagcctctccaactgagctcggcgccgggagaggattaacacccaggaaggcagggggctccctttatccaaggaggtggctgtgcaggtggccaccacaggtggcaggaaccacaggctggggcactccggagtcaggagtgagtgggcaggttgactggcatcaggcagcctctcagccagggccctctccgcatcagcatgaactccaggaccgcatctgctaggggctggttcagcagccgcccacccacctctgagtctgacctggaacctgccacagatgggccagcctccgagaccactaccctcagcccagaggccaccacctttaatgacaccagaatccctgatgcagctggtggcacggccggcgtgggtaccatgcttctgtcctttgggatcatcacggtgataggcctggctgtggccttgagacggggtgtcagtatgttgcccaggctggacttgaactcctgggctcaagagatcctcctgcctcagcctcttgagtaactgggactacaggcatgtgctaccttaccgggtccctttactttttgcctgcatgtggctttgagcctgggaagagttgaggggagggaatgtgctgaagttttccctttcttcttcagccctggggagccacaggttttgtacatcaggaagaagaagaggctggagaagctacgccaccagctcatgcccatgtacaacttcgaccccacggaggaacaagatgagttggagcaggagctgctggagcatgggcgggacgccgcctctgtacaggctgctacttctgtgcaggccatgcagggcaagactactctgccctcccagggcccactgcagagacccagccggctggtgtttaccgatgtggccaatgccatccatgcgtgagtggcctgggacaagcctggacttctgatagagacccatcacggtgcctacagagctccccactccctgattgtcaagacctactctgaagatcttccctgccaagacacaagagggctgagccaggtcctagctgttctccagacccacctgctgactttagactctaagagagggccctagccaggctggacttctgaccactgacttctcctgacctgagggccctggcacagagggcatccctcatgctgagaaggtcaagagcctctgctggcttcctcatcccctgtccagatccctcacatcagggtctgccccgctaatgtggaggaaatgagggagatacggagtgggagggattgggggaggaaaggggaggtttccctctgttagggagagacctgttttttggaatctggagcctcctctggg

SEQ ID NO: 118960 - DNA, 2365 bp, Homo sapiens
  Payload ID: 3300
  Gene Symbol: C3orf18
  Gene Name: chromosome 3 open reading frame 18
  Uniprot ID: Q9UK00
  ENST ID: ENST00000449241
  CDS Start-End: 252-740
gaggtcacaagctctggtgccccaaaatggctctggtcctcagatatagttggttgccaccctgggagtgagaggaaccaggaaagcagcacccaggaaggcagggggctccctttatccaaggaggtggctgtgcaggtggccaccacaggtggcaggaaccacaggctggggcactccggagtcaggagtgagtgggcaggttgactggcatcaggcagcctctcagccagggccctctccgcatcagcatgaactccaggaccgcatctgctaggggctggttcagcagccgcccacccacctctgagtctgacctggaacctgccacagatgggccagcctccgagaccactaccctcagcccagaggccaccacctttaatgacaccagaatccctgatgcagctggtggcacggccggcgtgggtaccatgcttctgtcctttgggatcatcacggtgataggcctggctgtggccttggttttgtacatcaggaagaagaagaggctggagaagctacgccaccagctcatgcccatgtacaacttcgaccccacggaggaacaagatgagttggagcaggagctgctggagcatgggcgggacgccgcctctgtacaggctgctacttctgtgcaggccatgcagggcaagactactctgccctcccagggcccactgcagagacccagccggctggtgtttaccgatgtggccaatgccatccatgcgtgagtggcctgggacaagcctggacttctgatagagacccatcacggtgcctacagagctccccactccctgattgtcaagacctactctgaagatcttccctgccaagacacaagagggctgagccaggtcctagctgttctccagacccacctgctgactttagactctaagagagggccctagccaggctggacttctgaccactgacttctcctgacctgagggccctggcacagagggcatccctcatgctgagaaggtcaagagcctctgctggcttcctcatcccctgtccagatccctcacatcagggtctgccccgctaatgtggaggaaatgagggagatacggagtgggagggattgggggaggaaaggggaggtttccctctgttagggagagacctgttttttggaatctggagcctcctctggggtggggagaggaaaccacccaagttatagggacagggtagggcagcatctgttatgggccctgagaagcccagagatggagctgaaactgtccagtatgcaaggatgccaggagaagggcaattcacacccagggtccatccatactacggagggtccaggaggtctcccagccacccatccttggcaaccagatgttactggggccaagctaggatgggagctgagggggaaggaagtaggggaatggaagtggaaggatgcagcccccccagacctgccgagaggcctcatgcatgtgcatgagtgtgcccatgggcagacatgtgcctgtcccagcacagcgggcagaatgagattgtccacactggccccaccctccaagtcgacctctaccccatggtatgtagtggagcatcagggtaggctatcttctctgccttcaatcttcagggactgcagggaagagggaagcacgcacagcacggttcctctctccactgcattgtttcactgggctcacctgcttctgaaaacggctccctgtcttgggctctaatgaggatctggggttgggagaggctgttggtctgagggcagtaatcacaggctgcaggctagagggggcagttatgactgcctgaaagtgggtgagggattgcacttcagaaaaacatctaaaaaacttagtctatgtttgaattccccacctccatcccatctatgggaagagccgttcagtgtttagagagtggggagatgggtccctgcacttggcctctccataagccttggagggtcagggctgataccaggggtcctggcaagccattgggcagagacagaccacaagagcagggcatttttttacgctgggcatacatatgcacacaagcatgcacagaggcatgtcccgtgcccagcctctccaccgtcactgtccgctgctggctggaggggatgcaggggtagtgtatgcagaccttccactgggcaaatgccatgtgtcaggagggaaaggcctaggaagcccccatggggaaggttctggatttattccctcctctaaatgctataaatacgttagcacttgagtcgactggaggctgccaggaattcaggatgcatacagctgtaatttaacccagagcagctccacgtgagagcattaaagatgtaatgaagatgttt

SEQ ID NO: 118961 - DNA, 1490 bp, Homo sapiens
  Payload ID: 3300
  Gene Symbol: C3orf18
  Gene Name: chromosome 3 open reading frame 18
  Uniprot ID: Q9UK00
  ENST ID: ENST00000441239
  CDS Start-End: 216-644
accctagctcaggccggcagagccagcgctcgcggatgcggctggtgcgcagtagcgggcctggccagcggctcggggcttgcagggagggcggatctcgggtcggacccgcagccccagacgccgggcttgggggttccccccgccccggcctcctgccagtcactaccacccctagcctctccaactgagctcggcgccgggagaggattaacatgaactccaggaccgcatctgctaggggctggttcagcagccgcccacccacctctgagtctgacctggaacctgccacagatgggccagcctccgagaccactaccctcagcccagaggccaccacctttaatgacaccagaatccctgatgcagctggtggcacggccggcgttttgtacatcaggaagaagaagaggctggagaagctacgccaccagctcatgcccatgtacaacttcgaccccacggaggaacaagatgagttggagcaggagctgctggagcatgggcgggacgccgcctctgtacaggctgctacttctgtgcaggccatgcagggcaagactactctgccctcccagggcccactgcagagacccagccggctggtgtttaccgatgtggccaatgccatccatgcgtgagtggcctgggacaagcctggacttctgatagagacccatcacggtgcctacagagctccccactccctgattgtcaagacctactctgaagatcttccctgccaagacacaagagggctgagccaggtcctagctgttctccagacccacctgctgactttagactctaagagagggccctagccaggctggacttctgaccactgacttctcctgacctgagggccctggcacagagggcatccctcatgctgagaaggtcaagagcctctgctggcttcctcatcccctgtccagatccctcacatcagggtctgccccgctaatgtggaggaaatgagggagatacggagtgggagggattgggggaggaaaggggaggtttccctctgttagggagagacctgttttttggaatctggagcctcctctggggtggggagaggaaaccacccaagttatagggacagggtagggcagcatctgttatgggccctgagaagcccagagatggagctgaaactgtccagtatgcaaggatgccaggagaagggcaattcacacccagggtccatccatactacggagggtccaggaggtctcccagccacccatccttggcaaccagatgttactggggccaagctaggatgggagctgagggggaaggaagtaggggaatggaagtggaaggatgcagcccccccagacctgccgagaggcctcatgcatgtgcatgagtgtgcccatgggcagacatgtgcctgtcccagcacagcgggcagaatgagattgtccacactggccccaccctccaagtcgacctctaccccatggtatgtagtg

SEQ ID NO: 118962 - DNA, 3326 bp, Homo sapiens
  Payload ID: 3301
  Gene Symbol: C3orf20
  Gene Name: chromosome 3 open reading frame 20
  Uniprot ID: Q8ND61
  ENST ID: ENST00000253697
  CDS Start-End: 453-3167
agtagagtttagaatttggaacggggatgggtactggtctttacagttaacacaacctggagtagcccatgccatactgtgtccttttaagtcagtaaattgaactaagtcggttattcggcaagcagttcctataaaaaactacatggctaagatgtacacgttggataattccatgcccatcttggcattgcgaccaggagcttctgcatcccttgcttccaaagcgaaccagtgaaacatctttttattcttgcaggttcttaatgattgaccacaagcagatctttcaccctcggatctctagctacaaaaggaaccactggctcaatgacctgtaagggccgtttcagcacatccattctgtccatctccaagccttcaccgtagggaagaacttttgctctcagtcacctctcagagagctctctttatagctgaaggtccctctcatgagttacatcaagagtaacctagaattatatcagcaatacacagccatggcccccaagctactggcccgcatctccaaactcctcatgatctgccagaatgcaggcatttctgtaccaaaaggcatcagaaacatctttgagttcacttgggaagagctcatcagtgacccttcagtgcctaccccgtccgacatcttgggcctggaggtcagctttggagcccccctggtggtgctcatggaacccacctttgtgcaggtccccacactgaagaagccactacctccaccaccaccagcaccaccacgtccagtgctgctggcaaccactggggcagccaagcgctccaccctctctcccaccatggcccgtcaggtgcgcacccaccaggagaccctgaacaggtttcagcagcagtccatccacctgctgacggagctcctcagactgaagatgaaggccatggtggagtctatgtcggtgggtgccaaccccttggacatcaccaggcgctttgtggaggccagccagctcctccacctcaatgccaaggagatggccttcaactgcctgatcagcacagccgggagaagtggctacagcagcggacagttgtggaaagagtccctcgcaaacatgtccgccattggggtgaactcgccttaccagctgatctaccactcttccacagcctgtctgagcttttctctctctgctggaaaagaagccaagaagaaaataggcaaatctagaactacagaagatgtcagcatgccgcccctgcatcgaggagtgggaacccctgccaacagcctggagttcagcgacccctgccctgaggcccgggagaagctgcaggagttgtgtcgccacatagaagctgaaagggccacatggaaagggaggaatatctcctaccccatgatcttacgaaactacaaggcaaagatgccctctcatctaatgttggcccgcaaaggagactctcagaccccgggtttacattaccctcccactgcaggtgctcagactctcagccccacctctcacccatcttctgccaaccatcatttcagtcagcattgtcaagaggggaaggcacccaagaaggccttcaagtttcattacaccttctatgatggctcctccttcgtttactatccctctggaaacgtcgctgtatgtcagatccccacatgctgcagagggagaaccatcacctgcctctttaatgacatacctggattctccttgctggccctattcaatactgaaggccagggctgtgttcactacaacctaaaaaccagttgcccatatgtcttaatcttggatgaggaaggtgggaccaccaatgaccagcagggctatgtagtccacaagtggagctggacttccaggacagagaccctgctttccctggaatacaaggtgaatgaggaaatgaaactaaaggtactgggacaggactccatcacagtcaccttcacctccctgaatgagacagtaacactcactgtgtcggccaacaattgtccccatggaatggcatatgacaaacggctgaaccgcagaatcagcaacatggacgacaaggtgtataagatgagccgagccctggctgagatcaagaagcggtttcagaagacagtgactcagttcattaattctatcttgctggccgcaggtctgtttaccattgaatatcccaccaaaaaggaggaggaagaatttgttcggttcaagatgagatccagaactcatcccgagcggctccccaagctaagtttatactcaggagaaagtcttttacgatctcagtcaggccacctggaatcctcaattgcagagactttgaaggatgagcctgagtctgctcctgtgagcccagttcggaagaccaccaaaatccacaccaaagccaaggtcacatccagagggaaggcccgcgaggggcgcagccccaccaggtgggcggccttgccctcagactgcccgctggtgctgcggaagctcatgctcaaggaagacacccgtgctggctgcaagtgcctggtgaaggcgcccctggtctctgacgtggagctggagcgcttcctgttggcgccccgagaccccagccaagtgctggtgtttgggatcatctcaagccagaactacaccagcactgggcagctccagtggctgctgaacactctctacaaccaccagcagcggggccgtggctccccctgcatccagtgccggtatgactcctaccgcctgctgcagtatgacctggacagccccctgcaggaggaccctcccctgatggtgaagaagaactctgtggtgcaggggatgattctgatgtttgccggggggaagctcatttttgggggccgtgttttgaatggatatggcctcagcaagcagaatctgctgaaacagatcttccggtctcaacaggattacaagatgggctacttcctgccggatgactacaaattcagtgttcccaactctgtcctgagcctggaggattctgaatcagtcaagaaagccgagtcagaagatatccaaggaagcagctcctcattggccctggaagactatgtggagaaggagttatctctggaggctgagaagacaagagagcctgaagtggagctacatcctctcagcagggacagcaagataactagttggaagaagcaggcctccaagaagtagcgccatcctggcagcagccaagtgagccaggccccggcccggggtgctggggcttcttgccagcccagccctgcctccccggtctcccaccctgtcctccaagcttctataataaaccagcgggcctccagcattggggtgaggctctggggaaggaca

SEQ ID NO: 118963 - DNA, 2744 bp, Homo sapiens
  Payload ID: 3301
  Gene Symbol: C3orf20
  Gene Name: chromosome 3 open reading frame 20
  Uniprot ID: Q8ND61
  ENST ID: ENST00000412910
  CDS Start-End: 237-2585
gtccttttaagtcagtaaattgaactaagtcggttattcggcaagcagttcctataaaaaactacatggctaaggttcttaatgattgaccacaagcagatctttcaccctcggatctctagctacaaaaggtccccacactgaagaagccactacctccaccaccaccagcaccaccacgtccagtgctgctggcaaccactggggcagccaagcgctccaccctctctcccaccatggcccgtcaggtgcgcacccaccaggagaccctgaacaggtttcagcagcagtccatccacctgctgacggagctcctcagactgaagatgaaggccatggtggagtctatgtcggtgggtgccaaccccttggacatcaccaggcgctttgtggaggccagccagctcctccacctcaatgccaaggagatggccttcaactgcctgatcagcacagccgggagaagtggctacagcagcggacagttgtggaaagagtccctcgcaaacatgtccgccattggggtgaactcgccttaccagctgatctaccactcttccacagcctgtctgagcttttctctctctgctggaaaagaagccaagaagaaaataggcaaatctagaactacagaagatgtcagcatgccgcccctgcatcgaggagtgggaacccctgccaacagcctggagttcagcgacccctgccctgaggcccgggagaagctgcaggagttgtgtcgccacatagaagctgaaagggccacatggaaagggaggaatatctcctaccccatgatcttacgaaactacaaggcaaagatgccctctcatctaatgttggcccgcaaaggagactctcagaccccgggtttacattaccctcccactgcaggtgctcagactctcagccccacctctcacccatcttctgccaaccatcatttcagtcagcattgtcaagaggggaaggcacccaagaaggccttcaagtttcattacaccttctatgatggctcctccttcgtttactatccctctggaaacgtcgctgtatgtcagatccccacatgctgcagagggagaaccatcacctgcctctttaatgacatacctggattctccttgctggccctattcaatactgaaggccagggctgtgttcactacaacctaaaaaccagttgcccatatgtcttaatcttggatgaggaaggtgggaccaccaatgaccagcagggctatgtagtccacaagtggagctggacttccaggacagagaccctgctttccctggaatacaaggtgaatgaggaaatgaaactaaaggtactgggacaggactccatcacagtcaccttcacctccctgaatgagacagtaacactcactgtgtcggccaacaattgtccccatggaatggcatatgacaaacggctgaaccgcagaatcagcaacatggacgacaaggtgtataagatgagccgagccctggctgagatcaagaagcggtttcagaagacagtgactcagttcattaattctatcttgctggccgcaggtctgtttaccattgaatatcccaccaaaaaggaggaggaagaatttgttcggttcaagatgagatccagaactcatcccgagcggctccccaagctaagtttatactcaggagaaagtcttttacgatctcagtcaggccacctggaatcctcaattgcagagactttgaaggatgagcctgagtctgctcctgtgagcccagttcggaagaccaccaaaatccacaccaaagccaaggtcacatccagagggaaggcccgcgaggggcgcagccccaccaggtgggcggccttgccctcagactgcccgctggtgctgcggaagctcatgctcaaggaagacacccgtgctggctgcaagtgcctggtgaaggcgcccctggtctctgacgtggagctggagcgcttcctgttggcgccccgagaccccagccaagtgctggtgtttgggatcatctcaagccagaactacaccagcactgggcagctccagtggctgctgaacactctctacaaccaccagcagcggggccgtggctccccctgcatccagtgccggtatgactcctaccgcctgctgcagtatgacctggacagccccctgcaggaggaccctcccctgatggtgaagaagaactctgtggtgcaggggatgattctgatgtttgccggggggaagctcatttttgggggccgtgttttgaatggatatggcctcagcaagcagaatctgctgaaacagatcttccggtctcaacaggattacaagatgggctacttcctgccggatgactacaaattcagtgttcccaactctgtcctgagcctggaggattctgaatcagtcaagaaagccgagtcagaagatatccaaggaagcagctcctcattggccctggaagactatgtggagaaggagttatctctggaggctgagaagacaagagagcctgaagtggagctacatcctctcagcagggacagcaagataactagttggaagaagcaggcctccaagaagtagcgccatcctggcagcagccaagtgagccaggccccggcccggggtgctggggcttcttgccagcccagccctgcctccccggtctcccaccctgtcctccaagcttctataataaaccagcgggcctccagcattggggtgaggctctggggaaggaca

SEQ ID NO: 118964 - DNA, 2858 bp, Homo sapiens
  Payload ID: 3301
  Gene Symbol: C3orf20
  Gene Name: chromosome 3 open reading frame 20
  Uniprot ID: Q8ND61
  ENST ID: ENST00000435614
  CDS Start-End: 380-2728
acagttaacacaacctggagtagcccatgccatactgtgtccttttaagtcagtaaattgaactaagtcggttattcggcaagcagttcctataaaaaactacatggctaagatgtacacgttggataattccatgcccatcttggcattgcgaccaggagcttctgcatcccttgcttccaaagcgaaccagtgaaacatctttttattcttgcaggttcttaatgattgaccacaagcagatctttcaccctcggatctctagctacaaaaggtccccacactgaagaagccactacctccaccaccaccagcaccaccacgtccagtgctgctggcaaccactggggcagccaagcgctccaccctctctcccaccatggcccgtcaggtgcgcacccaccaggagaccctgaacaggtttcagcagcagtccatccacctgctgacggagctcctcagactgaagatgaaggccatggtggagtctatgtcggtgggtgccaaccccttggacatcaccaggcgctttgtggaggccagccagctcctccacctcaatgccaaggagatggccttcaactgcctgatcagcacagccgggagaagtggctacagcagcggacagttgtggaaagagtccctcgcaaacatgtccgccattggggtgaactcgccttaccagctgatctaccactcttccacagcctgtctgagcttttctctctctgctggaaaagaagccaagaagaaaataggcaaatctagaactacagaagatgtcagcatgccgcccctgcatcgaggagtgggaacccctgccaacagcctggagttcagcgacccctgccctgaggcccgggagaagctgcaggagttgtgtcgccacatagaagctgaaagggccacatggaaagggaggaatatctcctaccccatgatcttacgaaactacaaggcaaagatgccctctcatctaatgttggcccgcaaaggagactctcagaccccgggtttacattaccctcccactgcaggtgctcagactctcagccccacctctcacccatcttctgccaaccatcatttcagtcagcattgtcaagaggggaaggcacccaagaaggccttcaagtttcattacaccttctatgatggctcctccttcgtttactatccctctggaaacgtcgctgtatgtcagatccccacatgctgcagagggagaaccatcacctgcctctttaatgacatacctggattctccttgctggccctattcaatactgaaggccagggctgtgttcactacaacctaaaaaccagttgcccatatgtcttaatcttggatgaggaaggtgggaccaccaatgaccagcagggctatgtagtccacaagtggagctggacttccaggacagagaccctgctttccctggaatacaaggtgaatgaggaaatgaaactaaaggtactgggacaggactccatcacagtcaccttcacctccctgaatgagacagtaacactcactgtgtcggccaacaattgtccccatggaatggcatatgacaaacggctgaaccgcagaatcagcaacatggacgacaaggtgtataagatgagccgagccctggctgagatcaagaagcggtttcagaagacagtgactcagttcattaattctatcttgctggccgcaggtctgtttaccattgaatatcccaccaaaaaggaggaggaagaatttgttcggttcaagatgagatccagaactcatcccgagcggctccccaagctaagtttatactcaggagaaagtcttttacgatctcagtcaggccacctggaatcctcaattgcagagactttgaaggatgagcctgagtctgctcctgtgagcccagttcggaagaccaccaaaatccacaccaaagccaaggtcacatccagagggaaggcccgcgaggggcgcagccccaccaggtgggcggccttgccctcagactgcccgctggtgctgcggaagctcatgctcaaggaagacacccgtgctggctgcaagtgcctggtgaaggcgcccctggtctctgacgtggagctggagcgcttcctgttggcgccccgagaccccagccaagtgctggtgtttgggatcatctcaagccagaactacaccagcactgggcagctccagtggctgctgaacactctctacaaccaccagcagcggggccgtggctccccctgcatccagtgccggtatgactcctaccgcctgctgcagtatgacctggacagccccctgcaggaggaccctcccctgatggtgaagaagaactctgtggtgcaggggatgattctgatgtttgccggggggaagctcatttttgggggccgtgttttgaatggatatggcctcagcaagcagaatctgctgaaacagatcttccggtctcaacaggattacaagatgggctacttcctgccggatgactacaaattcagtgttcccaactctgtcctgagcctggaggattctgaatcagtcaagaaagccgagtcagaagatatccaaggaagcagctcctcattggccctggaagactatgtggagaaggagttatctctggaggctgagaagacaagagagcctgaagtggagctacatcctctcagcagggacagcaagataactagttggaagaagcaggcctccaagaagtagcgccatcctggcagcagccaagtgagccaggccccggcccggggtgctggggcttcttgccagcccagccctgcctccccggtctcccaccctgtcctccaagcttctataataaaccagcgggcctcca

SEQ ID NO: 118965 - DNA, 1000 bp, Homo sapiens
  Payload ID: 3302
  Gene Symbol: C3orf22
  Gene Name: chromosome 3 open reading frame 22
  Uniprot ID: Q8N5N4
  ENST ID: ENST00000318225
  CDS Start-End: 380-805
aagggcttctgaccttgcagtgagcttgttggcactgcctgtccggggaccctggggctgctgttcctgtggtaatgtggcagctgggaccatggccagcttcagtctgcctggcgtcacataagccagcccacagggtcctgcagcttgtcctttctggctggaagctctgggcatagcctgggactgggtctttccagagagggctgtagccagggccctgccagcctcgggggccacagcggctctcacaccagcatcttgctggataggagcagttccaggactctctgatcacacctgatcatcgtcactgccagaattcaaggtagctgcctgccatggctgagaggtgtgcctcagcttaacccactcagtgatggactccagtgcctgcaagaagtctcaccagagtaagaagtggaggatccaggcccaggagaattttgccaagaagtttccgtacaggttgtcgtggctgacagagcccgaccctgagcccctgcagccctgggaggtcacaaacgactcgaacacggtgcagctgcccctgcagaagaggttggtgccaacgaggtccatcccagtccgagggctcggggctccagattttacatcaccgtctggctcctgcccggcaccactaccagcaccatcaccacctccactgtgcaacctttgggaactcaagttgctgagtcgccgcttccccagacaactcgccttcctgctgtccacccggcacactgaggctgcctgcccccagaccagcaaggcggcagggctgtccaggggcctctcctagagactgggctctgtgtgtggccttcttattggccaccttctccttggcaggctctgggcagtagccacagagactttagtaaagggatcagccttcatggccatcatagaccgggagtggtttgtggtccccccaaaaagctacaccaagctaataaactgcgagttcccaccccacttccagctggaatgatca

SEQ ID NO: 118966 - DNA, 1781 bp, Homo sapiens
  Payload ID: 3302
  Gene Symbol: C3orf22
  Gene Name: chromosome 3 open reading frame 22
  Uniprot ID: Q8N5N4
  ENST ID: ENST00000505070
  CDS Start-End: 380-688
aagggcttctgaccttgcagtgagcttgttggcactgcctgtccggggaccctggggctgctgttcctgtggtaatgtggcagctgggaccatggccagcttcagtctgcctggcgtcacataagccagcccacagggtcctgcagcttgtcctttctggctggaagctctgggcatagcctgggactgggtctttccagagagggctgtagccagggccctgccagcctcgggggccacagcggctctcacaccagcatcttgctggataggagcagttccaggactctctgatcacacctgatcatcgtcactgccagaattcaaggtagctgcctgccatggctgagaggtgtgcctcagcttaacccactcagtgatggactccagtgcctgcaagaagtctcaccagagtaagaagtggaggatccaggcccaggagaattttgccaagaagtttccgtacaggttgtcgtggctgacagagcccgaccctgagcccctgcagccctgggaggtcacaaacgactcgaacacggtgcagctgcccctgcagaagaggttggtgccaacgaggtccatcccagtccgaggggttggtgtgaggattaaaaagagcatgaatgtcacttctaggactttatcccaaatgtacactcacacaggcaagtgggccccatttcactgacccatgaggaaataccagcccagggaaggagagcagagagagctgctcaaggccatgcgattgctgcacacaggacacccgcacacgtcatgttgcaaggcctcctctgccaatcaagataccgggtgaaacaccacactagaaacctacagcagaagcacgaccatcctcctctgcacacccacctcagccaaagcagggctcgcgccctgtgcagggattgccaattcctgttctgcagagccacccacctgccagcttgcctcttctcacggtactttctggaggtcctctgaactcgggacactccagcagtacctgaagatggacagcagcatggggagcatctaccaatttggctccagcagccacttcccctccctttgcccacccaccagaggaggatgcctgccaggccttcagcccatgtgattccgataggctcccctacgcctccaccacctgctgggataggcatgtggcctaggcctgtccaatcacagcctcccagcccttcctgccacctgactggctcagagacgggcacttgagacccagaccgggccaatggatgcctccttgggactttggctggaatcagtggcaaaggaaccctctctagctttgggttggagttgctgaactggtgcagctgagagtgaggctatggcagagaaaagctaaaccacagctggaggtgtgatctgaaccccaagatctatgcctgtccgaggcagaggcacctggccttttcagtcacaggcacagacccactccctcccagctgaagggagtctgaattgggttgggtttgtcctcgccgaggctaccactgtgtgccattgggtggcccacagtcttagcttccttgcctgcctaggggtgagcaggggctgggatgggatgcagaggcccacctggctccaagaggaacacctgtgactccaaacactgggacagatgctcagccctgcagccgcgggagtggaataggggaagggggctggtgccaacactgctcccgccggtgtctcagaggcagaagacatagagctgagatcttgggttttcatattaaaaatgtaagctcctc

SEQ ID NO: 118967 - DNA, 1814 bp, Homo sapiens
  Payload ID: 3303
  Gene Symbol: C3orf30
  Gene Name: chromosome 3 open reading frame 30
  Uniprot ID: Q96M34
  ENST ID: ENST00000295622
  CDS Start-End: 41-1651
agtgcctggcaacctagaccagtcagggacgcggcaggaaatggaagagcctccgcaagaggctctggctgaacccttgaaacatgaaagcccagccgctccctcaagtgctggccacactaagggccaggaagaagacgaccagaagaaccaggccgaaaggaaggcagataaccacactgctcacagaatagctgaccagactgccctaagagtgcctagccaggctgaatccagcatatttagccaagctaccaacggagtagctgaacaaaatgggcatagtacacctggtcaggctggccgcagagcatccaaccctgctgatgtttctgaccttagagcagatgatcaggttaatcaaacaccgtctgaacagactaaaggcaaggcatctagccaagctaataatgtacagcatgaacagagtgatggtcaggtgtctggcctgacggaggaaagaactgctgaacagactgaacgaagattacctacccaggctgagagaagaacttctgggcagattgatggtagactggctatgccatctgaccagagaggttccagacagaccgaccacagaatggcaggccagtctgagagaagagcttccgagcagatggaccgcagaatgtctggcgaggctgagcgaagaacttctgagcagattacacacagattatccaaactatctgagagaagaccttctgtgcagattgacagtgggtcatccgtcccatctgaccaaagtccttctgtacagattgacagtggatcgtccgtaccatctgaccaaagaccttccgtacagattgaccgcagaatgtcagggaaagttaggagaagaagttctgagaagactgactacagattggctggcctggctgacccaggaacttctgagcagactgacctcagattgtatggcctcgttgaccacaaaacatctgtaaagactcaccaccaagtgtacggccaagccactgaactagctgaacaccaggctattgaccaagctcatagtaatgctgatcaacctccagttgacaatgctcactacactgaatctgaccagactgaccacttagcagacagacaagctaatcataaagaccagctgtcttactatgaaacacgtggccagtctgaagacagaatatttccccagttaggcaacagcaaagaggacaaagaggctgactacagagtacaaccctgcaaatttgaggatagccaagtagacctcaattccaagccttcagttgaaatggaaactcagaatgcaaccactatcccaccctacaacccagttgatgccagattcaccagtaacttccaagcaaaagaccaagctcttttcccaagactcccctccatctcatccaaattgaactataccagcagtcaagaaaaaactcaagccatagtaaccaaatctgatgaattttcagaaattgaccaaggaaagggttatcatatacgcaatcaaacttatagaaggttcccttctatagtttatgaagatccttaccaagtttcactccaatacatggaaaaacaccacattctgcaaatattccagcagattactgaaaacttagtctatgaaaagccagaggaccccctgaattttatgctgtgccaggtatagaattggagaaaaagaacaacctttttattctctttattgtaaaatacagcacacatacagcaaagtgtatagaacaaagtacgtacaactctgaattcttatgaagtaaacatacctgtaactaccattcaagtttttaaaaaataaataaaacataaccagc

SEQ ID NO: 118968 - DNA, 1438 bp, Homo sapiens
  Payload ID: 3303
  Gene Symbol: C3orf30
  Gene Name: chromosome 3 open reading frame 30
  ENST ID: ENST00000460150
  CDS Start-End: 1-1324
ccaggccgaaaggaaggcagataaccacactgctcacagaatagctgaccagactgccctaagagtgcctagccaggctgaatccagcatatttagccaagctaccaacggagtagctgaacaaaatgggcatagtacacctggtcaggctggccgcagagcatccaaccctgctgatgtttctgaccttagagcagatgatcaggttaatcaaacaccgtctgaacagactaaaggcaaggcatctagccaagctaataatgtacagcatgaacagagtgatggtcaggtgtctggcctgacggaggaaagaactgctgaacagactgaacgaagattacctacccaggctgagagaagaacttctgggcagattgatggtagactggctatgccatctgaccagagaggttccagacagaccgaccacagaatggcaggccagtctgagagaagagcttccgagcagatggaccgcagaatgtctggcgaggctgagcgaagaacttctgagcagattacacacagattatccaaactatctgagagaagaccttctgtgcagattgacagtgggtcatccgtcccatctgaccaaagtccttctgtacagattgacagtggatcgtccgtaccatctgaccaaagaccttccgtacagattgaccgcagaatgtcagggaaagttaggagaagaagttctgagaagactgactacagattggctggcctggctgacccaggaacttctgagcagactgacctcagattgtatggcctcgttgaccacaaaacatctgtaaagactcaccaccaagtgtacggccaagccactgaactagctgaacaccaggctattgaccaagctcatagtaatgctgatcaacctccagttgacaatgctcactacactgaatctgaccagactgaccacttagcagacagacaagctaatcataaagaccagctgtcttactatgaaacacgtggccagtctgaagacagaatatttccccagttaggcaacagcaaagaggacaaagaggctgactacagagtacaaccctgcaaatttgaggatagccaagtagacctcaattccaagccttcagttgaaatggaaactcagaatgcaaccactatcccaccctacaacccagttgatgccagattcaccagtaacttccaagcaaaagaccaagctcttttcccaagactcccctccatctcatccaaattgaactataccagcagtcaagaaaaaactcaagccatagtaaccaaatctgtgcaggaaatgatgaaaaagagagacaaaatgtgaaatctacaaagaacgagcctctcttcagtattgtttacaatcatgtgtcaatactatgttctgttttccatctgaaaaaaaaatggttttgaatagacattagtggtgactcta

SEQ ID NO: 118969 - DNA, 688 bp, Homo sapiens
  Payload ID: 3303
  Gene Symbol: C3orf30
  Gene Name: chromosome 3 open reading frame 30
  ENST ID: ENST00000492792
  CDS Start-End: 1-667
taggagaagaagttctgagaagactgactacagattggctggcctggctgacccaggaacttctgagcagactgacctcagattgtatggcctcgttgaccacaaaacatctgtaaagactcaccaccaagtgtacggccaagccactgaactagctgaacaccaggctattgaccaagctcatagtaatgctgatcaacctccagttgacaatgctcactacactgaatctgaccagactgaccacttagcagacagacaagctaatcataaagaccagctgtcttactatgaaacacgtggccagtctgaagacagaatatttccccagttaggcaacagcaaagaggacaaagaggctgactacagagtacaaccctgcaaatttgaggatagccaagtagacctcaattccaagccttcagttgaaatggaaactcagaatgcaaccactatcccaccctacaacccagttgatgccagattcaccagtaacttccaagcaaaagaccaagctcttttcccaagactcccctccatctcatccaaattgaactataccagcagtcaagaaaaaactcaagccatagtaaccaaatctattactgaaaacttagtctatgaaaagccagaggaccccctgaattttatgctgtgccaggtatagaattggagaaaaagaacaacc

SEQ ID NO: 118970 - DNA, 1072 bp, Homo sapiens
  Payload ID: 3303
  Gene Symbol: C3orf30
  Gene Name: chromosome 3 open reading frame 30
  ENST ID: ENST00000473121
  CDS Start-End: 1-862
gcagattacacacagattatccaaactatctgagagaagaccttctgtgcagattgacagtgggtcatccgtcccatctgaccaaagtccttctgtacagattgacagtggatcgtccgtaccatctgaccaaagaccttccgtacagattgaccgcagaatgtcagggaaagttaggagaagaagttctgagaagactgactacagattggctggcctggctgacccaggaacttctgagcagactgacctcagattgtatggcctcgttgaccacaaaacatctgtaaagactcaccaccaagtgtacggccaagccactgaactagctgaacaccaggctattgaccaagctcatagtaatgctgatcaacctccagttgacaatgctcactacactgaatctgaccagactgaccacttagcagacagacaagctaatcataaagaccagctgtcttactatgaaacacgtggccagtctgaagacagaatatttccccagttaggcaacagcaaagaggacaaagaggctgactacagagtacaaccctgcaaatttgaggatagccaagtagacctcaattccaagccttcagttgaaatggaaactcagaatgcaaccactatcccaccctacaacccagttgatgccagattcaccagtaacttccaagcaaaagaccaagctcttttcccaagactcccctccatctcatccaaattgaactataccagcagtcaagaaaaaactcaagccatagtaaccaaatcttttatgaagatccttaccaagtttcactccaatacatggaaaaacaccacattctgcaaatattccagcagattactgaaaacttagtctatgaaaagccagaggaccccctgaattttatgctgtgccaggtatagaattggagaaaaagaacaacctttttattctctttattgtaaaatacagcacacatacagcaaagtgtatagaacaaagtacgtacaactctgaattcttatgaagtaaacatacctgtaactaccattcaagtttttaaaaaataaataaaacataacc

SEQ ID NO: 118971 - DNA, 1858 bp, Homo sapiens
  Payload ID: 3303
  Gene Symbol: C3orf30
  Gene Name: chromosome 3 open reading frame 30
  ENST ID: ENST00000494105
  CDS Start-End: 40-1647
gtgcctggcaacctagaccagtcagggacgcggcaggaaatggaagagcctccgcaagaggctctggctgaacccttgaaacatgaaagcccagccgctccctcaagtgctggccacactaagggccaggaagaagacgaccagaagaaccaggccgaaaggaaggcagataaccacactgctcacagaatagctgaccagactgccctaagagtgcctagccaggctgaatccagcatatttagccaagctaccaacggagtagctgaacaaaatgggcatagtacacctggtcaggctggccgcagagcatccaaccctgctgatgtttctgaccttagagcagatgatcaggttaatcaaacaccgtctgaacagactaaaggcaaggcatctagccaagctaataatgtacagcatgaacagagtgatggtcaggtgtctggcctgacggaggaaagaactgctgaacagactgaacgaagattacctacccaggctgagagaagaacttctgggcagattgatggtagactggctatgccatctgaccagagaggttccagacagaccgaccacagaatggcaggccagtctgagagaagagcttccgagcagatggaccgcagaatgtctggcgaggctgagcgaagaacttctgagcagattacacacagattatccaaactatctgagagaagaccttctgtgcagattgacagtgggtcatccgtcccatctgaccaaagtccttctgtacagattgacagtggatcgtccgtaccatctgaccaaagaccttccgtacagattgaccgcagaatgtcagggaaagttaggagaagaagttctgagaagactgactacagattggctggcctggctgacccaggaacttctgagcagactgacctcagattgtatggcctcgttgaccacaaaacatctgtaaagactcaccaccaagtgtacggccaagccactgaactagctgaacaccaggctattgaccaagctcatagtaatgctgatcaacctccagttgacaatgctcactacactgaatctgaccagactgaccacttagcagacagacaagctaatcataaagaccagctgtcttactatgaaacacgtggccagtctgaagacagaatatttccccagttaggcaacagcaaagaggacaaagaggctgactacagagtacaaccctgcaaatttgaggatagccaagtagacctcaattccaagccttcagttgaaatggaaactcagaatgcaaccactatcccaccctacaacccagttgatgccagattcaccagtaacttccaagcaaaagaccaagctcttttcccaagactcccctccatctcatccaaattgaactataccagcagtcaagaaaaaactcaagccatagtaaccaaatctgatgaattttcagaaattgaccaaggaaagggttatcatatacgcaatcaaacttatagaaggttcccttctatagtttatgaagatccttaccaagtttcactccaatacatggaaaaacaccacattctgcaaatattccagattactgaaaacttagtctatgaaaagccagaggaccccctgaattttatgctgtgccaggtatagaattggagaaaaagaacaacctttttattctctttattgtaaaatacagcacacatacagcaaagtgtatagaacaaagtgcaggaaatgatgaaaaagagagacaaaatgtgaaatctacaaagaacgagcctctcttcagtattgtttacaatcatgtgtcaatactatgttctgttttccatctgaaaaaaaaatggttttgaataga

SEQ ID NO: 118972 - DNA, 1884 bp, Homo sapiens
  Payload ID: 3304
  Gene Symbol: C3orf33
  Gene Name: chromosome 3 open reading frame 33
  Uniprot ID: Q6P1S2
  ENST ID: ENST00000340171
  CDS Start-End: 100-984
cggtccgcggggaaggggaccccgccgccttcccgaggtgagcggcgccccctgccgccagccggaggagctcagggccgctcgcaggaggccgggaacatggcggggcagcccgcggccaccggctcgccgtctgccgacaaggacggaatggagcccaacgtcgtggctcggatctcgcagtgggcagacgaccacctgcgcctagtccggaacatcagcactggaatggccatagctggaataatgttacttttgagaagcattcgactgacatcaaaatttacaagctcttcggatattccagtagaatttataagaagaaatgttaaactacgtggacgattacgccgaataactgagaatggtttagaaattgaacatatacctattactttacctattatagcttcattgagaaaagagccacgtggtgctttgctggttaagttggctggagtagaactcgctgaaactgggaaggcatggttacaaaaagagctaaaaccttcccaattactatggttccaacttcttggaaaggagaattcagcactcttttgctatcttctggtgagtaagggtggatatttcagcgtgaatctgaatgaagaaattttgagaagaggccttggcaaaactgttcttgttaaagggcttaaatatgattctaaaatctactggacagttcacagaaacttacttaaagctgaattaacagccttaaaaaaaggagaaggaatatggaaggaagactctgaaaaagaaagttacttagaaaaattcaaagattcctggagagaaatatggaaaaaggacagttttttaaaaacaacaggatcagatttcagcttgaaaaaagaaagttattatgaaaaacttaaaaggacttatgaaatatggaaagacaacatgaacaactgctccttaatactgaagttcagagaacttataagtcgcataaactttcgtagaaaagggtgaaacggtcaagaaatctagaggtaaccttctccaaagagtgaaatatgtaaatatatggacgtttttcattgaatcaaaatggaagttttgccaaatgatcaaagtgttagtccaatggtatttaaatattaaaaagagatgattattataagcataatgtcagaattaatttaaacaaattataattaatgtaatatgattttaggaaggatgaaacactttatgagaagttaccaggctgaatgatttacatatatagtgctaatgtgtgaagagaaagtttaactcttcacccactatgttgtttttagttattttgggctgccatattgaattttttgtttgtttgttttgagaaggcgtttcgctcttgttgcccaggctggagtgcaatggcgtgatcttggctcactgcaacctcctgcttcctgggttcaagcgattctcctgcctcagcctcctgagtagctgggattacaggcatgcaccaccatgcccggctaattttgcatttttagtagagacggggtttctccatgttggtcaggctggtctcaaactcttgacttcagatgatctacccaccttggcatcctaaagtgctgggattacaggcgtgagctaccaagcccggctttttttgttttgacatggagtttcgctcttgtcacccaggcaggagtgcagtggcgttatcttggttcactgcaacctccgcctcctggattcaagtgattctcctgcctgagcctcccaagtacctgggattacaggagctcccaccaagcctggctaagttttgtattgccatattgaatttttgtttagaaaagatatgtgtttatgtttccagttttattacctttcactatttataataaaggaattctttatgcttta

SEQ ID NO: 118973 - DNA, 864 bp, Homo sapiens
  Payload ID: 3304
  Gene Symbol: C3orf33
  Gene Name: chromosome 3 open reading frame 33
  ENST ID: ENST00000486435
  CDS Start-End: 1-347
tggcggggcagcccgcggccaccggctcgccgtctgccgacaaggacggaatggagcccaacgtcgtggctcggatctcgcagtgggcagacgaccacctgcgcctagtccggggacacggtattcctctctggcccaagctggagtgcagtggcacgatcatagctcactgctgctgctccacccacttcggccgaaaagatcctcccacttcagcctcccgagtagctggaaccacagaccaagtcttgcacttgtcccccaggctggagtgcaatggtgtgatctcggctcactgcaacctctgcctcccaggttcaagtgattgtcctgcctcaccctcctgagtagctgggattacagaacatcagcactggaatggccatagctggaataatgttacttttgagaagcattcgactgacatcaaaatttacaagctcttcggatattccagtagaatttataagaagaaatgttaaactacgtggacgattacgccgaataactgagaatggtttagaaattgaacatatacctattactttacctattatagcttcattgagaaaagagccacgtggtgctttgctggttaagttggctggagtagaactcgctgaaactgggaaggcatggttacaaaaagagctaaaaccttcccaattactatggttccaacttcttggaaaggagaattcagcactcttttgctatcttctggtgagtaagggtggatatttcagcgtgaatctgaatgaagaaattttgagaagaggccttggcaaaactgttcttgttaaagggcttaaatatgattctaaaatctactggacagttcacagaaacttacttaaagctgaa

SEQ ID NO: 118974 - DNA, 1926 bp, Homo sapiens
  Payload ID: 3304
  Gene Symbol: C3orf33
  Gene Name: chromosome 3 open reading frame 33
  ENST ID: ENST00000482061
  CDS Start-End: 15-374
aggaggccgggaacatggcggggcagcccgcggccaccggctcgccgtctgccgacaaggacggaatggagcccaacgtcgtggctcggatctcgcagtgggcagacgaccacctgcgcctagtccggggacacggtattcctctctggcccaagctggagtgcagtggcacgatcatagctcactgctgctgctccacccacttcggccgaaaagatcctcccacttcagcctcccgagtagctggaaccacagaacatcagcactggaatggccatagctggaataatgttacttttgagaagcattcgactgacatcaaaatttacaagctcttcggatattccagtagaatttataagaagaaatgttaaactacgtggacgattacgccgaataactgagaatggtttagaaattgaacatatacctattactttacctattatagcttcattgagaaaagagccacgtggtgctttgctggttaagttggctggagtagaactcgctgaaactgggaaggcatggttacaaaaagagctaaaaccttcccaattactatggttccaacttcttggaaaggagaattcagcactcttttgctatcttctggtgagtaagggtggatatttcagcgtgaatctgaatgaagaaattttgagaagaggccttggcaaaactgttcttgttaaagggcttaaatatgattctaaaatctactggacagttcacagaaacttacttaaagctgaattaacagccttaaaaaaaggagaaggaatatggaaggaagactctgaaaaagaaagttacttagaaaaattcaaagattcctggagagaaatatggaaaaaggacagttttttaaaaacaacaggatcagatttcagcttgaaaaaagaaagttattatgaaaaacttaaaaggacttatgaaatatggaaagacaacatgaacaactgctccttaatactgaagttcagagaacttataagtcgcataaactttcgtagaaaagggtgaaacggtcaagaaatctagaggtaaccttctccaaagagtgaaatatgtaaatatatggacgtttttcattgaatcaaaatggaagttttgccaaatgatcaaagtgttagtccaatggtatttaaatattaaaaagagatgattattataagcataatgtcagaattaatttaaacaaattataattaatgtaatatgattttaggaaggatgaaacactttatgagaagttaccaggctgaatgatttacatatatagtgctaatgtgtgaagagaaagtttaactcttcacccactatgttgtttttagttattttgggctgccatattgaattttttgtttgtttgttttgagaaggcgtttcgctcttgttgcccaggctggagtgcaatggcgtgatcttggctcactgcaacctcctgcttcctgggttcaagcgattctcctgcctcagcctcctgagtagctgggattacaggcatgcaccaccatgcccggctaattttgcatttttagtagagacggggtttctccatgttggtcaggctggtctcaaactcttgacttcagatgatctacccaccttggcatcctaaagtgctgggattacaggcgtgagctaccaagcccggctttttttgttttgacatggagtttcgctcttgtcacccaggcaggagtgcagtggcgttatcttggttcactgcaacctccgcctcctggattcaagtgattctcctgcctgagcctcccaagtacctgggattacaggagctcccaccaagcctggctaagttttgtattgccatattgaatttttgtttagaaaagatatgtgtttatgtttccagttttattacctttcactatttataataaaggaattctttatgcttta

SEQ ID NO: 118975 - DNA, 733 bp, Homo sapiens
  Payload ID: 3304
  Gene Symbol: C3orf33
  Gene Name: chromosome 3 open reading frame 33
  ENST ID: ENST00000465810
  CDS Start-End: 8-223
cgggaacatggcggggcagcccgcggccaccggctcgccgtctgccgacaaggacggaatggagcccaacgtcgtggctcggatctcgcagtgggcagacgaccacctgcgcctagtccggaacatcagcactggaatggccatagctggaataatgttacttttgagaagcattcgactgaagagccacgtggtgctttgctggttaagttggctggagtagaactcgctgaaactgggaaggcatggttacaaaaagagctaaaaccttcccaattactatggttccaacttcttggaaaggagaattcagcactcttttgctatcttctggtgagtaagggtggatatttcagcgtgaatctgaatgaagaaattttgagaagaggccttggcaaaactgttcttgttaaagggcttaaatatgattctaaaatctactggacagttcacagaaacttacttaaagctgaattaacagccttaaaaaaaggagaaggaatatggaaggaagactctgaaaaagaaagttacttagaaaaattcaaagattcctggagagaaatatggaaaaaggacagttttttaaaaacaacaggatcagatttcagcttgaaaaaagaaagttattatgaaaaacttaaaaggacttatgaaatatggaaagacaacatgaacaactgctccttaatactgaagttcagagaacttataagtcgcataaactttcgta

SEQ ID NO: 118976 - DNA, 1804 bp, Homo sapiens
  Payload ID: 3304
  Gene Symbol: C3orf33
  Gene Name: chromosome 3 open reading frame 33
  Uniprot ID: Q6P1S2
  ENST ID: ENST00000534941
  CDS Start-End: 150-905
gctcgcaggaggccgggaacatggcggggcagcccgcggccaccggctcgccgtctgccgacaaggacggaatggagcccaacgtcgtggctcggatctcgcagtgggcagacgaccacctgcgcctagtccggaacatcagcactggaatggccatagctggaataatgttacttttgagaagcattcgactgacatcaaaatttacaagctcttcggatattccagtagaatttataagaagaaatgttaaactacgtggacgattacgccgaataactgagaatggtttagaaattgaacatatacctattactttacctattatagcttcattgagaaaagagccacgtggtgctttgctggttaagttggctggagtagaactcgctgaaactgggaaggcatggttacaaaaagagctaaaaccttcccaattactatggttccaacttcttggaaaggagaattcagcactcttttgctatcttctggtgagtaagggtggatatttcagcgtgaatctgaatgaagaaattttgagaagaggccttggcaaaactgttcttgttaaagggcttaaatatgattctaaaatctactggacagttcacagaaacttacttaaagctgaattaacagccttaaaaaaaggagaaggaatatggaaggaagactctgaaaaagaaagttacttagaaaaattcaaagattcctggagagaaatatggaaaaaggacagttttttaaaaacaacaggatcagatttcagcttgaaaaaagaaagttattatgaaaaacttaaaaggacttatgaaatatggaaagacaacatgaacaactgctccttaatactgaagttcagagaacttataagtcgcataaactttcgtagaaaagggtgaaacggtcaagaaatctagaggtaaccttctccaaagagtgaaatatgtaaatatatggacgtttttcattgaatcaaaatggaagttttgccaaatgatcaaagtgttagtccaatggtatttaaatattaaaaagagatgattattataagcataatgtcagaattaatttaaacaaattataattaatgtaatatgattttaggaaggatgaaacactttatgagaagttaccaggctgaatgatttacatatatagtgctaatgtgtgaagagaaagtttaactcttcacccactatgttgtttttagttattttgggctgccatattgaattttttgtttgtttgttttgagaaggcgtttcgctcttgttgcccaggctggagtgcaatggcgtgatcttggctcactgcaacctcctgcttcctgggttcaagcgattctcctgcctcagcctcctgagtagctgggattacaggcatgcaccaccatgcccggctaattttgcatttttagtagagacggggtttctccatgttggtcaggctggtctcaaactcttgacttcagatgatctacccaccttggcatcctaaagtgctgggattacaggcgtgagctaccaagcccggctttttttgttttgacatggagtttcgctcttgtcacccaggcaggagtgcagtggcgttatcttggttcactgcaacctccgcctcctggattcaagtgattctcctgcctgagcctcccaagtacctgggattacaggagctcccaccaagcctggctaagttttgtattgccatattgaatttttgtttagaaaagatatgtgtttatgtttccagttttattacctttcactatttataataaaggaattctttatgcttt

SEQ ID NO: 118977 - DNA, 1668 bp, Homo sapiens
  Payload ID: 3305
  Gene Symbol: C3orf36
  Gene Name: chromosome 3 open reading frame 36
  Uniprot ID: Q3SXR2
  ENST ID: ENST00000408895
  CDS Start-End: 1010-1507
tgatggatggggcaggggaagaaagtcctggaagatcccgcactgctaagcaatgctttgtcccaaagtaacgctcttcactctgctcccagcctagctgccgcaagagcggaacagaatattctgtgtgctcaggagaagaaaagagcagatatggttgagcactaaaaccctctactgtgggtagtgaacctaggtggacacagttgctcaccgggacacttaaaccagctttgcggggctgtcggggttgggaagcacagtctggaaagatttcccaatggaggaagcaccaattgtgggtccctgaagctgaggggatgatgcccaggcaaggccgaggcagtctgcagagggctggggaggtgggaaagacgattttgctcagaggaggcagagatggggtggtggctgagagagatgcagggtcaaggaaaggatggcttcagagaggagagatttgctggggcaaaaggccacaggatggggaggctgcggggtccaagaggacagctgatggagcgagaccctgcaggcaaggaggagatggggtgactcatggcagaatcgcaccagagttcccacagccctgtgcggccactatgactagtcccatcctgtacatggagaaaacgaggctccttccagttgtccctcacgcctcccttgatttatgtactacctgatgtgtataaggacaggtggtgacaaacacatggtccctacccttcaaggacatataatccagagctaagacaagaccttaacacagggcaaagtactatgctctgagttcatttgatgagcgatgggagaacgggcttgatcctagccatgcgggagagactggaattcaagagagtcaaatgtgctgggaaagactttctgggcaaaaggaataagcaaaggtgtgcaaaggtaaggaagcaggaaacctttgcacatcttgagaactcgccggccagaggcctgtgaaggagcgcagtggtcaggcaggagaggcagtcggatgcaggctgagaccatcctggagggtcttgaggctggcttaccccaggctgtgagtagtgggctcagcctagtcccggctcctgggttagtgctcacgtgtctctctgccccctcagggcctggaggaatggccttagagcccccaccaaccacgctcaggaaggcattcctagctcagagtaccctcctggagtctacactggaaggggctcctgagtgggccgcgccacaccccgaggagcagaggcgcagtcctcccgcgtgctcccagcacactccacccctacccagcacacccacggggcccccaccttgctcacctggggggaaccacccactctgcgccctctcagggagaggtggtggccgctgctctatcccctccctctcttcctcttccaccttctctctcttctcatctgggtgctggaacccaagggtgaaactgagagtcagaaagtctcagtctcaaggcagagcggggcaactaatttaaaacggcttctactccggcccccagtgtgactaatctccttctcttcgctccacaggtctataaatgggccacagtaggcacccctttttaaatctgtaaaatccccaaatccattaaaagtgacttcagaggtcccagatagggaccaacatttgtttaaa

SEQ ID NO: 118978 - DNA, 2633 bp, Homo sapiens
  Payload ID: 3306
  Gene Symbol: C3orf38
  Gene Name: chromosome 3 open reading frame 38
  Uniprot ID: Q5JPI3
  ENST ID: ENST00000318887
  CDS Start-End: 311-1300
tggaggagggacttctctttcggtaaccagctcccttgcggatagtctatgttctccatataaacccagcacttcccttaattgagatacgtgggacttcactccgtccccagcccggaaccacaagtgagggcactgcgtttcctgattgacctctttggcgattacttccgcccaggggcctggaatactggaggcccttcgacggagaacaacaagaaaggcacttccggtgtctgttgccaggcgcgggcccagtgggccgtaggggcgacattgttgccgttgtctttcccccccagtcccggggatggagatgtcgggactcagcttttcagagatggagggctgccgtaacctacttggcctactggacaacgacgagatcatggccctatgcgacactgtcaccaaccgcctggtgcagcctcaggaccgccaagatgctgttcatgcaatattagcatacagtcaaagtgcagaagaacttctgaggcgtagaaaagtccaccgagaagttatatttaagtacttggcaacacaggggattgttatacctccagctactgaaaaacacaatcttattcagcatgcaaaagattactggcaaaagcaaccacaactgaaattgaaggaaacgccagagccagttacaaagacagaggacatccacctatttcaacagcaggtgaaagaagataaaaaagctgaaaaagttgattttcgtcgcctaggagaagaattctgtcattggttctttggacttcttaattctcagaatccttttctaggaccacctcaagatgaatggggaccacagcacttctggcatgatgtgaagcttaggttttattacaacacatcagaacaaaatgttatggactaccatggagcagaaatcgtgagccttcgtttgctgtcactagtaaaagaagaatttctttttctcagccccaacctagattcacatggactgaaatgtgcatcttctcctcatgggctggttatggttggagttgctgggactgtccatcgaggaaacacttgtttgggcatttttgaacaaatttttggactcatccgctgcccttttgtggagaatacttggaaaatcaaatttatcaacctgaaaattatgggagagagttcccttgctcctggaacattaccgaaaccatctgttaaatttgaacaaagtgatctagaggccttttataatgtaatcactgtatgtggtaccaatgaagtacgacataatgtaaagcaggcttcggatagtggaactggggaccaagtttgaggtagtggaaatgagacattgctgaacaaaagagaactgggtttacctgaccctctaaagcgctaagtactgtcagcctgaaaaaaatcttctatacagaaactcttccaaatactatatcagtaatgtctgaatgatttcagatgtgaaaattgacatattttagttgaaatacctttctggactacagacttacatatcatgtgaatacttacctatttctacccgagttgcagcaagtattctgaaagcttaatgcaaataaatcccactttagatcttacagctaactgtgtgccttagaaaccaggtaatattttccttttacttagtgaatattctgctaatatctgcacttttcatgtgggaaaggattaataatggtccaggcttcccctctttaagtttcatgtttacttttgtctaactctggataattgtattttacaaatgcatctcactgtagtatatttttaaaactattaaatattttagagatgtttaacgtaaactcaaagttctcattttagaaaatttaaataacattctttttgcaaaaaagtccaataatttaacagttgaagaaaaacttactacctctttaaagatttgagaaacatttttcaaagttatcagctgtagtccaagctaaatatcttttgtaatctgcaacattttccttactgtttttgggcagtgataaatgctgttctcgaaatagactttattcttacctaggcttcagacaacagttttatagagcagttactgtaatacaatataaaggaaatatgctgttgaaattttaaaggtatgcccagttcctaacttttaaacgaattaccgttcttcctcttggctgatcttggcagagatgacaaaaaaaaccccaaaacaacccatgcatgtataatgtgtgtatacacatatacataagtatacatatactcccacattataacttagaatatttagttttttacctgttactaggtttgagttacatggttgagttgccaaattatttacatgctttgtttaaattcttcatcacctagcaactgtttgctgatcatggatttacttagttactttaatttataaaattaccatttggaaaagaactcaattgggaaatgtgatgacgtattgtacatgttactttttcctttgctataatcatctagggagactgataagaattttggaaatgggagcctggaaactcatctttgtttttttaatgctatgcctcttacgaggaatacgaattggtatgtcctaaaataagaacttaataaaggagggaaatcccttttgtctgctataagaa

SEQ ID NO: 118979 - DNA, 1259 bp, Homo sapiens
  Payload ID: 3306
  Gene Symbol: C3orf38
  Gene Name: chromosome 3 open reading frame 38
  ENST ID: ENST00000486971
  CDS Start-End: 67-489
aggcgcgggcccagtgggccgtaggggcgacattgttgccgttgtctttcccccccagtcccggggatggagatgtcgggactcagcttttcagagatggagggctgccgtaacctacttggcctactggacaacgacgagatcatggccctatgcgacactgtcaccaaccgcctggtgcagcctcaggaccgccaagatgctgttcatgcaatattagcatacagtcaaagtgcagaagaacttctgaggcgtagaaaagtccaccgagaagttatatttaagtacttggcaacacaggggattgttatacctccagctactgaaaaacacaatcttattcagcatgcaaaagattactggcaaaagcaaccacaactgaaattgaaggaaacgccagagccagttacaaagacagaggacatccacctatttcaacaggaccacctcaagatgaatggggaccacagcacttctggcatgatgtgaagcttaggttttattacaacacatcagaacaaaatgttatggactaccatggagcagaaatcgtgagccttcgtttgctgtcactagtaaaagaagaatttctttttctcagccccaacctagattcacatggactgaaatgtgcatcttctcctcatgggctggttatggttggagttgctgggactgtccatcgaggaaacacttgtttgggcatttttgaacaaatttttggactcatccgctgcccttttgtggagaatacttggaaaatcaaatttatcaacctgaaaattatgggagagagttcccttgctcctggaacattaccgaaaccatctgttaaatttgaacaaagtgatctagaggccttttataatgtaatcactgtatgtggtaccaatgaagtacgacataatgtaaagcaggcttcggatagtggaactggggaccaagtttgaggtagtggaaatgagacattgctgaacaaaagagaactgggtttacctgaccctctaaagcgctaagtactgtcagcctgaaaaaaatcttctatacagaaactcttccaaatactatatcagtaatgtctgaatgatttcagatgtgaaaattgacatattttagttgaaatacctttctggactacagacttacatatcatgtgaatacttacctatttctacccgagttgcagcaagtattctgaaagcttaatgcaaataaatcccactttagatcttacagctaactgtgtgccttagaaacca

SEQ ID NO: 118980 - DNA, 1292 bp, Homo sapiens
  Payload ID: 3307
  Gene Symbol: C3orf49
  Gene Name: chromosome 3 open reading frame 49
  Uniprot ID: Q96BT1
  ENST ID: ENST00000295896
  CDS Start-End: 111-989
tagcccacaccttgacagtacattcagtcactggatgattttgtattgaagtctgtaagttcaagaactaaaacaatccaaaacggctactacaggtgaagttgagagcaatggcccaacctcagctgtatctaccagaaccctttaagattgcctacagaaaagttggacagtgccgaagattccagcaactcaagaagaaaaatggctcattcaaaaggaaggggatagaaagatggcatagagctgtgtctaccaacttactaaaacaaaatgtattggtccctaaagaggaatcatccagtgatagtgacatgggatttcatgaaagccagcaaaatcagaaaagtaatttgaagacgaaagtgaagactgcttttgggaggatgctgtcctacaagtatagaagcaagccagcatgtgccagccaagagggctccactgaccataaagaagccctcctgtcaaacacgcagagccttctccctaggattgtcaaggagttttcatctcccaagttatttacagcaaaaatgagaaagctctcagagaatgcgactatacaacttgatgttgtagaggcagagacagaggagataacccagggaaacacactccttcgggccaggagaaccaccaagcggttatctgtgacatctcttccttcaggactgcaaaaggggccatattcaccaaaaaagagaccacactttccagcacttaaaaaaaagaagcgtggcatggaaaacatccttcgaaaatcagatttgacagtaggaaagcttcaaatgcaggtggatgacctcatagaaacagtgactgataaatccatgaagctactggcccaaagacatgctgagcttcaacagtgtgagtttctgggggatgaaattcttcagtcttctaaacagttccagaggatatccaagagaaccatgaggaagtataaattaaaaaatatgaccacaaaaggacctggagacagctgacctgagactccttgaggaacacaggaaaaggtcttcagacaataacttaaccaattaccaatcagaaaatcgactccacctatgagctggaagtccttcccaccccccaccttcaagctgtcctgcttttctgtactgaaccaatatacatcttacgtgtattcattgatgtctgcctgtaacttctgtccccctaaaatgcataaaatcagctgtaattcaaccaccttcggcacatctcaggacctcctgatgctgtggcatgtctttaaccttggcaaaataaactcctaaattgattaa

SEQ ID NO: 118981 - DNA, 876 bp, Homo sapiens
  Payload ID: 3307
  Gene Symbol: C3orf49
  Gene Name: chromosome 3 open reading frame 49
  ENST ID: ENST00000616659
  CDS Start-End: 1-876
atggcccaacctcagctgtatctaccagaaccctttaagattgcctacagaaaagttggacagtgccgaagattccagcaactcaagaagaaaaatggctcattcaaaaggaaggggatagaaagatggcatagagctgtgtctaccaacttactaaaacaaaatgtattggtccctaaagaggaatcatccagtgatagtgacatgggatttcatgaaagccagcaaaatcagaaaagtaatttgaagacgaaagtgaagactgcttttgggaggatgctgtcctacaagtatagaagcaagccagcatgtgccagccaagagggctccactgaccataaagaagccctcctgtcaaacacgcagagccttctccctaggattgtcaaggagttttcatctcccaagttatttacagcaaaaatgagaaagctctcagagaatgcgactatacaacttgatgttgtagaggcagagacagaggagataacccagggaaacacactccttcgggccaggagaaccaccaagcggttatctgtgacatctcttccttcaggactgcaaaaggggccatattcaccaaaaaagagaccacactttccagcacttaaaaaaaagaagcgtggcatggaaaacatccttcgaaaatcagatttgacagtaggaaagcttcaaatgcaggtggatgacctcatagaaacagtgactgataaatccatgaagctactggcccaaagacatgctgagcttcaacagtgtgagtttctgggggatgaaattcttcagtcttctaaacagttccagaggatatccaagagaaccatgaggaagtataaattaaaaaatatgactacaactgagcctggaacctct

SEQ ID NO: 118982 - DNA, 2277 bp, Homo sapiens
  Payload ID: 3308
  Gene Symbol: C3orf52
  Gene Name: chromosome 3 open reading frame 52
  Uniprot ID: Q5BVD1
  ENST ID: ENST00000264848
  CDS Start-End: 60-713
gctcgactcgccggcgctgtggcctcccgcggagccgctcagactttccctgccggcacatggacctggcccaaccctcacagccagtagacgagctggagctctcggtgctcgagcggcagccagaagagaacacgcctctcaatggtgccgacaaggtcttcccttctttggacgaggaggtccccccggccgaggctaacaaggaaagcccctggagctcctgtaataagaatgtggttggaagatgcaaactgtggatgatcatcacctccattttcctaggtgtcattacagtgatcatcataggcttatgtcttgctgcagtaacttatgttgatgaagatgaaaatgaaatacttgaattatcatcaaacaaaacattcttcatcatgctgaagattccagaggagtgtgttgctgaagaggaattgcctcacctgctcaccgaaaggctcacagatgtgtacagtacatcgccctctctgggtcgttattttacttcagttgaaatagtggacttcagtggtgaaaatgccacagtaacgtatgacctgcaatttggggttccatcagatgatgaaaattttatgaagtatatgatgagtgaggagttggtgctgggcattttgctacaggatttccgtgatcagaatatacctggttgtgagagtctggggcttgatccaacatccctcttgctctatgaatgaagtgatggaggctggtctctgtctgaaagcagtgctctaccaagtcctggagatgaagggaattcactctgttttgcagaaaagattctgtggattaatacagaagcaccagcaacaccagaggggtggagactcctttctctcccgattctacagtctggctctaagcccagtaaaacagctcccgagcactgcttcagctgggtccagtcttgacaaaggcaggaagccagctagggtgggggcgatagggtcagcgggtatgtcccactgttggaggtcactggtattctgtttgtttttgttttgtttcgttttgttttttgagacagggtctcgttctgtcgcttagctggagtgcggtggcgtgatcatggcactgctattcttgaagcactccacccacctgggctactttttctttagtgcagaggtgcactgtcttcttttaggtgggatcgcgtaagcatgagctggtagagcacggagaggcaggcagccaggttacgaagactaagccaattattcactgaagtcatcctcctcccccccaccattcgatttgatctacctctaagccaggctgtgaagaaaaggaaggcactttagaagacctcagcagtgtggttctgtgtctacttccatgacctgtacctgagtatcttagccagccagccttaggaacaccaccaaggttactttgaaatctatgtatatagctagttacagacgggagctatgtgtttcttcattattttgcagctcctcgttgttcctgtgattcctgaacacctttttggaaatatgggtctctgtgagttttgagcacactactatcactttggatagtcactccatttatatttttataaacttccattagagaatcattaaggctgtttaatatctgctctggatattacgcattggctttttgttgcctagtgctacaaaccttcctgtgggactcagtgtcttcaggcaatgattgtgtatcctgttacagatggttgtgatacaagaagaaccactcttctttgaaaataaactcttggaagcttttgccagctatttggggggtaggaggaatattagcaactgtattggttgtctacagatacagaattgcctgttgtgagggaactgattgttttgttgggaaaagaaatttaccaggagaaagagttttgtgctgtattgtgagagatctcgcctctcagttaaatgagccctgggttaaagtcagtgtgaagggcagctgtgtgcgggcacgagccagagtgtctgcctcagactagatttgacttgagttctttatgacccaggactctggataatgtgaatttgctttcctatttaactagaagatacatgtactatagatcattgtctcattttagtgattgttccttaaactagtgaaactagtggatttctcttcttcctctttattttctgcatgttaaatgtgaaccttagtgtatttgtattttgtagaaaataatgaaaaattttaatggagaatgatttaaaaacatttacaatacattatttttgcatctgt

SEQ ID NO: 118983 - DNA, 2054 bp, Homo sapiens
  Payload ID: 3308
  Gene Symbol: C3orf52
  Gene Name: chromosome 3 open reading frame 52
  Uniprot ID: Q5BVD1
  ENST ID: ENST00000431717
  CDS Start-End: 74-826
gaggcggggaggtcgctcgactcgccggcgctgtggcctcccgcggagccgctcagactttccctgccggcacatggacctggcccaaccctcacagccagtagacgagctggagctctcggtgctcgagcggcagccagaagagaacacgcctctcaatggtgccgacaaggtcttcccttctttggacgaggaggtccccccggccgaggctaacaaggaaagcccctggagctcctgtaataagaatgtggttggaagatgcaaactgtggatgatcatcacctccattttcctaggtgtcattacagtgatcatcataggcttatgtcttgctgcagtaacttatgttgatgaagatgaaaatgaaatacttgaattatcatcaaacaaaacattcttcatcatgctgaagattccagaggagtgtgttgctgaagaggaattgcctcacctgctcaccgaaaggaatgaagtgatggaggctggtctctgtctgaaagcagtgctctaccaagtcctggagatgaagggaattcactctgttttgcagaaaagattctgtggattaatacagaagcaccagcaacaccagaggggtggagactcctttctctcccgattctacagtctggctctaagcccagtaaaacagctcccgagcactgcttcagctgggtccagtcttgacaaaggcaggaagccagctagggtgggggcgatagggtcagcgggtatgtcccactgttggaggtcactggtattctgtttgtttttgttttgtttcgttttgttttttgagacagggtctcgttctgtcgcttagctggagtgcggtggcgtgatcatggcactgctattcttgaagcactccacccacctgggctactttttctttagtgcagaggtgcactgtcttcttttaggtgggatcgcgtaagcatgagctggtagagcacggagaggcaggcagccaggttacgaagactaagccaattattcactgaagtcatcctcctcccccccaccattcgatttgatctacctctaagccaggctgtgaagaaaaggaaggcactttagaagacctcagcagtgtggttctgtgtctacttccatgacctgtacctgagtatcttagccagccagccttaggaacaccaccaaggttactttgaaatctatgtatatagctagttacagacgggagctatgtgtttcttcattattttgcagctcctcgttgttcctgtgattcctgaacacctttttggaaatatgggtctctgtgagttttgagcacactactatcactttggatagtcactccatttatatttttataaacttccattagagaatcattaaggctgtttaatatctgctctggatattacgcattggctttttgttgcctagtgctacaaaccttcctgtgggactcagtgtcttcaggcaatgattgtgtatcctgttacagatggttgtgatacaagaagaaccactcttctttgaaaataaactcttggaagcttttgccagctatttggggggtaggaggaatattagcaactgtattggttgtctacagatacagaattgcctgttgtgagggaactgattgttttgttgggaaaagaaatttaccaggagaaagagttttgtgctgtattgtgagagatctcgcctctcagttaaatgagccctgggttaaagtcagtgtgaagggcagctgtgtgcgggcacgagccagagtgtctgcctcagactagatttgacttgagttctttatgacccaggactctggataatgtgaatttgctttcctatttaactagaagatacatgtactatagatcattgtctcattttagtgattgttccttaaactagtgaaactagtggatttctcttcttcctctttattttctgcatgttaaatgtgaaccttagtgtatttgtattttgtagaaaataatgaaaaattttaatggagaatgatttaaaaacatttacaatacattatttttgcatctgtgttgttgcattcccat

SEQ ID NO: 118984 - DNA, 965 bp, Homo sapiens
  Payload ID: 3308
  Gene Symbol: C3orf52
  Gene Name: chromosome 3 open reading frame 52
  ENST ID: ENST00000484828
  CDS Start-End: 1-724
agacgagctggagctctcggtgctcgagcggcagccagaagagaacacgcctctcaatggtgccgacaaggtcttcccttctttggacgaggaggtccccccggccgaggctaacaaggaaagcccctggagctcctgtaataagaatgtggttggaagatgcaaactgtggatgatcatcacctccattttcctaggtgtcattacagtgatcatcataggcttatgtcttgctgcagtaacttatgttgatgaagatgaaaatgaaatacttgaattatcatcaaacaaaacattcttcatcatgctgaagattccagaggagtgtgttgctgaagaggaattgcctcacctgctcaccgaaaggaatgaagtgatggaggctggtctctgtctgaaagcagtgctctaccaagtcctggagatgaagggaattcactctgttttgcagaaaagattctgtggattaatacagaagcaccagcaacaccagaggggtggagactcctttctctcccgattctacagtctggctctaagcccagtaaaacagctcccgagcactgcttcagctgggtccagtcttgacaaaggcaggaagccagctagggtgggggcgatagggtcagcgggtatgtcccactgttggaggtcactggtattctgtttgtttttgttttgtttcgttttgttttttgagacagggtctcgttctgtcgcttagctggagtgcggtggcgtgatcatggcactgctattcttgaagcactccacccacctgggctactttttctttagtgcagaggtgcactgtcttcttttaggtgggatcgcgtaagcatgagctggtagagcacggagaggcaggcagccaggttacgaagactaagccaattattcactgaagtcatcctcctcccccccaccattcgatttgatctacctctaagccaggctgtgaagaa

SEQ ID NO: 118985 - DNA, 1080 bp, Homo sapiens
  Payload ID: 3308
  Gene Symbol: C3orf52
  Gene Name: chromosome 3 open reading frame 52
  Uniprot ID: Q5BVD1
  ENST ID: ENST00000480282
  CDS Start-End: 74-517
gaggcggggaggtcgctcgactcgccggcgctgtggcctcccgcggagccgctcagactttccctgccggcacatggacctggcccaaccctcacagccagtagacgagctggagctctcggtgctcgagcggcagccagaagagaacacgcctctcaatggtgccgacaaggtcttcccttctttggacgaggaggtccccccggccgaggctaacaaggaaagcccctggagctcctgtaataagaatgtggttggaagatgcaaactgtggatgatcatcacctccattttcctaggtgtcattacagtgatcatcataggcttatgtcttgctgcagtaacttatgttgatgaagatgaaaatgaaatacttgaattatcatcaaacaaaacattcttcatcatgctgaagattccagaggagtgtgttgctgaagaggaattgcctcacctgctcaccgaaagggaagtaggactgaagccgaatcctgaagcactggtgggatttgaataagaagatttgccttcctttacacatgttcgtgtcttcttaggatgaggatgaagatgatactatcaaattcctaatcaggaaaaaagctttctgctgtgttcccagcaaaggaaaaatgtttcctcactctcaattctggtaatttccttggttcccttgtaatgaagaacacgtaagtgttatccccaggaaatcaaggtacaagtgtatggaaattttacaaatcatttttttcaggtatgggttaggcaatatcagtattttactatattctgaatttctccaatttacagtatattgcaattgtttgctcacttgtctatattctacactagaatgtgagcttcacaaagctggggaccatattgatcttgttcatcgtggtatgtatttccagtctatgacacaacatctggcacacagtaaatgggttttcaaaaaatatttgatgaagatatgaatacagaatgaatagccaaggacaggacaaccctggtgcaggaggtcagcaaatctaccaccttgactccaacgatatagttaaataacaggacttctctctc

SEQ ID NO: 118986 - DNA, 4346 bp, Homo sapiens
  Payload ID: 3309
  Gene Symbol: C3orf58
  Gene Name: chromosome 3 open reading frame 58
  Uniprot ID: Q8NDZ4
  ENST ID: ENST00000315691
  CDS Start-End: 536-1828
cttggtctcaggagagccagcgcgcacaagcaagggtgtgcggctctgagacgtgcgttgctgcttgtgggtgtgagacatcctagctcctcttccccttccgtgagtccctcctttcctcgcagaccccacttgtcgtggctggctgccgccgcagctcttgtgcgaagccagcagtgcgcgtgcgcgcgggcacgggcgcgcgaccgtcgggtccccgcgctccctccccctcccgctcctctataacttggctggcgtggaggaggcgccgccggagtcggagggcggggagctaggaggagggagctcgagagttgtggagactagtgactgggagaagtcgcagcccgctcaggcccgcgccttcccgctccccgtcttcctctctcacacacctactccgccctccgccccagcccgcgcgctagctccttctctcgcccggggttcctgccggtagctctccgggtcttggcgcggcgggggcgccccgggggtgccctcgccctcccgttgcgggcgggcgggcggtatgtggcgcctggtgcccccgaagctgggccgcctgtcccgctcgctgaagctggcggcgctgggcagcctgttggtgctgatggtgctgcactcgccgtcgctgctcgcctcttggcagcgcaacgaactgaccgaccggcgcttcctgcagctcaataagtgcccggcgtgcttcggcacgagctggtgccgccgcttcctcaacgggcaggtggtattcgaggcgtggggccgcttgcgcctgctggacttcctcaacgtgaagaacgtgtacttcgcgcagtacggcgagccccgcgagggcggccgccgccgagtggtgctcaagcgcctcggctcgcagcgcgagctggcgcagctcgaccagagcatctgcaagcgggccaccggccggccccgctgcgacctgctgcaggccatgccccggaccgagttcgcgcgcctcaacggcgacgtgcgtctgctcacgcccgaggcggtggagggctggtcggacctggtgcactgcccctcgcagcgccttctcgaccgcctggtgcgccgctacgcggagaccaaggactcgggcagcttcctgcttcgcaacctcaaggactcggagcgcatgcagctgctgctgaccctggccttcaaccccgagccgctggtgctacagagttttccgtctgatgaaggttggccatttgcaaagtatcttggagcttgtggaagaatggtggctgtaaattatgttggagaagaactgtggagttactttaatgcgccatgggaaaaacgagttgacctcgcttggcaattaatggaaatagcagaacagcttacaaacaatgactttgaatttgcactctacctcctggacgtcagctttgacaattttgcagttggtcctagagatgggaaggtaatcattgtggatgctgaaaatgttttggttgctgacaaaagattaattagacaaaataaacctgaaaattgggatgtatggtatgaaagcaagtttgatgactgtgataaggaggcttgcttatcattttcaaaagaaattctttgtgctcgtgccactgtggaccacaattactatgctgtttgtcagaacctcttatccagacatgccacctggcgtggcacttctggaggactccttcatgatccaccaagtgaaattgccaaagatggccggctcgaggccttgctggatgagtgtgccaacccaaagaagcgctatggcagattccaggctgcaaaagaactgcgtgaatacctagcacaattaagtaacaacgtgaggtagtctatggtgaacttttctttttttctccatttaaacagcactggctaaaactaaaccaccaaaaaacgatctgaaaaaatgaaatttggaagtgttacattcagaggatgataaacttgcactgatagatcttaatgttaacatccatcaaaataagacattacttcaaaaatcacatgatgcttctgcaaataagtatgttcttatactttggaggcttgagctgtcatcagctgctccccactaccccggaatgcttgagtggattaatgaatattgttaagctattggaaatgagtctgatagtacattggcttgtgtatcaaagggtacttggtacttagtttgcatttactatcatgattttgtgaatctcttgcatttactttgaatgtcaagtcagattggtctgttttataggccgctttttccttctgatgtgtagggttttttccccctttttttttttaattaaattttgaaaattcaggttactgtaggtgttcatttaaatttttaatagttgtcattcagtgctatttggtacatatttactgttagggcaggattcccaggtttactgtgttttttttttttttttttaaagaaagctaaatattacattatgtaaatacttcttttcaccaacttctgtagtttcaccattgcatggtgtcatttcaggttatttaacagttatatccctctatgccaataattagaagtgtacactaaacatgaagtttggcatatgttgcaaaatgtcattttatcttttctaaaggctttaagaagaatatactagaatctatatattgatgttaattttgattcagaaaaaaaatacaacccagtatctaaaaagtgttaactagtccaagatagtaatgcatatgccaaagaaatattacacctaatctcatgtttagaatttaaaatagaattggtcagctacttattcttaccaccctacttccagtattttagctctgtcattattaaattcagatcttcctgattattttttctgttgaaagttaaactactgctttcaagtaatttaaagttatcctaccttttattcatgggtagttttgcaaaattaacatggtagccattgtttgaatttaatcgggcatcataacttttcatttattgaggaactaatcattattactataaagcatacaaattagccagtcagcacactttggtcttctttacctaagggttaaacatcagaacatcaaatttaattatttgcatagaaatgtgtgggctctttatataagttgactatcactaacaggtaatatttttctgtttgaagttgttacttttgtttacagcaaagtttgatgtagtgtgcagtagtgagctctagactgatctttttctaaatcagaaagtgattaaagtatgcacaaccaaaggcaggtttttctttttcatttattcagcaactatttattaagcatcaactctgtgccaggcacgttactagctgctacatactgtctgaacatgacatacggttaagtaactttacaattattatcaaatacttcaatgtagatatttcttaagttgaaatagcattaactaggataatgctttcatgttattttattgtcttgtgatagaaattcaacttgtaccatctaaaactaggttgctataaaaataggaggatgaagtcaataaagtttatgccagtttaaaaactggaaggaaaaggtaagagctctccattataaaatagttgcattcggttaatttttacacattagtgcattgcgtatatcaactggccctcaatgaagcatttaagtgcttggaattttactaaactgacttttttgcaactttgggagatttttgaggggagtgttgaaaattgccaaacactcacctcttactcaaaacttcaaataaaatacacattttcaagagggagcaccttttatatttgataagttttcattataaaccttataataccagtcacaaagaggttgtctgtctatggtttagcaaacatttgcttttctttttggaagtgtgattgcaattgcagaacagaaagtgagaaaacactgccagcggtgattgctacttgaggtagttttttacaactaccatttcccctccatgaaattatgtgaaatttattttatctttgggaaaagttgagaagatagtaaaagaattaggaatttaaaattacagggaaaaatatgtaagtgaaaagcaataaatattttgttcactttgctatcaagatgttcactatcagatatttattatatggcagcaatttatatttttaatcattgcccattaatagacgcagtaaaatatttttgaatcagacatttggggtttgtatgtgcattaaaattgtcttttgtactgtaagttactgttaatttgaatattttattgaactgtctccctgtgcctttataatataaagttgtttctacaacttttaatgatcttaataaagaatacttta

SEQ ID NO: 118987 - DNA, 3260 bp, Homo sapiens
  Payload ID: 3309
  Gene Symbol: C3orf58
  Gene Name: chromosome 3 open reading frame 58
  ENST ID: ENST00000441925
  CDS Start-End: 156-734
aaacaggaaaagtaaggcagcgttggacttggggctgggagggcttaaggccagacagacgttttcatcctgatcctgtgacctgccctattcatctgagttttccgtctgatgaaggttggccatttgcaaagtatcttggagcttgtggaagaatggtggctgtaaattatgttggagaagaactgtggagttactttaatgcgccatgggaaaaacgagttgacctcgcttggcaattaatggaaatagcagaacagcttacaaacaatgactttgaatttgcactctacctcctggacgtcagctttgacaattttgcagttggtcctagagatgggaaggtaatcattgtggatgctgaaaatgttttggttgctgacaaaagattaattagacaaaataaacctgaaaattgggatgtatggtatgaaagcaagtttgatgactgtgataaggaggcttgcttatcattttcaaaagaaattctttgtgctcgtgccactgtggaccacaattactatgctgtttgtcagaacctcttatccagacatgccacctggcgtggcacttctggaggactccttcatgatccaccaagtgaaattgccaaagatggccggctcgaggccttgctggatgagtgtgccaacccaaagaagcgctatggcagattccaggctgcaaaagaactgcgtgaatacctagcacaattaagtaacaacgtgaggtagtctatggtgaacttttctttttttctccatttaaacagcactggctaaaactaaaccaccaaaaaacgatctgaaaaaatgaaatttggaagtgttacattcagaggatgataaacttgcactgatagatcttaatgttaacatccatcaaaataagacattacttcaaaaatcacatgatgcttctgcaaataagtatgttcttatactttggaggcttgagctgtcatcagctgctccccactaccccggaatgcttgagtggattaatgaatattgttaagctattggaaatgagtctgatagtacattggcttgtgtatcaaagggtacttggtacttagtttgcatttactatcatgattttgtgaatctcttgcatttactttgaatgtcaagtcagattggtctgttttataggccgctttttccttctgatgtgtagggttttttccccctttttttttttaattaaattttgaaaattcaggttactgtaggtgttcatttaaatttttaatagttgtcattcagtgctatttggtacatatttactgttagggcaggattcccaggtttactgtgttttttttttttttttttaaagaaagctaaatattacattatgtaaatacttcttttcaccaacttctgtagtttcaccattgcatggtgtcatttcaggttatttaacagttatatccctctatgccaataattagaagtgtacactaaacatgaagtttggcatatgttgcaaaatgtcattttatcttttctaaaggctttaagaagaatatactagaatctatatattgatgttaattttgattcagaaaaaaaatacaacccagtatctaaaaagtgttaactagtccaagatagtaatgcatatgccaaagaaatattacacctaatctcatgtttagaatttaaaatagaattggtcagctacttattcttaccaccctacttccagtattttagctctgtcattattaaattcagatcttcctgattattttttctgttgaaagttaaactactgctttcaagtaatttaaagttatcctaccttttattcatgggtagttttgcaaaattaacatggtagccattgtttgaatttaatcgggcatcataacttttcatttattgaggaactaatcattattactataaagcatacaaattagccagtcagcacactttggtcttctttacctaagggttaaacatcagaacatcaaatttaattatttgcatagaaatgtgtgggctctttatataagttgactatcactaacaggtaatatttttctgtttgaagttgttacttttgtttacagcaaagtttgatgtagtgtgcagtagtgagctctagactgatctttttctaaatcagaaagtgattaaagtatgcacaaccaaaggcaggtttttctttttcatttattcagcaactatttattaagcatcaactctgtgccaggcacgttactagctgctacatactgtctgaacatgacatacggttaagtaactttacaattattatcaaatacttcaatgtagatatttcttaagttgaaatagcattaactaggataatgctttcatgttattttattgtcttgtgatagaaattcaacttgtaccatctaaaactaggttgctataaaaataggaggatgaagtcaataaagtttatgccagtttaaaaactggaaggaaaaggtaagagctctccattataaaatagttgcattcggttaatttttacacattagtgcattgcgtatatcaactggccctcaatgaagcatttaagtgcttggaattttactaaactgacttttttgcaactttgggagatttttgaggggagtgttgaaaattgccaaacactcacctcttactcaaaacttcaaataaaatacacattttcaagagggagcaccttttatatttgataagttttcattataaaccttataataccagtcacaaagaggttgtctgtctatggtttagcaaacatttgcttttctttttggaagtgtgattgcaattgcagaacagaaagtgagaaaacactgccagcggtgattgctacttgaggtagttttttacaactaccatttcccctccatgaaattatgtgaaatttattttatctttgggaaaagttgagaagatagtaaaagaattaggaatttaaaattacagggaaaaatatgtaagtgaaaagcaataaatattttgttcactttgctatcaagatgttcactatcagatatttattatatggcagcaatttatatttttaatcattgcccattaatagacgcagtaaaatatttttgaatcagacatttggggtttgtatgtgcattaaaattgtcttttgtactgtaagttactgttaatttgaatattttattgaactgtctccctgtgcctttataatataaagttgtttctacaacttttaatgatcttaataaagaatactttaagaatcac

SEQ ID NO: 118988 - DNA, 1876 bp, Homo sapiens
  Payload ID: 3309
  Gene Symbol: C3orf58
  Gene Name: chromosome 3 open reading frame 58
  Uniprot ID: Q8NDZ4
  ENST ID: ENST00000495414
  CDS Start-End: 453-1118
agttcggactcggccgggctgggccaggctgcaggcgtgggaaggggcgtctccgggggagccccggggctgtgcagggaggccgagggcgaccccgctgatggagagtctgctcttgttacctagattcgggcgcatttcggatttgactgtggatctttcaacgccagagggagtgcgtctcttaacactccccaaaatgtctctactgcgagtttccttccgctctctaccctgcctttctgcttttatctgccggggcttgcaggtccgcggcgcagactgttcacgagcccttggacctttcctagttcttctgaagtgttctacaccgcgttcgctcttccttttctggcgctggtggctggcctaacttcggtctcagagtctttgttttcgctcatttacctggcagtcatttggacacctaattcgaggacaagttggggaggatgaagtcggagaacgggacagtggtcgggagttttccgtctgatgaaggttggccatttgcaaagtatcttggagcttgtggaagaatggtggctgtaaattatgttggagaagaactgtggagttactttaatgcgccatgggaaaaacgagttgacctcgcttggcaattaatggaaatagcagaacagcttacaaacaatgactttgaatttgcactctacctcctggacgtcagctttgacaattttgcagttggtcctagagatgggaaggtaatcattgtggatgctgaaaatgttttggttgctgacaaaagattaattagacaaaataaacctgaaaattgggatgtatggtatgaaagcaagtttgatgactgtgataaggaggcttgcttatcattttcaaaagaaattctttgtgctcgtgccactgtggaccacaattactatgctgtttgtcagaacctcttatccagacatgccacctggcgtggcacttctggaggactccttcatgatccaccaagtgaaattgccaaagatggccggctcgaggccttgctggatgagtgtgccaacccaaagaagcgctatggcagattccaggctgcaaaagaactgcgtgaatacctagcacaattaagtaacaacgtgaggtagtctatggtgaacttttctttttttctccatttaaacagcactggctaaaactaaaccaccaaaaaacgatctgaaaaaatgaaatttggaagtgttacattcagaggatgataaacttgcactgatagatcttaatgttaacatccatcaaaataagacattacttcaaaaatcacatgatgcttctgcaaataagtatgttcttatactttggaggcttgagctgtcatcagctgctccccactaccccggaatgcttgagtggattaatgaatattgttaagctattggaaatgagtctgatagtacattggcttgtgtatcaaagggtacttggtacttagtttgcatttactatcatgattttgtgaatctcttgcatttactttgaatgtcaagtcagattggtctgttttataggccgctttttccttctgatgtgtagggttttttccccctttttttttttaattaaattttgaaaattcaggttactgtaggtgttcatttaaatttttaatagttgtcattcagtgctatttggtacatatttactgttagggcaggattcccaggtttactgtgttttttttttttttttttaaagaaagctaaatattacattatgtaaatacttcttttcaccaacttctgtagtttcaccattgcatggtgtcatttcaggttatttaacagttatatccctctatgccaataattagaagtgtacactaaacatgaagtttggcatatgttgc

SEQ ID NO: 118989 - DNA, 730 bp, Homo sapiens
  Payload ID: 3309
  Gene Symbol: C3orf58
  Gene Name: chromosome 3 open reading frame 58
  ENST ID: ENST00000492452
  CDS Start-End: 92-730
tcggccgggctgggccaggctgcaggcgtgggaaggggcgtctccgggggagccccggggctgtgcagggaggccgagggcgaccccgctgatggagagtctgctcttgttacctagattcgggcgcatttcggatttgactgtggatctttcaacgccagagggaagttttccgtctgatgaaggttggccatttgcaaagtatcttggagcttgtggaagaatggtggctgtaaattatgttggagaagaactgtggagttactttaatgcgccatgggaaaaacgagttgacctcgcttggcaattaatggaaatagcagaacagcttacaaacaatgactttgaatttgcactctacctcctggacgtcagctttgacaattttgcagttggtcctagagatgggaaggtaatcattgtggatgctgaaaatgttttggttgctgacaaaagattaattagacaaaataaacctgaaaattgggatgtatggtatgaaagcaagtttgatgactgtgataaggaggcttgcttatcattttcaaaagaaattctttgtgctcgtgccactgtggaccacaattactatgctgtttgtcagaacctcttatccagacatgccacctggcgtggcacttctggaggactccttcatgatccaccaagtgaaattgccaaagatggccggctcgaggccttgctggatgagtgtgccaacccaaagaag

SEQ ID NO: 118990 - DNA, 4235 bp, Homo sapiens
  Payload ID: 3310
  Gene Symbol: C3orf62
  Gene Name: chromosome 3 open reading frame 62
  Uniprot ID: Q6ZUJ4
  ENST ID: ENST00000343010
  CDS Start-End: 1038-1841
gttctgatgccaatactagtcaccccaagtagtctgctcacagtaacccaaacctcaagtaaactcccctttccctcgctatgtgcactgatatgggtttataattttctgaaagttacccactgaagcccatttctccgttgagtcatcttgtaatttccagctttctccccgctaaggaagatatctagtgttggggatcctggcccctcaacctcctgtggaacccagcagttctgttatatcccctgctaccctagatgaattaagacggttaaatactgtgtggaacttttattagataacacactttttattagataacgcttaaaggaagtcagtacataaaactgcccggtgctgtgtcccgtctagttgtttccatgttggcttgagaacagaaatctttgtgggagttagccgggaaagggctccagttcatggcgatttagggtagtaatacattttggtgttacccagatgctttctagaacgggttctttcctcatccctgccaagactcttcccggggcccccattcgaaagccccgtccccactcccaccgcggggccagccgctgcgtgtgggcaaggccttaaggaaccggacgtatgggtccgggattttttgtctgaccttcaacctaatccgtgggggtttggggcctgcgcggggcacgcgcatgcgatgaccgttggatgggtcggcgtcactgcgctgcgggtgaggacaaggacgtggctgccgactcgccaaagggggggtgccggtagggccagcggcctgggagccgcggtggggcgggaggcagcggcggggcgggccaggaagctgtgggaagtggggcggggcgtctttggggcttctggcagatggcgggttcctccgcgagagccgagaaccgcctactccaggaggaaagcccgagggttgtgggtcctgctatagccagggccaagctccaggaaatcgtggccattcaggggtagtttgcagcctcatttgtaacattattgtgttgtcctgtgcatttccaatgcattacataaagacatggtcgcttttaggagaaatgtctgaaaaactaagaagatgcagaaaggaactgactgcagccattgaccgggcctttgaaggagttagttattcccaggagtgcacaggccagcagaggctggaactgagcgccgcgccgctctccttctcgctgcccgtgcacaggctcctctgcagaagacatcctctggcagcctgctcttctgctgctccttttgctgctgtcccatgtgctcctgagaatgagaaccctgcctttgcaacaaaccatgccccggtaaatgcaaaaccacatgctctgtgccccgagagaaaacctctaaccagcaaggaaaatgtattgatgcattcctccattttggcacctgaaagagagtcttggagaactgcaggagagggggaaaactggagaaaagaaaatttaaggaaagatatggagagagatttgaaggctgactcaaacatgccactcaacaattctagccaagaggtcacaaaggatctgcttgatatgattgaccatacaagcatccgaactattgaagaattggctggaaaaatagaatttgaaaacgaattgaaccacatgtgtggtcattgccaagattcacccttcaaagaggaagcctgggccctgctcatggacaagagccctcagaaggccacagatgctgaccctggcagcctcaaacaggcttttgatgatcataatattgttgagactgttctggacttggaagaggactacaatgtgatgacgtcttttaaataccaaattgagtaaggacagttatctaagctttgattccttacagcaggaggctgcccttgagcctgagcagaagcagctacaatggccgtcaggggccacatttctcaaaaggttggcagaacctgaattaccagaccctttttaaatcccagttgtgtccctttttaagctgtgagaccagttttttgaattccattgctttgaaatgtttcctattactgatttttttttttaactttccttgacatcttgaatgtgtttttttgattgatgttcaatatacccagtacccatggtaggtgtgggtcatgggcctctgctgtgtctcttagtgttcttttccacgggcccctaaaaaagtacaggagtggccaggcacagtggctcacgtctgtaatcccagcactttgggaggccaaggcgagtggatcacttgaggttaggagtttgagaccagcctggccaacatggcgaaaccccatctccactaaaaatacaaaaattagccaggagtggtggtgtgcacctgtagtcccagctactttggaggctgaggtaggagaattgcttgaacctggaggcggaggttgcaatgagccgagatggcaccgctcccctccatcctgagtgacagagcaagactctgtctcaaaaaaataataatttagctggtcatggtggttcgtgcctgtagttccagctacttgggtagggactgaggcgaaaggatcacttgaggccaggaggcagagattgcagtgagctgagatcacgccactgcactccagcatgagtgacagagtgagaccctgtctcaaaaaaaaaaagaaaaaaaaagggaagaaaggaaactgaatctcagggaagtgcccacctcctgagctaataagaggaaggaatatgggggtgaggcagagctggcaaaaggctgttttttgttttgattgtttttaaagaccaagtgaagtatagtataagaagtggggaaggagtggaacaaggagttagatctgtaactgtgagtagtcaattgagataactcaatacctttggacctgattgtttttaaagactgagggtagtataagaagaggggaaggagtagaacaaggagttagatctgaaactgtgagtagtcgattgagataactcactacctttggaccagccagggctgtttataagtgctaaagcccgaacaaaccaaagagttggggagaaaggcctaactaacagctgagtgattgtctaacagactgtcttttaggccagtgactctggcatagggcaggctgcatagccagcaacatcccttaccacaggtctagtgattcctctgggctcaaatgtggaggctacacacccactccttagcagaggttggcctggcacctgctggtgccccaagaactatggcatggttagaccctggccacttgattgcatgtgcctccccagtgggcgtgccctggttcccaaccagttgtggccactgccactgccctgcctggggcaggagttgaggttaaggctaactacaggctccttccaggccacctaccactcagaccctgcaggaggtagcacaaagcattcacagcctgtggagtcagaggccaatttcttctccctgagcaagaagaatggaagcaaatgaaaagtgctcacagtatgctcaactgcccctgctcaggtgaagaatagcctgtctggatggagagatgtcaggctacttgatactcagaaaaacaggtctcaaaacagtgccttccaaataatacatgtggatgtggacactcttctatagacgaggtggagcttaattcctgtccttacccccatattcccacctcattaccaccctttgaaggtgaactagacttaatgatacttcccacgactaaagtagggaaagggaaaagtcacaaacttatagtggggaagcctggcagacacctaaccaagtgatgtcatgtatatgtcatgagaggggtgcatcacttccctggtattcctaccaaaaacccaaattcccagtgtatgatcttgagacaaatgttagacaaatccagacgtggggtacattctacaagatacctggccagaactcaagactgttgagatggccgggtgcagtggctcatgcctataatccccgacactttgggaggctgaggcgggcagatcacttgaggtcagaagttcgagaccagcctggcaaacatggtgaaaccccatctctgctaaaaatacaaaaattagccaggcatcatggcatgtgcctttagtcatagctacacaggaggctgaggcaggagaattgcttgaacccaggaggtggaggttgcagtgagccaagatcgcatcactgcactccagcctgggcaacaagcaagactccacctc

SEQ ID NO: 118991 - DNA, 602 bp, Homo sapiens
  Payload ID: 3310
  Gene Symbol: C3orf62
  Gene Name: chromosome 3 open reading frame 62
  ENST ID: ENST00000424960
  CDS Start-End: 1-297
ggagaaatgtctgaaaaactaagaagatgcagaaaggaactgactgcagccattgaccgggcctttgaaggagttagttattcccaggagtgcacaggccagcagaggctggaactgagcgccgcgccgctctccttctcgctgcccgtgcacaggctcctctgcagaagacatcctctggcagcctgctcttctgctgctccttttgctgctgtcccatgtgctcctgagaatgagaaccctgcctttgcaacaaaccatgccccggaaagatatggagagagatttgaaggctgactcaaacatgccactcaacaattctagccaagaggtcacaaaggatctgcttgatatgattgaccatacaagcatccgaactattgaagaattggctggaaaaatagaatttgaaaacgaattgaaccacatgtgtggtcattgccaagattcacccttcaaagaggaagcctgggccctgctcatggacaagagccctcagaaggccacagatgctgaccctggcagcctcaaacaggcttttgatgatcataatattgttgagactgttctggacttggaagaggactacaatgtgatgacgt

SEQ ID NO: 118992 - DNA, 581 bp, Homo sapiens
  Payload ID: 3310
  Gene Symbol: C3orf62
  Gene Name: chromosome 3 open reading frame 62
  ENST ID: ENST00000436325
  CDS Start-End: 10-581
gaccgttggatgggtcggcgtcactgcgctgcgggagaaatgtctgaaaaactaagaagatgcagaaaggaactgactgcagccattgaccgggcctttgaaggagttagttattcccaggagtgcacaggccagcagaggctggaactgagcgccgcgccgctctccttctcgctgcccgtgcacaggctcctctgcagaagacatcctctggcagcctgctcttctgctgctccttttgctgctgtcccatgtgctcctgagaatgagaaccctgcctttgcaacaaaccatgccccggtaaatgcaaaaccacatgctctgtgccccgagagaaaacctctaaccagcaaggaaaatgtattgatgcattcctccattttggcacctgaaagagagtcttggagaactgcaggagagggggaaaactggagaaaagaaaatttaaggaaagatatggagagagatttgaaggctgactcaaacatgccactcaacaattctagccaagaggtcacaaaggatctgcttgatatgattgaccatacaagcatccgaactattgaagaattggctggaaa

SEQ ID NO: 118993 - DNA, 2650 bp, Homo sapiens
  Payload ID: 3311
  Gene Symbol: C3orf67
  Gene Name: chromosome 3 open reading frame 67
  Uniprot ID: Q6ZVT6
  ENST ID: ENST00000295966
  CDS Start-End: 505-2196
gggaaccaatgggcgcggccggaacgcgggtggcgctcggcgctgctctttcgcggtttgattctggggtggggcggcagcgggagcgcgcccgcttttcctaggccagcgggcggttgtctgtggctccgcgactgggcgccccgtcacggaggtgcatttgttgaaattttcagtgctcaaggaaaaaatcctggagcaaaatggaagatccttggtagtccatctgtgatttggaaagagtttgataaagaagttaaaagttttgtgtttgtcctggaaggcagcagccaaacaaacaaaattcagttaccaaaggagaataagcaaagccttggattgatccagaggtttcttgtacttcagatttacgtacccctgggacaagacttctccactgaattgctaattactgatttagggaacatcaaaagaagattatatttatcaacggtccataaggaactatcctccacccctcttcatgcaaaaattccactcttcatgatcaaacgtaaaatttggtgcaatctatgcattgacttagtagcattcaccagtgaaatattcaagggggcagttttccagtcattggatggaattgttgtctcagctaactgtaagctacggaagatcttcaccttaaaatcaaagccacaagacactgctgataaggatgctgtctatggtgttcccttttcaacagatgagcctacagatattataccacgaagctgtcaactaatgacagatgttccacatgtcacacagctgctaaacatgactaaacttcgccaaactgaaataaaattcggaggccatcctctaagatcagcagaatcagatcagttcattaacagaggaacaagtattacacggaacagtaaaaatcaagatgtttgtcatatcgcatttggatccaaagttcttgggccacctccactctctggcagaaggaataacatgaagatatccagcgagacagtgagatccgttgggtccaaaaataaccgatcatgccagccgtccactgtagagaagtgtgttaatggtacagaaatgtcagccttgctgatacctgagtctgaggaacaaggaaataaagaaaatattcaccaaataaagcagactgtacctattcatgcagccaatctacatattatgcatccgcatccccctcaagaaccatcagcagataagaataataacagaagaagattacggttaaaaagtaccagcagagaaaggacagagacacccagcggtagctcttcaggaaataataggattgaagataaagcatcaactatcctcaccactgtgtcccaacaaggagcagagctgttgaactccggcactctaggaccccagtctcctgatcaatcagatgagtggatttttcctgaaaatgctgatcacatttcatatctggcatccagcagacagtctctacttctgggtgatgactcctgcaacccatcacacctgtggctggaagccagcaaagagagtgaacacgaccagcaggcagaggaatcccagagtgttccaaaggacattttcactttttcatcaagaccacgatcagcacctcatggaaagactcagactatgtccccagaggagctctcatttattttggatctaaaagaggataacagtgtgacaagcagagacacccaatcagaggatgatttttacggcggcgacagcagtgaagaggaatatgactggcgaaactatcagccaagccagatgagtgaatccgagttacagatgctagcaagcctacggtggcaacaaaatgaagaactggaggatgctgggacctcccatggcctgagtgcctcccaggtggacaactgtaatgtcagcataagtaccagcagtgacgacacaaccacctggaactcctgcctgccaccccctgtcaaccagggtcgccactatcagaaagaaatgaacccaccttctccttctaatccccgggactggttaaatatgttgagcccaccaatcgttcctcccagtcaacagccggctgagcagcgtccagattcctgtgaaagtttgagtgttcaaggtgaagaagacctcagtgtggaagaggacgaggaagtactgactttgttgtatgacccttgtctgaactgttactttgacccccaaacagggaaatactatgagttggtataatgcctccttccggggcagagagcaggcactcccagctggagcagaatagcagttcagggtcgcttaaggagtcaccacaacttatgtgttgggtgaccacaaaatcaacagtaactgagagaaacgaattcattttgtaaataatgttcaacgttaagaatacctatattccttttgtagatgagtatgattttgaaactgaagaaattaatacagaggcaagattttaggagtttgaattggttcttgtttgttctcattctacatataattttgtttatttcagataattttatgtaaacaaattaagagttattcattcaaattttttgcagtgttaatctgtaaatgatggcttgatgtacagaaaatgtatttttgcttaaaagatgcctgggtaccttttattttatggcatttgtattaaaaataaagtatgatggtaagaagaata

SEQ ID NO: 118994 - DNA, 2617 bp, Homo sapiens
  Payload ID: 3311
  Gene Symbol: C3orf67
  Gene Name: chromosome 3 open reading frame 67
  Uniprot ID: Q6ZVT6
  ENST ID: ENST00000482387
  CDS Start-End: 98-2167
aattactgatttagggaacatcaaaagaagattatatttatcaacggtccataaggaactatcctccacccctcttcatgcaaaaattccactcttcatgatcaaacgtaaaatttggtgcaatctatgcattgacttagtagcattcaccagtgaaatattcaagggggcagttttccagtcattggatggaattgttgtctcagctaactgtaagctacggaagatcttcaccttaaaatcaaagccacaagacactgctgataaggatgctgtctatggtgttcccttttcaacagatgagcctacagatattataccacgaagctgtcaactaatgacagatgttccacatgtcacacagctgctaaacatgactaaacttcgccaaactgaaataaaattcggaggccatcctctaagatcagcagaatcagatcagttcattaacagaggaacaagtattacacggaacagtaaaaatcaagatgtttgtcatatcgcatttggatccaaagttcttgggccacctccactctctggcagaaggaataacatgaagatatccagcgagacagtgagatccgttgggtccaaaaataaccgatcatgccagccgtccactgtagagaagtgtgttaatggtacagaaatgtcagccttgctgatacctgagtctgaggaacaaggaaataaagaaaatattcaccaaataaagcagactgtacctattcatgcagccaatctacatattatgcatccgcatccccctcaagaaccatcagcagataagaataataacagaagaagattacggttaaaaagtaccagcagagaaaggacagagacacccagcggtagctcttcaggaaataataggattgaagataaagcatcaactatcctcaccactgtgtcccaacaaggagcagagctgttgaactccggcactctaggaccccagtctcctgatcaatcagatgagtggatttttcctgaaaatgctgatcacatttcatatctggcatccagcagacagtctctacttctgggtgatgactcctgcaacccatcacacctgtggctggaagccagcaaagagagtgaacacgaccagcaggcagaggaatcccagagtgttccaaaggacattttcactttttcatcaagaccacgatcagcacctcatggaaagactcagactatgtccccagaggagctctcatttattttggatctaaaagaggataacagtgtgacaagcagagacacccaatcagaggatgatttttacggcggcgacagcagtgaagagggtaaccacagtatccagggttctcgaggcccaacaactggtccttcagagttaactcagttaacattagagagcctgctggggaaggctgcaaagcggacaagtaaggaatatctaaggagcgcctacacagaagcaggagcaacagaaagccaggattcctcgatggagcaaatagatagaaataactttgaaatgagtttgttgcctacaacatgcctttctccaactggaagaaggtgtgggtcctgtcagaaaactccagagcccgtaatcaaagcgaaggatctatcagcccagcaagtgccagcttcactaaacaaaacctccctgaaagaaatctcaggggaaaggctgagctcgatccccgaagcatctgaatatgactggcgaaactatcagccaagccagatgagtgaatccgagttacagatgctagcaagcctacggtggcaacaaaatgaagaactggaggatgctgggacctcccatggcctgagtgcctcccaggtggacaactgtaatgtcagcataagtaccagcagtgacgacacaaccacctggaactcctgcctgccaccccctgtcaaccagggtcgccactatcagaaagaaatgaacccaccttctccttctaatccccgggactggttaaatatgttgagcccaccaatcgttcctcccagtcaacagccggctgagcagcgtccagattcctgtgaaagtttgagtgttcaaggtgaagaagacctcagtgtggaagaggacgaggaagtactgactttgttgtatgacccttgtctgaactgttactttgacccccaaacagggaaatactatgagttggtataatgcctccttccggggcagagagcaggcactcccagctggagcagaatagcagttcagggtcgcttaaggagtcaccacaacttatgtgttgggtgaccacaaaatcaacagtaactgagagaaacgaattcattttgtaaataatgttcaacgttaagaatacctatattccttttgtagatgagtatgattttgaaactgaagaaattaatacagaggcaagattttaggagtttgaattggttcttgtttgttctcattctacatataattttgtttatttcagataattttatgtaaacaaattaagagttattcattcaaattttttgcagtgttaatctgtaaatgatggcttgatgtacagaaaatgtatttttgcttaaaagatgcctgggtaccttttattttatggcatttgtattaaaaataaagtatgatggtaagaag

SEQ ID NO: 118995 - DNA, 4108 bp, Homo sapiens
  Payload ID: 3311
  Gene Symbol: C3orf67
  Gene Name: chromosome 3 open reading frame 67
  ENST ID: ENST00000472469
  CDS Start-End: 840-1844
ggcggcagcgggagcgcgcccgcttttcctaggccagcgggcggttgtctgtggctccgcgactgggcgccccgtcacgtaggttacacacacaatcactccccagggacggcccggagtccgtccaggcagctgcgccctccccagacccgggcaccgcggaggctggagccgcaatggtgctgatggagggcgggagatggagctgaccaggggccggaggggctgagaagagcctgcccaagtctgggccaagcacgaagccctttcccacccgtcgggctcctgggttcccgccagccgatttccagccgtcagggtcacgccactcgctggaaaccctgaactctgtgccccccaagccctgggccccctgcgggaatgttcaaaaatgagtaccagggaggtgcatttgttgaaattttcagtgctcaaggaaaaaatcctggagcaaaatggaagatccttggtagtccatctgtgatttggaaagagtttgataaagaagttaaaagttttgtgtttgtcctggaaggcagcagccaaacaaacaaaattcagttaccaaaggagaataagcaaagccttggattgatccagaggtttcttgtacttcagatttacgtacccctgggacaagacttctccactgaattgctaattactgatttagggaacatcaaaagaagattatatttatcaacggtccataaggaactatcctccacccctcttcatgcaaaaattccactcttcatgatcaaacgtaaaattctgtctatggtgttcccttttcaacagatgagcctacagatattataccacgaagctgtcaactaatgacagatgttccacatgtcacacagctgctaaacatgactaaacttcgccaaactgaaataaaattcggaggccatcctctaagatcagcagaatcagatcagttcattaacagaggaacaagtattacacggaacagtaaaaatcaagatgtttgtcatatcgcatttggatccaaagttcttgggccacctccactctctggcagaaggaataacatgaagatatccagcgagacagtgagatccgttgggtccaaaaataaccgatcatgccagccgtccactgtagagaagtgtgttaatggtacagaaatgtcagccttgctgatacctgagtctgaggaacaaggaaataaagaaaatattcaccaaataaagcagactgtacctattcatgaaccatcagcagataagaataataacagaagaagattacggttaaaaagtaccagcagagaaaggacagagacacccagcggtagctcttcaggaaataataggattgaagataaagcatcaactatcctcaccactgtgtcccaacaaggagcagagctgttgaactccggcactctaggaccccagtctcctgatcaatcagatgagtggatttttcctgaaaatgctgatcacatttcatatctggcatccagcagacagtctctacttctgggtgatgactcctgcaacccatcacacctgtggctggaagccagcaaagagagtgaacacgaccagcaggcagaggaatcccagagtgttccaaaggacattttcactttttcatcaagaccacgatcagcacctcatggaaagactcagactatgtccccagaggagctctcatttattttggatctaaaagaggataacagtgtgacaagcagagacacccaatcagaggatgatttttacggcggcgacagcagtgaagaggtacactgcttgataagtgaagtagtcttgaagcacagttgtttccttagctccaataagcactaaaacaagttgaaatgaaagagggaaaatcaactgctatttataaaaatgcaacagattgccatgtcagtccacagttgcatcaggttgttatggtaactttaaactgtctttttttttttttaattaacagtcagccaatttcacttttacttatagaaaccagttttgggtttctttctgttttttcattttaatctttgaatcacaggatgagaaacgatatgcagtttagtgctatgatagcaagaccagtaaaacactgagaatatactgttctagatctctggagaaattgtgttgcagttgctaagcattctaaattgatggttttctggcttccttactcccctgccatcttttcaccttagacctattaggactcattattttccatatggtcccagaatttgaagagttgtgccaattaaagtttagataatgagtcgtggattagtgctgggacttgccttacaggagattttctgtttgcaattatttagaatatggatatatcctataaattagcaaattcgtaaaaagttttaaaatgtttcaaatcaaactgaatataatttggaaatatttgtttaaaacctaatacattgataactttttccccataggaagtgcatttagtcgtggattttcttcagcattatttttaacgatggtcattcatactttctggaaaaatttattctaaaagcagaatacgaacaactttagggttagtgaaaatgtacaaagcttttctatatagaaattatagaaataactagaaaacctttttatatgtgcccacaaaatatttttataacgtaactgattaagaatcctttttggacagtgaggcacagattaagtccatagcaccaaccttcggaggcagttgagaatatagtgggattgtttaagcagtaattctgggttttttcaacttttaatgagtttcttcagcaaagcgcgtagaggatcgtcttttcacaatattcttgcttctgagtgtcatgaaacaattagtcataccaaacataacctactgcaaatccttttatacataaatagtgcatttgatgctagcattttaagtgttgctgctggacacatttgttcctttcacctttaataacataaagctataaaaacatggacatttgtcttcagcacctaatagtgtcctcatcccagctgataatccttccatggtctaaactggctgattaattcagttcattttatgaatagaatagactcatccccttcccatatgcacagcacaatctctcttactaatgcaaaagcattactctaatagtgggcatttcatggtaggtgggaaatggtagttctctggaaaactatgagagaagtattatggataatctgccctttaaatacaccacatgaagaacttacctcttccatctataggaaggctaagcctttagaagaaacagtagagcttcatgggaaaatgaagaatactagctctgaatattttaatttgatatcacttaatgctttcttttgctgtagctactctgcctctgacatccttcaacgtttattatgcagatgtgtatttgttaccaactacataaaattgaaaacaaatttatcatgcattacccaagctttcactggcagggctatctggtcacccctgtgccatgcccatcaaggtgaccagtagcatacggctagagtctgtggtgagaccatcccattgccaacactggcactcaccaccctttaatcagagcctactaagagtggcagccagagagaggggaaacacctgccacattatcaagctttggggtttgctggtacagagactaacgagatacaagctaagatacaaaaataggaccaacaaaaatgctaggctatatttaaacaagttttagcatgtgtaatgataccttcttaacaaaattggattttttcttttgtacttttggtaatttcttttcctgtaggatagcttcttctatttattaattgtataaatcaatgggaaattaggctacatatttacaatgtttatttacatatagtctttgaagaaaaatcagtttagttaattaaggcatccttactattaattgcattattttagaatgttacatccttatctttgtataattatacttcaggaaaacataatgtcaagttgtaaataatggtggacaagtgaataacaattatattattatgcttgaagtttataaagtgtaattaaaagactttatttgatgtta

SEQ ID NO: 118996 - DNA, 917 bp, Homo sapiens
  Payload ID: 3311
  Gene Symbol: C3orf67
  Gene Name: chromosome 3 open reading frame 67
  ENST ID: ENST00000471288
  CDS Start-End: 420-917
gctcggcgctgctctttcgcggtttgattctggggtggggcggcagcgggagcgcgcccgcttttcctaggccagcgggcggttgtctgtggctccgcgactgggcgccccgtcacgtaggttacacacacaatcactccccagggacggcccggagtccgtccaggcagctgcgccctccccagacccgggcaccgcggaggctggagccgcaatggtgctgatggagggcgggagatggagctgaccaggggccggaggggctgagaagagcctgcccaagtctgggccaagcacgaagccctttcccacccgtcgggctcctgggttcccgccagccgatttccagccgtcagggtcacgccactcgctggaaaccctgaactctgtgccccccaagccctgggccccctgcgggaatgttcaaaaatgagtaccagggaggtgcatttgttgaaattttcagtgctcaaggaaaaaatcctggagcaaaatggaagatccttggtagtccatctgtgatttggaaagagtttgataaagaagttaaaagttttgtgtttgtcctggaaggcagcagccaaacaaacaaaattcagttaccaaaggagaataagcaaagccttggattgatccagaggtttcttgtacttcagatttacgtacccctgggacaagacttctccactgaattgctaattactgatttagggaacatcaaaagaagattatatttatcaacggtccataaggaactatcctccacccctcttcatgcaaaaattccactcttcatgatcaaacgtaaaatttggtgcaatctatgcattgacttagtagcattcaccagtgaaatattcaagggggcagttttccagtcattggatggaattgttgtctcagctaactgtaagcta

SEQ ID NO: 118997 - DNA, 428 bp, Homo sapiens
  Payload ID: 3311
  Gene Symbol: C3orf67
  Gene Name: chromosome 3 open reading frame 67
  ENST ID: ENST00000495572
  CDS Start-End: 1-123
agcataagtaccagcagtgacgacacaaccacctggaactcctgcctgccaccccctgtcaaccagggtcgccactatcagaaagaaatgaacccaccttctccttctaatccccgcctttaggtcctttgccatccattaagacaaatcagatgcaatttggtgctcaggacaagaaaatgctgttggatgtttggtgtaggcatgggaaaaaaaaactatattctgaaacaagactggttagaaggcagcttcccacattttgagggactggttaaatatgttgagcccaccaatcgttcctcccagtcaacagccggctgagcagcgtccagattcctgtgaaagtttgagtgttcaaggtgggactatgaaaaacgatatgcataagaaaataaaaataatttactataaatagagagaatcca

SEQ ID NO: 118998 - DNA, 419 bp, Homo sapiens
  Payload ID: 3311
  Gene Symbol: C3orf67
  Gene Name: chromosome 3 open reading frame 67
  ENST ID: ENST00000460459
  CDS Start-End: 1-133
ggactggttaaatatgttgagcccaccaatcgttcctcccagtcaacagccggctgagcagcgtccagattcctgtgaaagtttgagtgttcaagatatttcacacactcctgaccaggctgtaacaagatgattttttagacccacttttcatccaaaacaaggatgatttaatcccagaaagctggagagcttggagacatccaagatgctgacaaatggaccaccgaagaaaaagcacttagcacatgcacatgctcaccaaaatgcaataccatgctatggtcgctcattctgtccacaaagattgcagctttctatgcactctaactgcattctgccacctgcaccctgtggcccacttgaaatgaagtttgactacatgacctgcttctttagccaataaaatgtgagcagaa

SEQ ID NO: 118999 - DNA, 832 bp, Homo sapiens
  Payload ID: 3311
  Gene Symbol: C3orf67
  Gene Name: chromosome 3 open reading frame 67
  ENST ID: ENST00000491845
  CDS Start-End: 520-744
gcttttcctaggccagcgggcggttgtctgtggctccgcgactgggcgccccgtcacggaggtgcatttgttgaaattttcagtgctcaaggaaaaaatcctggagcaaaatggaagatccttggtagtccatctgtgatttggaaagagtttgataaagaagttaaaagttttgtgtttgtcctggaaggcagcagccaaacaaacaaaattcagttaccaaaggagaataagcaaagccttggattgatccagaggtttcttgtacttcagatttacgtacccctgggacaagacttctccactgaattgctgcaaaatgtgatactccagcattcttttcccaagagatatgaagatcttctgacaattcaaatgagattagtgtagactaggacttctcaaaccatttgaagaacgagaattactgatttagggaacatcaaaagaagattatatttatcaacggtccataaggaactatcctccacccctcttcatgcaaaaattccactcttcatgatcaaacgtaaaatttggtgcaatctatgcattgacttagtagcattcaccagtgaaatattcaagggggcagttttccagtcattggatggaattgttgtctcagctaactgtaagctacggaagatcttcaccttaaaatcaaagccacaagacactgctgataaggatggtatgttcaggttgctatcaagattttttaattctctgatgtatttttaaaattagccatacctttgggatagtatgagtgtgtggtagcagtttgatgttatgtctgctaaagtaaatttgtcaacagtcatgctga

SEQ ID NO: 119000 - DNA, 949 bp, Homo sapiens
  Payload ID: 3311
  Gene Symbol: C3orf67
  Gene Name: chromosome 3 open reading frame 67
  ENST ID: ENST00000479931
  CDS Start-End: 129-704
aagcacgaagccctttcccacccgtcgggctcctgggttcccgccagccgatttccagccgtcagggtcacgccactcgctggaaaccctgaactctgtgccccccaagccctgggccccctgcgggaatgttcaaaaatgagtaccagggaggtgcatttgttgaaattttcagtgctcaaggaaaaaatcctggagcaaaatggaagatccttggtagtccatctgtgatttggaaagagtttgataaagaagttaaaagttttgtgtttgtcctggaaggcagcagccaaacaaacaaaattcagttaccaaaggagaataagcaaagccttggattgatccagaggtttcttgtacttcagatttacgtacccctgggacaagacttctccactgaattgctaattactgatttagggaacatcaaaagaagattatatttatcaacggtccataaggaactatcctccacccctcttcatgcaaaaattccactcttcatgatcaaacgtaaaatttggtgcaatctatgcattgacttagtagcattcaccagtgaaatattcaagggggcagttttccagtcattggatggaattgttgtctcagctaactgtaagctacggaagatcttcaccttaaaatcaaagccacaagacactgctgataaggatggtaactcagctccctggaattcataaggtagcacaccatactgctcagatggttttaaacaaccaaaagtattgaaagaatactgatgcctccttttgattttcatctgggattattatttgttaaatcaattcttctagaagtccaggaagcagggctgcatataagatgtcaaagggttcagaagacagcattttatttcaggttttcactggcctccagaattctcttcatcttctaatttaaaaaaccttcatttattaatattggc

SEQ ID NO: 119001 - DNA, 2761 bp, Homo sapiens
  Payload ID: 3311
  Gene Symbol: C3orf67
  Gene Name: chromosome 3 open reading frame 67
  ENST ID: ENST00000468415
  CDS Start-End: 402-992
gcggtttgattctggggtggggcggcagcgggagcgcgcccgcttttcctaggccagcgggcggttgtctgtggctccgcgactgggcgccccgtcacgtaggttacacacacaatcactccccagggacggcccggagtccgtccaggcagctgcgccctccccagacccgggcaccgcggaggctggagccgcaatggtgctgatggagggcgggagatggagctgaccaggggccggaggggctgagaagagcctgcccaagtctgggccaagcacgaagccctttcccacccgtcgggctcctgggttcccgccagccgatttccagccgtcagggtcacgccactcgctggaaaccctgaactctgtgccccccaagccctgggccccctgcgggaatgttcaaaaatgagtaccagggaggtgcatttgttgaaattttcagtgctcaaggaaaaaatcctggagcaaaatggaagatccttggtagtccatctgtgatttggaaagagtttgataaagaagttaaaagttttgtgtttgtcctggaaggcagcagccaaacaaacaaaattcagttaccaaaggagaataagcaaagccttggattgatccagaggtttcttgtacttcagatttacgtacccctgggacaagacttctccactgaattgctaattactgatttagggaacatcaaaagaagattatatttatcaacggtccataaggaactatcctccacccctcttcatgcaaaaattccactcttcatgatcaaacgtaaaatttggtgcaatctatgcattgacttagtagcattcaccagtgaaatattcaagggggcagttttccagtcattggatggaattgttgtctcagctaactgtaagctacggaagatcttcaccttaaaatcaaagccacaagacactgctgataaggatggtatgttcagctgtctatggtgttcccttttcaacagatgagcctacagatattataccacgaagctgtcaactaatgacagatgttccacatgtcacacagctgctaaacatgactaaacttcgccaaactgaaataaaattcggaggccatcctctaagatcagcagaatcagatcagttcattaacagaggaacaagtattacacggaacagtaaaaatcaagatgtttgtcatatcgcatttggatccaaagttcttgggccacctccactctctggcagaaggaataacatgaagatatccagcgaggtaggagcaagacagtgagatccgttgggtccaaaaataaccgatcatgccagccgtccactgtagagaagtgtgttaatggtacagaaatgtcagccttgctgatacctgagtctgaggaacaaggaaataaagaaaatattcaccaaataaagcagactgtacctattcatgcagccaatctacatattatgcatccgcatccccctcaagaaccatcagcagataagaataataacagaagaagattacggttaaaaagtaccagcagagaaaggacagagacacccagcggtagctcttcaggaaataataggattgaagataaagcatcaactatcctcaccactgtgtcccaacaaggagcagagctgttgaactccggcactctaggaccccagtctcctgatcaatcagatgagtggatttttcctgaaaatgctgatcacatttcatatctggcatccagcagacagtctctacttctgggtgatgactcctgcaacccatcacacctgtggctggaagccagcaaagagagtgaacacgaccagcaggcagaggaatcccagagtgttccaaaggacattttcactttttcatcaagaccacgatcagcacctcatggaaagactcagactatgtccccagaggagctctcatttattttggatctaaaagaggataacagtgtgacaagcagagacacccaatcagaggatgatttttacggcggcgacagcagtgaagagggtaaccacagtatccagggttctcgaggcccaacaactggtccttcagagttaactcagttaacattagagagcctgctggggaaggctgcaaagcggacaagtaaggaatatctaaggagcgcctacacagaagcaggagcaacagaaagccaggattcctcgatggagcaaatagatagaaataactttgaaatgagtttgttgcctacaacatgcctttctccaactggaagaaggtgtgggtcctgtcagaaaactccagagcccgtaatcaaagcgaaggatctatcagcccagcaagtgccagcttcactaaacaaaacctccctgaaagaaatctcaggggaaaggctgagctcgatccccgaagcatctgaatatgactggcgaaactatcagccaagccagatgagtgaatccgagttacagatgctagcaagcctacggtggcaacaaaatgaagaactggaggatgctgggacctcccatggcctgagtgcctcccaggtggacaactgtaatgtcagcataagtaccagcagtgacgacacaaccacctggaactcctgcctgccacccggactggttaaatatgttgagcccaccaatcgttcctcccagtcaacagccggctgagcagcgtccagattcctgtgaaagtttgagtgttcaaggtgggactatgaaaaacgatatgcataagaaaataaaaataatttactataaatagagagaatccatca

SEQ ID NO: 119002 - DNA, 424 bp, Homo sapiens
  Payload ID: 3311
  Gene Symbol: C3orf67
  Gene Name: chromosome 3 open reading frame 67
  ENST ID: ENST00000470454
  CDS Start-End: 1-80
gcccaccaatcgttcctcccagtcaacagccggctgagcagcgtccagattcctgtgaaagtttgagtgttcaaggatgatttaatcccagaaagctggagagcttggagacatccaagatgctgacaaatggaccaccgaagaaaaagcacttagcacatgaagaaatgtctggaagtgctacagccattttgcaactgtgaaggcaaaactcacactctaaagatatcaggacaagaacctggaagtgtgggtcctcacttcttccttgagcatctatactcatcctgaactacagtttccagaacacatttcacatgagaagaataagcatcttttgtctacagatcccaaagcatccttggacacaattcagagtttcatgaacttgagcggaaagagattacattttcattttcacaaa

SEQ ID NO: 119003 - DNA, 2913 bp, Homo sapiens
  Payload ID: 3311
  Gene Symbol: C3orf67
  Gene Name: chromosome 3 open reading frame 67
  ENST ID: ENST00000484535
  CDS Start-End: 1-561
aataactttgaaatgagtttgttgcctacaacatgcctttctccaactggaagaaggtgtgggtcctgtcagaaaactccagagcccgtaatcaaagcgaaggatctatcagcccagcaagtgccagcttcactaaacaaaacctccctgaaagaaatctcaggggaaaggctgagctcgatccccgaagcatctgaatatgactggcgaaactatcagccaagccagatgagtgaatccgagttacagatgctagcaagcctacggtggcaacaaaatgaagaactggaggatgctgggacctcccatggcctgagtgcctcccaggtggacaactgtaatgtcagcataagtaccagcagtgacgacacaaccacctggaactcctgcctgccaccccctgtcaaccagggtcgccactatcagaaagaaatgaacccaccttctccttctaatccccgggactggttaaatatgttgagcccaccaatcgttcctcccagtcaacagccggctgagcagcgtccagattcctgtgaaagtttgagtgttcaaggatgatttaatcccagaaagctggagagcttggagacatccaagatgctgacaaatggaccaccgaagaaaaagcacttagcacatgcacatgctcaccaaaatgcaataccatgctatggtcgctcattctgtccacaaagattgcagctttctatgcactctaactgcattctgccacctgcaccctgtggcccacttgaaatgaagtttgactacatgacctgcttctttagccaataaaatgtgagcagaagtgatgcacttccaggtgacagatttaagaactggcatactttgccacttgatttttttccactctacatagcaactgtaatgttcaagatgctggcttctccatcagcctgcatcccagaacggggaaaacaaagtggccctgggaaaaagatgaaaacacaacttttctatcaagcccaatagattgaagtcaagagagagcaacgcacgtcttgaaaagaactgagtgggctgggcgcggtggctcacgcttgtaatctcagcactttgggaggccgaggcgggtggatcacctgaggtccggagtttgagaccagcctgaccaacatggtgaaaccccgtctctactgaaaaaatacaaaaattagcttggcatggtggcgtgcgcctgtagtcgcagctactcgggaggctgaggcaggagaatggcgtgaacccaggaggcggagcttccagtgagccgagattgcgccactgcactccagcctgggcaacacagcgaaactccgtctcaaaaaaaaagaaaagaaaagaactgagtgtaactgtgggcacatgaagctgatcagaattaaatagataagaagccaattaagtttttgagagagttgtatagccagagaaatcaggagcctgaactagaaatatttacaactgttcaaaatttaaagctaccctgggccctccccctttccccaggcaggaggcaggctgagaaagctgttctgcccccaaggaggacatattcttcaatgctcactttagatgtgggcaaggaaaggtaaaggaaaatttgcagaagaaagaaccaaatggactgaggagcaacagaatgagaacactgtaggatagcacttcctggccccctatgggaggtggagccaagtcatctcttctaatggtgtgagtggaagtgatgggtccttctcatcttttctgatggtgtgagtggaagtgatgggtcattctcatctgttctgatggtgtgagtggaagggatgggtcgctctcatctcttctgatggcgtgagtggaagggatgggtcgctctcatctcttctgatggcgcgagtggaagtaatgggtcattcttgtctcttctgatggtgtgagtggaagtgatgggtccttctcatctcttctgatggcgtgagtggaagtgatgggtcattcttgtctcttctgatggtgtcagtggaagtattgggttgttctcatctcttctgatggtgtgaagggaagtgatgggtccttctcatctcttctgatggtgtgagtgcaagtgatgggtccttctcatctcttctgatggtgtgagtggaagtaataggtcattctcatctcttctgatggtgtgagtggaagggatgggtcactttcatttattctgatggtgtgagtggaagagatgggtcactttcatctattctgatggtgtgagtggaagggatgggttgctttcctgctgagtgtgtttcttactttccagtgagaggtcctgcagaacactttattccttctggcttaaagactttatcattctgccagactggatccttgagagcctatgataagtagagtgcccctgccagcccatgacagcatgctgtgtggacaagaaacaaactttcattgtattcagcttagatttgagggtcgtatgcttctgcattacctacttatcactgatacaccattggagcaaaaaatcccatctatgaagaaactccaatgatttaccctatatagttctttctctgaatatgtcgtatgccttacctagtgaatcctggggctaaaatggtattgaaatggtcagatccaatcctgagcccctagtcttatgaactaggcctcctctaacaggcagtgctaagcttccatcattcccagacagtggcccaagatgaaagaagacttctctttcccagcttagcttgaatcacaaagcaatccatttgttttggccaaggggatgtgctactcttttaactcagggtcgcaggctttagggtgcacgcgatggaaaagaactcacttgtaactgttgcaccttgagttcttcttgttccaaaaagctccagaaagaagctcagcccc

SEQ ID NO: 119004 - DNA, 461 bp, Homo sapiens
  Payload ID: 3311
  Gene Symbol: C3orf67
  Gene Name: chromosome 3 open reading frame 67
  ENST ID: ENST00000486145
  CDS Start-End: 1-238
cagtgacgacacaaccacctggaactcctgcctgccaccccctgtcaaccagggtcgccactatcagaaagaaatgaacccaccttctccttctaatccccgggactggttaaatatgttgagcccaccaatcgttcctcccagtcaacagccggctgagcagcgtccagattcctgtgaaagtttgagtgttcaagaagaaatgtctggaagtgctacagccattttgcaactgtgaaggcaaaactcacactctaaagatatcaggacaagaacctggaagtgtgggtcctcacttcttccttgagcatctatactcatcctgaactacagtttccagaacacatttcacatgagaagaataagcatcttttgtctacagatcccaaagcatccttggacacaattcagagtttcatgaacttgagcggaaagagattacattttcattttcacaaagc

SEQ ID NO: 119005 - DNA, 2756 bp, Homo sapiens
  Payload ID: 3311
  Gene Symbol: C3orf67
  Gene Name: chromosome 3 open reading frame 67
  ENST ID: ENST00000619205
  CDS Start-End: 1681-2397
gcggtttgattctggggtggggcggcagcgggagcgcgcccgcttttcctaggccagcgggcggttgtctgtggctccgcgactgggcgccccgtcacgtaggttacacacacaatcactccccagggacggcccggagtccgtccaggcagctgcgccctccccagacccgggcaccgcggaggctggagccgcaatggtgctgatggagggcgggagatggagctgaccaggggccggaggggctgagaagagcctgcccaagtctgggccaagcacgaagccctttcccacccgtcgggctcctgggttcccgccagccgatttccagccgtcagggtcacgccactcgctggaaaccctgaactctgtgccccccaagccctgggccccctgcgggaatgttcaaaaatgagtaccagggaggtgcatttgttgaaattttcagtgctcaaggaaaaaatcctggagcaaaatggaagatccttggtagtccatctgtgatttggaaagagtttgataaagaagttaaaagttttgtgtttgtcctggaaggcagcagccaaacaaacaaaattcagttaccaaaggagaataagcaaagccttggattgatccagaggtttcttgtacttcagatttacgtacccctgggacaagacttctccactgaattgctaattactgatttagggaacatcaaaagaagattatatttatcaacggtccataaggaactatcctccacccctcttcatgcaaaaattccactcttcatgatcaaacgtaaaatttggtgcaatctatgcattgacttagtagcattcaccagtgaaatattcaagggggcagttttccagtcattggatggaattgttgtctcagctaactgtaagctacggaagatcttcaccttaaaatcaaagccacaagacactgctgataaggatggtatgttcagctgtctatggtgttcccttttcaacagatgagcctacagatattataccacgaagctgtcaactaatgacagatgttccacatgtcacacagctgctaaacatgactaaacttcgccaaactgaaataaaattcggaggccatcctctaagatcagcagaatcagatcagttcattaacagaggaacaagtattacacggaacagtaaaaatcaagatgtttgtcatatcgcatttggatccaaagttcttgggccacctccactctctggcagaaggaataacatgaagatatccagcgaggtaggagcaagacagtgagatccgttgggtccaaaaataaccgatcatgccagccgtccactgtagagaagtgtgttaatggtacagaaatgtcagccttgctgatacctgagtctgaggaacaaggaaataaagaaaatattcaccaaataaagcagactgtacctattcatgcagccaatctacatattatgcatccgcatccccctcaagaaccatcagcagataagaataataacagaagaagattacggttaaaaagtaccagcagagaaaggacagagacacccagcggtagctcttcaggaaataataggattgaagataaagcatcaactatcctcaccactgtgtcccaacaaggagcagagctgttgaactccggcactctaggaccccagtctcctgatcaatcagatgagtggatttcctgaaaatgctgatcacatttcatatctggcatccagcagacagtctctacttctgggtgatgactcctgcaacccatcacacctgtggctggaagccagcaaagagagtgaacacgaccagcaggcagaggaatcccagagtgttccaaaggacattttcactttttcatcaagaccacgatcagcacctcatggaaagactcagactatgtccccagaggagctctcatttattttggatctaaaagaggataacagtgtgacaagcagagacacccaatcagaggatgatttttacggcggcgacagcagtgaagagggtaaccacagtatccagggttctcgaggcccaacaactggtccttcagagttaactcagttaacattagagagcctgctggggaaggctgcaaagcggacaagtaaggaatatctaaggagcgcctacacagaagcaggagcaacagaaagccaggattcctcgatggagcaaatagatagaaataactttgaaatgagtttgttgcctacaacatgcctttctccaactggaagaaggtgtgggtcctgtcagaaaactccagagcccgtaatcaaagcgaaggatctatcagcccagcaagtgccagcttcactaaacaaaacctccctgaaagaaatctcaggggaaaggctgagctcgatccccgaagcatctgaatgactggcgaaactatcagccaagccagatgagtgaatccgagttacagatgctagcaagcctacggtggcaacaaaatgaagaactggaggatgctgggacctcccatggcctgagtgcctcccaggtggacaactgtaatgtcagcataagtaccagcagtgacgacacaaccacctggaactcctgcctgccacccggactggttaaatatgttgagcccaccaatcgttcctcccagtcaacagccggctgagcagcgtccagattcctgtgaaagtttgagtgttcaaggtgggactatgaaaaacgatatgcataagaaaataaaaataatttactataaatagagagaatccatc

SEQ ID NO: 119006 - DNA, 5901 bp, Homo sapiens
  Payload ID: 3312
  Gene Symbol: C3orf70
  Gene Name: chromosome 3 open reading frame 70
  Uniprot ID: A6NLC5
  ENST ID: ENST00000335012
  CDS Start-End: 192-944
gacccggtcgcagcgcccggggcggctcctcctcgagcctgggaccgccgcgctcccgccgccgccgcgtgctggcgtgactcccggcccgtgccgcgccctcccgcgtccgcagccggctcggcttcctgcccacccagacgtcgcttctcccgggctcccggtgtcggctccgcgcggagggagaggaaatgagtgcggcggcctcgccggcgtcggagcggggttggaagagcgagaaactagatgaggctcaggccctggcgcggagttgcgccgcccgcagacccgacttccagccgtgcgacgggctgtctatctgtgccacgcacagccatggcaagtgcttcaagctgcactggtgctgtcacctaggatggtgtcactgcaaatacatgtatcagcctatgacccctgtggaacagcttccaagcactgagattcctgccaggcctcgggaacccacaaacaccattcagatctcagtctcgctcaccgaacactttttgaaatttgcatctgtcttccagcctccccttccccctgactcaccgaggtactgtatgatttcagacctttttattgacaactatcaggttaaatgtattaatgggaagatgtgttatgtgcagaagcagccggcaccacattcccacagaatgagccctgaggaggtctctgcacacgatgccttaatttcaaaagagagcaatacaccaaaaatagatcactgctcttctccctcaagttctgaggactctgggatcaatgcgattggggctcactatgtggaatcgtgtgacgaggacacagaagaaggagcagaactgagttcagaggaagattacagtccagagagcagctgggaaccggatgagtgcacccttctctccccctcgcagtctgacctggaagtgattgaaacgatagaaacgactgtgtgagagtccagacaggaagccacagcctcggacccacgccgagcttttgtacctttgtctggtggatccttttttccaatgctgttgatattttctacccaccccgccccgctccaaccaacaaccgtagcagttcagtggtatgctgattagcttctctccgtcttacaactaagacattctttttattataaacagttttcttttgtatcctgacttactttctatgtagcatctggtgtcatgaattgtgaccccgccttaatttcactgggagatttgaaggcggtgaagtgatggtcgcagagaatcttggatcagattgaggaggtaccgaaagggaaggagccggtgttttctcggtagccagtccttcacagagactcttgccattccctttggcatgttcacaggcactcccgtcctgtcctgcttgtcctacgcaagtagcactccctactgagtgtgcactggtagatgccgtttcttcccttccccttctccccacacctgcactgggtctggatcagagctgcctcggcttacttctgggaggtcactggaggccagctcagcccatggtttgtggccagtgtctgtacaaggctccgtgactggggctgagctaaacattcacatgagaagagatgacctcatctgtctcatgctcaatccagccttagctgagcacctgtcccctgcagggggctgtggggacacagcatgaataagacctgattcccaccatgaaggggcccacagtcctatatatgacacattcaactcatggcacccaaaaagctctgggaacccaggggaaggatgaggtttacttggctggggctagctggggaatgtgtttcagcatttgagctggcttcttggtgggttccccaacatttttctgcttttaattgttcttcaagtctgggaaaaactcttaggaagttatataggtatcacatttaggtggcagccacatctgacatcttaaggaaaaaaaataaattaatagttttagttagcatggaaatgctacagacagaagccctttagggattaggactgaatctaataggtttgattaattctgcttcatttggttgtatgaagcattcgtatggtttaagtgaggaatggattagaattcagtgtgatgcatggatttttatgcagctgcaaaagcagttgaaatagtttgctgctaagtcaggagaaaatatccagtgtaatagccattcactttcccacacagtctgtctgttgtatgtgttctctcccctcacatgcacaaaatagtgactaattctttcttatttagctctcttcagaattctacttctactctccatttataccaggtattcttgtgagtcagttaactgctatttctccaaaccttctatccatgaggcatagtttcaaatcctggaaattttaagtatggcctaatgagaacatcagagttggagacagaacagtacttccatcctaactatccagaagcgcactctcaggccattgtgctctgagattcccttgtgctctggcaccattatggtacatctctacgtcacattaatttttttttttttgagatggagtttccctcttgctgcccaggctggagtgcagcggcgtgatcttggctctctacaacctctgcctcctggggtcaagcgattctcctgcctcagcctcctgagtagctgggactatgggcacgtgccaccacacctggctaattttttgtatttttagtagagacgggctttcaccatgttagccaggatggtctcgatctgaccttgtgatccacccacctcggcctccccaagtgctgggattacaagcatgagccaccacgcccggccggatttgtaagaaaaagttgtgttctcccctgaagcctccatttggcatcattcacaaactactcaaggaagaatttgctttcccagttgtatgtataatttaagtcgtttactagatagaacttttttttaggtttagatggccaagacatctatatggtttagaaggcagagtatacattttcctttgcaaacagtatgagttaaaactttctatgctaaatgagaatgcggcataaagtctccacttactgaaatttaaagattcaacaagacaaaccgagaagggggtcagaggagctctaggaaaggcccaggagagggcagttggaggcaggtgtgagcatgaggagcttccccctgccagggcatggctcaggtggcacagggacatctgatgaaccctgcccgaggttctcggtgcctcccgtgcatgagtggctcactgaaggcaggtgtggaagccaaatgcctgcaagccgtgtgtcaggccacagcagtgcagtcatgcatcacgcactcaggtttgtaacagcaacaccagggccctgtctagattcaccctgtgggtgagcccgttctccagatgggcgtataaaggggctttctcctctacaccgttcctgtcaatgttccgtacaggcccacattcccaccactaagccaatggagtcaaccagatttctaaagccatggatatacgtggtcacggggccacatttctgcagctggctcagtggcaggcttgggccgtctctcagtaccatctaagacttctgtctaggttcctgtttttttagactcctgaactgccattctgattagacacaattttaatggaatttttggatttaataatagttgataatcaccttatgtatttgcacaatctctttataattaaaaactcgctaagcttcacttgctactatctactatatagaattagagacattccattggattctaagcatcagacactcctggatctcaaaatgaccttttctaaataagcacaagatttatttttgtcctagcactgttgataacactctgaaatatgttattgaactggaattgtttctttatgcttgcattccaaaaccaactgaaacagattgtagtttcactttaaattctaggcctgttctatattatgtgaaggaattctctgtaacgctgatactatgttgctaatttgtgtacttacagacactttagaaaatgtttagactgcaacatgcactataacattgaactcagtcacatgaagtggttaacacttgcacactgactgacagatatgaaagctgtatactttggacccagtaatatgctcattggagcaagggttgggctgtgtggatggataaactgctttcttgggtttacatggaaacctggtaccactcctacttttggaaagttggtataaaagctattaggtagaagcttaattccactaaatgtagaatttagttttcttctctaaccaagattttagaagtttcaagtttcaaatatgcttataacttttccaagaaatgatgattacagtgcttttgtggttacaactgtttggtatattaaaaaataagggtttactatcacatctaggtcttttttactatgtcatttttaagatatgaaataagaatctgaggacagccctgaagaacagtcctttcctgggaggggaagacttgtaattcaaggtcatacaatacaaaataaaacaaaaacaaaagcaccaagagcagaacaaaacaacgtagttgctttcctgaaatactttttggatttgattctatcttgggagtggtggctttacttttttttttttttttttttttttgagacagagtctcgctccttcacccaggctggagtgcagtggcgcgatctcggctcactgccagctctgcctcccaggttcatgccattctcctgcctcagcctcctgagtagctgggactataggtgcccgccaccatgcctcgctaattttttgtatttttagtagaaacggggtttcaccgtgttagccaggatggtcttgatctcatgacctcgtgatccaccctcctcggcttcccaaagtgctgggattgcaggcgtgaaccaccacgcccggccggctttacttctaatcctccacttcttggtctatttgaaccatcacaagtattttgggaccgataacaaaccccttttatgctaatttaattcttgacttgggtaataggtgcacctggataatttataaagctgtccatagatctaagtttagtggtacagatactactgggcaggagaaaaagcacaagttaaaatatttctacagtcagctcttaatattcccacatcttgtttgcaaaattttatggtcacgttctggcttttttacatgaggaaaacaaagttttaacagttttctcttctgtccccttctccagaggaggtgtgaaccagaactgaggaggccagttatattttaggcttttcagtagtacgattttgtcctctcccactgaggaggagggaagaagggggaagccagtgggagttccacacacgtggtcagtgctgtaagttcccggatatcagtgtctctcacatcaacacagaaatagggcacttctcaacattaattttggaattattcaccatttaaaaattgtcactgctctttttcattactgtagataactgagagttagctgttctaggaaaaggccatgtttcagttagtgctatgacttcttttttcgattaaggttgaagcagtgttctcttagtagcctgaacacttctcaaagcgacttatcactagcggctttaatattgagcttctatatcgttgtgtccacctcactttttaaggctgttcatacctggcaatattcacttactctgctatttttaaaaactattttaaagttttaagcacaatgttgactcttctgtaatttcctaaaattatattgttttcctacagacagctcaactttccttgatatgtaacactttaggaaaataactgccttgtaaaataaacgtgattttttttttcttttataccagaa

SEQ ID NO: 119007 - DNA, 2577 bp, Homo sapiens
  Payload ID: 3313
  Gene Symbol: C3orf80
  Gene Name: chromosome 3 open reading frame 80
  Uniprot ID: F5H4A9
  ENST ID: ENST00000326474
  CDS Start-End: 1-744
atgtggggacccggggtcactgctgagggcctgtcggtggctccggcgccgccgcctctgctgccgctgctgctactgctggcgctggcgctggtggcgccctcgcggggcggcgggggctgcgctgagctggcgtgcggcgagcgggagcgctgctgcgacgcgaccaacgccacggcggtgcgctgctgcaagctgccgctgcacgccttcctggacaacgtgggctggttcgtccgcaagctctccgggctgctcatcctgctggtgctcttcgccatcggctatttcctgcagcgcatcatctgccccagtccacgcaggtacccgcgcggccaggcgcgcccgggacagcggcccgggcctccggggggcgccggaccgctggggggcgcggggccgcccgacgacgacgacgactcgcccgctctgctgcgcgacgaggcggcagccggctctcaggactcactgctggacagtggcggcggcggccggggccggggaggcggcgggcgctcggacccctcctgcgcctcagagcacgagatgcgtgtagtgtcgccggtcttcctgcagctgcccagctacgaggaggtcaagtatctgcccacctacgaggagtccatgcggctgcagcagctcagccccggggaggtcgtgctgccagtgtcggtgcttggccgccctcgaggcggggtcgccgcggagcccgacggcggcgagggccgctaccctcttatctgagcgctcggggatcggcggctggtgcagggctgggggctgcgggtggcaagcaacggccggggtgccgccgccaactgcctcagaccttatctggcaccctggcctaactgcccggcaccccgcgactgggttggggtcactcgtctccctcgcgttctcccgggatcttatgtttctctgcgtttcattccgttcaaagaaacgtggggcacgcgcggcgggtgcggctgcagcaggcgaccctccagcgcaccttcgaaggacgtccctgccctctgccttgcctcgtattgtggttcactagtaagtgcctgcttccctagtcaaagagaacacgtgagccctttggtgcgtcgagagaagggcggtcttctttagggctgaggagaaaggaccgcagttccactcctttccctacctgccgcctggacaggtctcccagggtgggcagagggcgaggagccgttgaggaccagccgcgaccagggactgctgcacgtgggtgtgggagagcgccacttggttatgatgaaatcgctgccatgcggcagaccccccaaaatccctcagtgtcttcctgatctagcaaatagtcacagctggtgtttcacaattaggtggagtgcggggagtgggctaggggggacacctgtgatacaaggttagctgctgtacctactcagggaacagcaaccatgtatatccattcggctggacttttgattgttcaataactgaggaggtatttatatttatttgtcttttattctaatatttttaccatgcattgaacgcaacaggagggtatttcagcaaattcacgacaaggtaatcgtcttatcactttttgtaggccattaatggtcaggaaattgcccatactctgtcattattgtttaataaatcattaaattatttcattaaaaaagaaaaacaggtatggtcaaacgaggaagcatatgtgacataaaaaacatgaaggatatcttattttcactatttgagaagaatatattttatttttagtactgtggcataatatataactttttataataataactgtatgcattatgtagtatagcttttaattgtatcattcatcacagttatatgtaaaaataattgacatgtatatgccataccatgaagcatatgatgttgtgcactttctcctccatttttcatttggaatacattccacaacatgatccaaaacataagaacttacgacttgtaactcgtttaaagccattaattgtgcagtaatgtgctacaggattcaatcagcttctcttaagaaacaagtgtcattgtatcagtttcctgttctgtgacacgccctttaaaagtaaaagataatataacatattttaatacattgtgtgtaatgtacatatgcatattgtctatgtactatatacacattgtttataatattgttattacagtttgtcattcacctgaaaggagaaggaaaagtacgaaaggtttctctgcttgggaaaaggtgaatgttgttatatcaagaacgattacacacatggatctcatacatgtttttagaacattgttcttctgattgaagaagtctgatgctcctgaaaaatcttaaaatatctgacttgtattgaagaaaattatttaattaaatttttaaaggctggttgaaaaagtctgacagttctgagaattttttaaatgtctgaattgtaataaaaaaatggtttactttaaacttctaaaaactaatgaccttgtgactaaagaaaaatcatttgaagtgtattaaaaaatagcaaaacattaaaatcttttctctgtgcaaatttt

SEQ ID NO: 119008 - DNA, 706 bp, Homo sapiens
  Payload ID: 3314
  Gene Symbol: C3orf84
  Gene Name: chromosome 3 open reading frame 84
  Uniprot ID: H3BNL1
  ENST ID: ENST00000545770
  CDS Start-End: 88-702
aaattgacctccagagattctctttcctgaagataccctccaaaagacaagaggaaagtttgccttttctgctcccttcttggaaagatgcaaagtgctttagtaggctcctggcacaacaatggcttctatgggcactacagaagccaattcaagagtgaaagtgctagagaataccaccttgcagccaagccccagcctccagcagtgttcctgcagcgatgtcaggagccggcgcagcgacacttcttctccaagcacgacaaccgtacttcctttgacaaaggtccctattgcctgctgcagggaatcggaaggcggaaggacctggagcgcctgtggcagcggcacaccttcctgcgctgggcaccctgtgagatagagttgcgccagcaggggcccctggaatcttcttaccaggctgatttcaggccaggcccaggactcagtggcctcccccagcacctcatccactttgtgcaggtccagccttcccataccaggaccacctaccagcagaacttctgctgcccatcccagggtggccactatggcagctacaaggtagggccccaggcgccggtcactgacgtactgcctgacctcccagggatcccaagacccaagctgctgcagcactaccttcatgctggggtctctgagtgtctaaactggtccagagcattaaacaaggacagctgacaca

SEQ ID NO: 119009 - DNA, 669 bp, Homo sapiens
  Payload ID: 3314
  Gene Symbol: C3orf84
  Gene Name: chromosome 3 open reading frame 84
  ENST ID: ENST00000432035
  CDS Start-End: 52-669
cctccaaaagacaagaggaaagtttgccttttctgctcccttcttggaaagatgcaaagtgctttagtaggctcctggcacaacaatggcttctatgggcactacagaagccaattcaagagtgaaagtgctagagaataccaccttgcagccaagccccagcctccagcagtgttcctgcagcgatgtcaggagccggcgcagcgacacttcttctccaagcacgacaaccgtacttcctttgacaaagagggtccctattgcctgctgcagggaatcggaaggcggaaggacctggagcgcctgtggcagcggcacaccttcctgcgctgggcaccctgtgagatagagttgcgccagcaggggcccctggaatcttcttaccaggctgatttcaggccaggcccaggactcagtggcctcccccagcacctcatccactttgtgcaggtccagccttcccataccaggaccacctaccagcagaacttctgctgcccatcccagggtggccactatggcagctacaaggtagggccccaggcgccggtcactgacgtactgcctgacctcccagggatcccaagacccaagctgctgcagcactaccttcatgctggggtctctgagtgtctaaactggtccagagcattaaacaaggacagctga

SEQ ID NO: 119010 - DNA, 1636 bp, Homo sapiens
  Payload ID: 3315
  Gene Symbol: C4orf17
  Gene Name: chromosome 4 open reading frame 17
  Uniprot ID: Q53FE4
  ENST ID: ENST00000326581
  CDS Start-End: 363-1442
acgttgctaagctatgtaacatatcttaacaaccagggagccacacaggctccttggagtaagagtgtgagaaactggatgaagacagctgtattcttttggaagcgttcgagattggtctgtctctaccaactaaaaacttctagcttaagtgcagagatttaaggagatcaacaaaaactcagtctagacatattatgaggctgggagggtatcaacagacttgagttcttgtcagcaagatcacctgcttttaatattgtcctcagggtctgagcacatctggaagtgaggtcaatcaagttagaccccaaaaacttttgtgacaacagtgaagaggggaaaataaacacaccacaaacatgaacctcaaccccccgacatctgctcttcagatcgagggcaaaggcagccatattatggctagaaatgtaagctgctttctagtcaggcacacccctcatcccagaagagtctgccacatcaaaggcttgaataacattccaatctgtactgtgaatgatgatgagaatgcatttggaacattgtggggagttggccagtctaactacttagagaagaacaggataccatttgccaattgcagttacccctccagcactgcagtccaggagagccctgtaagaggaatgtcgccagccccaaacggtgccaaagtgcctccacggcctcattctgagcccagtagaaaaattaaagagtgcttcaaaacttccagtgagaatcccttagtaattaaaaaggaagaaattaaggccaaaagaccaccatcacctccaaaggcatgctctactcctggctcctgttcttcagggatgacaagtaccaagaatgatgtgaaagcaaacaccatttgcataccaaactatctggatcaggaaataaaaatcctggcaaagctctgtagcattttgcatactgattctctggcagaagttttacagtggctgcttcatgcaacttcaaaagaaaaagagtgggtctcagctttgattcattctgagcttgccgagataaacctgttaactcatcacagaagaaacacctcaatggaaccagcagcagagactgggaagccacccacagttaaatcaccacccacagttaaattgcccccaaattttactgcaaaatcaaaagtgctgaccagagatacagaaggggatcaaccaaccagagtgtcaagtcaaggatctgaagaaaacaaggaagtaccaaaagaggctgagcacaagcctccactacttataagaagaaataatatgaaaatacctgttgcagaatatttcagcaaaccaaattctcctcccaggcctaacactcaggagagtggatcagcaaaaccagtgtcagcaaggagtatacaagaatacaacctctgtccccaaagagcatgttatccttcaacacaccggaggtagaagttctagactgggtgaattctttcatgaatatgagcttcacatttacatcatcaaattatttttcaaatgaatatttttggtattgaggaatcaagtggtcctctttatggtggcacatgtaaatctaaaaatacctgtatgtaatgctacaaataaatattactggaaatgatatttccatttgtagttaa

SEQ ID NO: 119011 - DNA, 1803 bp, Homo sapiens
  Payload ID: 3315
  Gene Symbol: C4orf17
  Gene Name: chromosome 4 open reading frame 17
  Uniprot ID: Q53FE4
  ENST ID: ENST00000477187
  CDS Start-End: 355-915
aagctatgtaacatatcttaacaaccagggagccacacaggctccttggagtaagagtgtgagaaactggatgaagacagctgtattcttttggaagcgttcgagattggtctgtctctaccaactaaaaacttctagcttaagtgcagagatttaaggagatcaacaaaaactcagtctagacatattatgaggctgggagggtatcaacagacttgagttcttgtcagcaagatcacctgcttttaatattgtcctcagggtctgagcacatctggaagtgaggtcaatcaagttagaccccaaaaacttttgtgacaacagtgaagaggggaaaataaacacaccacaaacatgaacctcaaccccccgacatctgctcttcagatcgagggcaaaggcagccatattatggctagaaatgtaagctgctttctagtcaggcacacccctcatcccagaagagtctgccacatcaaaggcttgaataacattccaatctgtactgtgaatgatgatgagaatgcatttggaacattgtggggagttggccagtctaactacttagagaagaacaggataccatttgccaattgcagttacccctccagcactgcagtccaggagagccctgtaagaggaatgtcgccagccccaaacggtgccaaagtgcctccacggcctcattctgagcccagtagaaaaattaaagagtgcttcaaaacttccagtgagaatcccttagtaattaaaaaggaagaaattaaggccaaaagaccaccatcacctccaaaggcatgctctactcctggctcctgttcttcagggatgacaagtaccaagaatgatgtgaaagcaaacaccatttgcataccaaactatctggatcaggaaataaaagccactcttctgtagggctgctgcagtttgctgggggtctgctccagaccctggttgccttgagttttcccatacctagaggtatcatcagtgagagttgcaagacagcaaaggtgtctgcctgctccttcctctgggatctccatcctaggggggtactgagctgttgctggctcgaatgctcctataggagatcctggcaaagctctgtagcattttgcatactgattctctggcagaagttttacagtggctgcttcatgcaacttcaaaagaaaaagagtgggtctcagctttgattcattctgagcttgccgagataaacctgttaactcatcacagaagaaacacctcaatggaaccagcagcagagactgggaagccacccacagttaaatcaccacccacagttaaattgcccccaaattttactgcaaaatcaaaagtgctgaccagagatacagaaggggatcaaccaaccagagtgtcaagtcaaggatctgaagaaaacaaggaagtaccaaaagaggctgagcacaagcctccactacttataagaagaaataatatgaaaatacctgttgcagaatatttcagcaaaccaaattctcctcccaggcctaacactcaggagagtggatcagcaaaaccagtgtcagcaaggagtatacaagaatacaacctctgtccccaaagagcatgttatccttcaacacaccggaggtagaagttctagactgggtgaattctttcatgaatatgagcttcacatttacatcatcaaattatttttcaaatgaatatttttggtattgaggaatcaagtggtcctctttatggtggcacatgtaaatctaaaaatacctgtatgtaatgctacaaataaatattactggaaatgat

SEQ ID NO: 119012 - DNA, 2542 bp, Homo sapiens
  Payload ID: 3315
  Gene Symbol: C4orf17
  Gene Name: chromosome 4 open reading frame 17
  ENST ID: ENST00000514652
  CDS Start-End: 355-1239
aagctatgtaacatatcttaacaaccagggagccacacaggctccttggagtaagagtgtgagaaactggatgaagacagctgtattcttttggaagcgttcgagattggtctgtctctaccaactaaaaacttctagcttaagtgcagagatttaaggagatcaacaaaaactcagtctagacatattatgaggctgggagggtatcaacagacttgagttcttgtcagcaagatcacctgcttttaatattgtcctcagggtctgagcacatctggaagtgaggtcaatcaagttagaccccaaaaacttttgtgacaacagtgaagaggggaaaataaacacaccacaaacatgaacctcaaccccccgacatctgctcttcagatcgagggcaaaggcagccatattatggctagaaatgtaagctgctttctagtcaggcacacccctcatcccagaagagtctgccacatcaaaggcttgaataacattccaatctgtactgtgaatgatgatgagaatgcatttggaacattgtggggagttggccagtctaactacttagagaagaacaggataccatttgccaattgcagttacccctccagcactgcagtccaggagagccctgtaagaggaatgtcgccagccccaaacggtgccaaagtgcctccacggcctcattctgagcccagtagaaaaattaaagagtgcttcaaaacttccagtgagaatcccttagtaattaaaaaggaagaaattaaggccaaaagaccaccatcacctccaaaggcatgctctactcctggctcctgttcttcagggatgacaagtaccaagaatgatgtgaaagcaaacaccatttgcataccaaactatctggatcaggaaataaaaatcctggcaaagctctgtagcattttgcatactgattctctggcagaagttttacagtggctgcttcatgcaacttcaaaagaaaaagagtgggtctcagctttgattcattctgagcttgccgagataaacctgttaactcatcacagaagaaacacctcaatggaaccagcagcagagactgggaagccacccacagttaaatcaccacccacagttaaattgcccccaaattttactgcaaaatcaaaagtgctgaccagagatacagaaggggatcaaccaaccagagtgtcaagtcaaggatctgaagaaaacaaggaagtaccaaaaggttaagtacagtttttggtaactattgagttggtataaagaaaccagtaagtactaatgactcagggaacagattttaaggatcagtgcttttaaaaaaacagaaaaatacaatagtaatttccagatcaattcttgagagagcatctgcttactttctcataaagataaatttacctttgttttgaaaggcaaagtgcctgatcatggacagacactctttgagaagcaagacagcaggacaacaggaactataggtttggttatagcaattcagtgaaaagggaaaccctgcattgacctaacaaaaggacaatgatctcagagttttggttcttcacagcttaatggagttaaataatttcactggagacaaagtcaaccagagagaagagtaaaatggcaatcagccacaagcaggtgacctacaagacagctgaaatacaattgaaaagagcagttttgtgttccaccagaagcccagctccagtctgtaggggaaccagggagaatcaagaattgtggaaagtcctaccttggtccaaaatagcccaaagtatccttataggtttggcagtttctagctttaaaacaaggagagcattcatgactacagagcaacaactatgaagtgtatctacaagctttatacaaaaatgtgtcttgtcatttctacaagttccctttataccaggaatgatatataatcaattagagctcactggggtcaccctagactccagcaagttccactgtgattaaccaaacccaaaaaagacactatctcctaacagccaataataagtatagtttaaaaattacaaagtactcccttacttagactccaaggacagcctattgtatctggcctctcctaccaaactcctcatcctgggactataacatcatgacagtgatggtttctattattcaactttatgtcttacctgtaaggctcacacatattttatcatttagatatttggaattttttgtataagaattcccaagtcatgcccctttctctccattgtcgatatttagcatctccttacatccctattcctgcttgggtgcaactatgtaggtcttacgagcacaattaacttgtcttagcctgtttgtctcttctcttgttacatctatcaggaccatagatcttccttctttctctcactgtcactcttacccataaacaattctatgcaatcaaaatcatgtttacttttgagagtgaaggaacatatcctgcatgttacagaacaaataactcattaaagatgagcatgtggtggaaaaaaaaagaaaa

SEQ ID NO: 119013 - DNA, 1949 bp, Homo sapiens
  Payload ID: 3316
  Gene Symbol: C4orf19
  Gene Name: chromosome 4 open reading frame 19
  Uniprot ID: Q8IY42
  ENST ID: ENST00000284437
  CDS Start-End: 179-1123
acacaaccttggacattagagcctgtccgtctgatctagagaaggaatgttgctggggaaggaaaactcagggcgaggtgagagaggacagaacctctaaccaggaagaggctgtccccgccaagctccggagaggcgcggaagcatgaccctcaggtggtaacagaaaacaatccagatggggtgcaggtgctgtaaaataatacaaagctatctctttgatccagttcaagtgccctctcctggctatgtcaatgaagtcaacagctgcaagctagatgaagacgacactgataaattaaaaggcaaatggagcagtgaagtcttggtgcagaaaaatgaccctcagaggcagggctcaaagaagactgagagcagcagcaggacagctgatccatgggagccctgctggcctcaccaagggccgctcccacagggggacgctggaggggaacaccatgcctgcggtgtcaacggcatcggccctgctgccactccacagcccactgggaattccagccccacccaggatgacaggggctcctgggccagtactgcaaatactgttcccccaactcaacccttcctggaaggagggggcaccaggaaacaggactgtgtgctgctggcctcagaagggacccaagtcatgagaaatggagactccagagctccttctgaggcagaaagttttgccttggaagtacaagaccatgtcttccagataccagccccagattaccttcagcattggggcccagctggagacaacgttgatcataatgaaaaggactgtgttttcaagaaccatactgaggatgaatccctagagggaattcagcccccagtgggggagcatggtttgaatacgcccttctctgtgaggagaagctgggattcattgaatgaggatgtggaaacagaagttctaagcatctgctttaatgagaagggtcctgttcatgccatgcctgtggttgactcaggaaacaggcaggaggatacccatggctccgatggagatggggatggggagattgtggacgaggatgcagcggtggcggaggcccttgcagctttagaagctgctactgcaggagaagatttggatgagactgattaggggaggggatttgcacagggaggtaagctggtgtcatgctgagcatgcagatgcatttgctccctggatgcatagcaggtgattctgccagcatgcaccagtgcagccttaccagttgtttacatccagcatctgttctgattgtcagcatctgtcccatgctgcttgtcacatatctggagtttcactctgtgtagatgagctgtcattcaggacactaggagaaaaatctgagtgggtcattgtgcccatatccacagaaaatgcagaagttgaacagcttgcttgacaaccctcaaacatctttgagcacctggtacagatgtttatgagaatactctaagatctcaacccttgatcccaaaggcacacaatcacagagcattccttttgactgtaaactgtttaccttgcttttgagagccaaacattgtacccaacctggaaaaagtaactaccccaattaaagtgcctcatgtgtccccagagcatggcttaacttcagggacaatcacccagggaactaataactaaccagttgttcaacagcgggttaagctcagcagttttcacagtagagcagaagtccccaggaaacaaagggttagtcattagctgagatgttgattttaaaacaccttgaccttaacttttttacattattacttttaaatctcctttgggattggggaggctggccaaaataagtcttaaaactgcttatgtcatatttggattttaagttcatgacattcggaacagcaaagccatatatgcaatgtttttatgccattaaatgtctgattccaattaaaatataacaacg

SEQ ID NO: 119014 - DNA, 1943 bp, Homo sapiens
  Payload ID: 3316
  Gene Symbol: C4orf19
  Gene Name: chromosome 4 open reading frame 19
  Uniprot ID: Q8IY42
  ENST ID: ENST00000381980
  CDS Start-End: 173-1117
cgcggagccgctagcgtctcccggcgcggctgcccgaggccggcgaagccatgggcgccgggaccccgccgccgccgccgccgccgccgtctggccccaggaagagaagttaaacttctagagaaacctaacagacaatatccacaacaggtggtaacagaaaacaatccagatggggtgcaggtgctgtaaaataatacaaagctatctctttgatccagttcaagtgccctctcctggctatgtcaatgaagtcaacagctgcaagctagatgaagacgacactgataaattaaaaggcaaatggagcagtgaagtcttggtgcagaaaaatgaccctcagaggcagggctcaaagaagactgagagcagcagcaggacagctgatccatgggagccctgctggcctcaccaagggccgctcccacagggggacgctggaggggaacaccatgcctgcggtgtcaacggcatcggccctgctgccactccacagcccactgggaattccagccccacccaggatgacaggggctcctgggccagtactgcaaatactgttcccccaactcaacccttcctggaaggagggggcaccaggaaacaggactgtgtgctgctggcctcagaagggacccaagtcatgagaaatggagactccagagctccttctgaggcagaaagttttgccttggaagtacaagaccatgtcttccagataccagccccagattaccttcagcattggggcccagctggagacaacgttgatcataatgaaaaggactgtgttttcaagaaccatactgaggatgaatccctagagggaattcagcccccagtgggggagcatggtttgaatacgcccttctctgtgaggagaagctgggattcattgaatgaggatgtggaaacagaagttctaagcatctgctttaatgagaagggtcctgttcatgccatgcctgtggttgactcaggaaacaggcaggaggatacccatggctccgatggagatggggatggggagattgtggacgaggatgcagcggtggcggaggcccttgcagctttagaagctgctactgcaggagaagatttggatgagactgattaggggaggggatttgcacagggaggtaagctggtgtcatgctgagcatgcagatgcatttgctccctggatgcatagcaggtgattctgccagcatgcaccagtgcagccttaccagttgtttacatccagcatctgttctgattgtcagcatctgtcccatgctgcttgtcacatatctggagtttcactctgtgtagatgagctgtcattcaggacactaggagaaaaatctgagtgggtcattgtgcccatatccacagaaaatgcagaagttgaacagcttgcttgacaaccctcaaacatctttgagcacctggtacagatgtttatgagaatactctaagatctcaacccttgatcccaaaggcacacaatcacagagcattccttttgactgtaaactgtttaccttgcttttgagagccaaacattgtacccaacctggaaaaagtaactaccccaattaaagtgcctcatgtgtccccagagcatggcttaacttcagggacaatcacccagggaactaataactaaccagttgttcaacagcgggttaagctcagcagttttcacagtagagcagaagtccccaggaaacaaagggttagtcattagctgagatgttgattttaaaacaccttgaccttaacttttttacattattacttttaaatctcctttgggattggggaggctggccaaaataagtcttaaaactgcttatgtcatatttggattttaagttcatgacattcggaacagcaaagccatatatgcaatgtttttatgccattaaatgtctgattccaattaaaatataacaacg

SEQ ID NO: 119015 - DNA, 828 bp, Homo sapiens
  Payload ID: 3316
  Gene Symbol: C4orf19
  Gene Name: chromosome 4 open reading frame 19
  ENST ID: ENST00000508175
  CDS Start-End: 126-242
gccatgggcgccgggaccccgccgccgccgccgccgccgccgtctggccccaggaagagaagttaaacttctagagaaacctaacagacaatatccacaacaggtggtaacagaaaacaatccagatggggtgcaggtgctgtaaaataatacaaagacagagtcttgctgttgtcaccccggctgaagtgcagtggcatgatctcggctcacggcaacctctgcctcccgggttcaactgactctcctgcctcagcctcccgagtagctgggactacaggtgcccgccaccatgcctacctaatttttgtatttttagtagagatggggtttcaccgtgttgtccaggctggtctcgaactcctgacctcatgatctgcccaccttggcctcccaaagtgctgagattacaggtgtgagccaccgcacccggccaagaaatactttttaaagatataattgtacctccattgatctgaactagcaatcacagctgctctggagtctgcaagtctatgaccttcatctacctggaagaaaactgaatggctcacacacctggacctgatccagacagagccttaaaatccatcagctgctcatcagatgatcccatcggatgccaaggaggccatccaaaggctggaatgatcagttctgtgagctattgagctatgtgaagaaacggcggttgatttgctttcttgccaagaaaagcaaagctccctcacactccacggccactgagcatgtaagctcccaagtataaatttcttcccatccaagccctctcactacctagccctgagatatggggaacattaatcc

SEQ ID NO: 119016 - DNA, 895 bp, Homo sapiens
  Payload ID: 3317
  Gene Symbol: C4orf22
  Gene Name: chromosome 4 open reading frame 22
  Uniprot ID: Q6V702
  ENST ID: ENST00000358105
  CDS Start-End: 50-751
ctgccctcctgcttccgttgctagggacgcttcggccgaggataccgcaatggatcaggaagaggggctgaaggccttggacaatattgtcactcaattcaacgcctatgaagatttcctggactcgcagatcactactgtggacttgtactacctggaggatgaaaccctggcccgccagttggtggagctaggctaccgagggactggagagagagtgaaaagggaagattttgaagcaaggaaagcggctatagagattgcaagactggctgaaagagctcagcaaaagacgctaacaagtgctggtaaagacctacaagataattttctgacggccctggcaatgagagaagaagacaatcgcagtggaaaactgagttccgtgatctttattcgtgacagaaattctcatgggcaagagatatcaggatacatcgactatgcccacaggctaaagacggaagattttgaagtctactttactggaaaaaaaagacttcttccaaggcctacagatataagcttttacaactgggacgctgatattgctgttagtaattcaagtcccaactatcaagtgattgccgataatccagaaggcttacttttcagatacaaaagagacagaaaaattcttaatgtggacccaaaggcgcagccaggtgacaactctactagaatcactatcctgacagaactctacgtacaagctgtcatttttgaccacatttccagaaggaagacttaagtaccaacatgttaatttcctaataatttgctaaatttaaataaattccgtagacagagcaaattagaataataaatgagccctgtagctggaaggcaaattagaacaataaagttaataaagaagttagaaagaaaactgtaa

SEQ ID NO: 119017 - DNA, 3349 bp, Homo sapiens
  Payload ID: 3317
  Gene Symbol: C4orf22
  Gene Name: chromosome 4 open reading frame 22
  ENST ID: ENST00000513920
  CDS Start-End: 2-472
aatggatcaggaagaggggctgaaggccttggacaatattgtcactcaattcaacgcctatgaagatttcctggactcgcagatcactactgtggacttgtactacctggaggatgaaaccctggcccgccagttggtggagctaggctaccgagggactggagagagagtgaaaagggaagattttgaagcaaggaaagcggctatagagattgcaagactggctgaaagagctcagcaaaagacgctaacaagtgctggtaaagacctacaagataattttctgacggccctggcaatgagagaagaagacaatcgcagtggaaaactgagtgctggagtgcaatggcaccatctcggctcactgcaacctctgcctcctgggttcaaggaattttcctgcttcagcctcccgagtagctgggattacaggcatgcaccaccacacccggtccgtgatctttattcgtgacagaaattctcatgggcaagagatatcaggatacatcgactatgcccacaggctaaagacggaagattttgaagtctactttactggaaaaaaaagacttcttccaaggcctacagatataagcctgagaaaaaggattcttcagagacaagataagtaaattcccagtgacattcctttttaatgataagtagtgcctaaattttgttaacctcatgaggcttttgcagcacttgggacttggtctgtccagaagcctcaagaactgctcatctaacatgttttcctccacttttctttggtcaccagccaaagtgctggcccctgatcagctcaccctcatttctctcatctctgtcctattctgggacacccattccttaacacccatcattctttttactaccaatgcttgccttttattctagaacccttatctatcacctagcatctaccctacactgccaatctattcacagatgggttcttctactcccttctaaatagcatgcaagctaaaactttttattccctcttacttaactatagaaccccaaaattaagtagcagcattatgctttaactctccactgctgtattcagatcattatttgatgattataacaatacctacctcctctgagatgcctgttatcctctatccacccttactgatattatctgaagacttccttatccatcacctttttttgatttgtttgtttttgagatggagtctcgctctgtcgcccaggctggagtgcaatggtgcaatcttggatcactgctacttccacctcacgggttcaagcaattctcttgtctcagcctcccatgcagctgggactacaggcacataccaccacgtctggatactttttgtatttttagtagagacagggttccaccatattggtcaagctggtctcaaactcctgacctcaggtgatccaccggcctcagcctcccaaagtgctgggattacaggcgtcagccaccgagcctgactcccatctccactgtaatggacttagctctttcctgtcctacctaggataacatttcatttaacttctctcttgcagtaatgcccattgcccatgtctttttgatttttggttgtatctgacctactaacattccaaagtcaatcgatccacacatttttttcactgcacttgtagctaccccactgggtactgctgaaggaaattttaggaaatttcacaaaactgtggattgctgtgctaataacttatggtttccaaactcaattgagtcctttatgattcttaaaacttatgttcaaaattaaattcattttaattcctgaagcctgctattgcttctgtgtcacctgtcttggcaaatggcatcacccttgaaaccaaaggcaaaatccagatgttatcctagacctcttgtttttcatcaccacctttataactaataatttattaaaaacactgaattctattatcttagcagctttgttttgttaaagcaaatttaagatatctcatttcacctgcaaacacttcagcatggatctttatctgataccatttttaaagaaaacatcttggcattatcatacctaacaaaatactttccttaatgtcatctaatacctagttcacatttcattttcacccttaataacatttaattgactgtctaatttattttttatagtttgtttgaccagtcaaaattcaagtgattttgtgttttgtcttactatatcttgacctcttgcatgcttttttttttttttacaacagtccccctcattctttttatcttctacgctattgatttgttggagaaaccaggtcctgataaacattgtcctcaaatgtctcacattctggattttactgatccagtaaaatcgtgctgtttattctactatctatgttcctctattccctataaactgatttgattaaatgcagtataatttttttctaagtaagaaattttaatatgtgatgctctgtactgactatcgccccagttttagatctcctgagctcgatcagtaggttcaagtggtgtcagtctaattacttcattacaagattttccataaaatttcacccaatggtgttagcatctattattgaaagctacctaaatgtttttactaagggttgaataatggtgaatctataattatattatttatcctgaattttttaacttgaattcttctatagagaaaaacttttccttatcacttatttggttaccttgaaataaattcctgcagaaatacaaaataaatatttttttcatttatagaaaatttgaagccagaaacacaaaagagtgtagagattataccaaattatttttcagagtagttgtatcattttgtatccatgagaaatactgcataagtgatctggttatccctcatcctcaccaacacaagatattaacaaactgttctttcccactgtagtgagttataaatgatctctcaatgtggttttcatttttatttacttgattatttattagattgggtatcttttattggctgttcagattttctttctgtgaagtacctattaagatttttccctgttatttcaagtgagctattctttttcttgcaaattataagattcgttttatttatttttggatattgattaatcctttgcctcttatgtgtatttcaaaatatcatctctctgtgtgtagttcttcttcttttttttttttcattgattttgatggtcagaaatcagaagttctgatagtcatcttaatgcattttaaactttacctctgcagtttgtgcttttgtattttgtttaataaaccccatcctttttggaagtcataaatatactgtcttatagg

SEQ ID NO: 119018 - DNA, 753 bp, Homo sapiens
  Payload ID: 3317
  Gene Symbol: C4orf22
  Gene Name: chromosome 4 open reading frame 22
  Uniprot ID: Q6V702
  ENST ID: ENST00000508675
  CDS Start-End: 1-753
atggatcaggaagaggggctgaaggccttggacaatattgtcactcaattcaacgcctatgaagatttcctggactcgcagatcactactgtggacttgtactacctggaggatgaaaccctggcccgccagttggtggagctaggctaccgagggactggagagagagtgaaaagggaagattttgaagcaaggaaagcggctatagagattgcaagactggctgaaagagctcagcaaaagacgctaacaagtgctggtaaagacctacaagataattttctgacggccctggcaatgagagaagaagacaatcgcagtggaaaactgagtctaaatcaacaggagactgatgctgctcatatcttgaagaagcaactggcatccgtgatctttattcgtgacagaaattctcatgggcaagagatatcaggatacatcgactatgcccacaggctaaagacggaagattttgaagtctactttactggaaaaaaaagacttcttccaaggcctacagatataagcttttacaactgggacgctgatattgctgttagtaattcaagtcccaactatcaagtgattgccgataatccagaaggcttacttttcagatacaaaagagacagaaaaattcttaatgtggacccaaaggcgcagccaggtgacaactctactagaatcactatcctgacagaactctacgtacaagctgtcatttttgaccacatttccagaaggaagacttaa

SEQ ID NO: 119019 - DNA, 777 bp, Homo sapiens
  Payload ID: 3317
  Gene Symbol: C4orf22
  Gene Name: chromosome 4 open reading frame 22
  ENST ID: ENST00000514249
  CDS Start-End: 28-288
agggacgcttcggccgaggataccgcaatggatcaggaagaggggctgaaggccttggacaatattgtcactcaattcaacgcctatgaagatttcctggactcgcagatcactactgtggacttgtactacctggaggatgaaaccctggcccgccagttggtggagctaggctaccgagggactggagagagagtgaaaagggaagattttgaagcaaggaaagcggctatagagattgcaagactggctgaaagagctcagcaaaagtgtcagactctcagttaatctttcctagatctggacaaagaaaagcctcaaagaaaacctgtttccatcaatgctgattctctacagatgcaaatctctcccacaaaaggacgctaacaagtgctggtaaagacctacaagataattttctgacggccctggcaatgagagaagaagacaatcgcagtggaaaactgagtggtatacaaaaatggttaaaactctgtccaagctttcaagaaacaacagtggacaacatcaaattgacaccaaggagatagatggatggtgagtttacttctcactaagaagataagggagacttcacctagaaagtgcggtttaaactgcaacttaaaataagcagttttctggtatacagctagagggaaaggtcatttcagagggaggaaactggactaacaaagggcgataggaggagagcagaaagtattacagagggaagaaactatgggtcaggaggagaagggagctacctgaagtcca

SEQ ID NO: 119020 - DNA, 228 bp, Homo sapiens
  Payload ID: 3317
  Gene Symbol: C4orf22
  Gene Name: chromosome 4 open reading frame 22
  ENST ID: ENST00000621014
  CDS Start-End: 1-228
agcttttacaactgggacgctgatattgctgttagtaattcaagtcccaactatcaagtgattgccgataatccagaaggcttacttttcagatacaaaagagacagaaaaattcttaatgtggacccaaaggcgcagccaggtgacaactctactagaatcactatcctgacagaactctacgtacaagctgtcatttttgaccacatttccagaaggaagacttaa

SEQ ID NO: 119021 - DNA, 1874 bp, Homo sapiens
  Payload ID: 3318
  Gene Symbol: C4orf26
  Gene Name: chromosome 4 open reading frame 26
  Uniprot ID: Q17RF5
  ENST ID: ENST00000311623
  CDS Start-End: 36-428
atcaggttcaacgcagtgactgctcagtagaagccatggctcgcagacactgcttctcctactggttactggtatgctggttggtggtaactgtggcagaaggacaagaagaggtatttacgcctcctggagattcacaaaataatgcggacgctaccgactgccagatctttacactcacccctccacctgccccgaggagtccggtcacaagggcccagcccatcacaaagacacccaggtgtcccttccatttttttccacgaaggcccagaatccattttaggtttccaaacagacctttcgtcccttcaaggtgtaaccaccgttttccattccagccattttattggccacaccgttaccttacttataggtatttccccagaagaagactccagagaggaagctcatctgaggaaagctgagagggaagagaaacccaaacatactgaagcaaaaaaaagcctatccttcagaaaaaagcaacaaaaagatttctgttttatctttcgaaactaaaactattggatttgaagattaagtatcctaaacatcactgactagaaactgttctctttgtcagcagtgaagatattggatcataggttattgatggttgcaaaattggacaataaccacgttatttttatcctcaacctcttatggtcacaggatatttatgcaaataaaatctttaaatgggtggctctagtaattcctatccatactaagatgctgagagaatccatctcctcctctaaattaaacaggatttaaataaattgagatcattataaaccacacgaagaaactgatgacaccgtttttatactcattggaaaacatacagagcaaggtgcattgacaaagtaaactttaaaagaaattataaagcttaaagcaattaaaaagttatgaggagtctgactgtagctaatactttaaagatataaactgacttgtctaacccaaataataataattattattattttcttggagacagaatttcactcttgttacccaggctggagtttagtggtgctgtctcggctcactgcaacctctgcctcccgggttcaagcaattctcttgcctcagcctcccaagtagctgggattataggtgctcgctaccaagcctggccaattttttgtatttttagtagagatggggtttcaccatgttggccaggctggtctcgaactcctgacctcaggtgatccacccacctcggcctcccagagtgctgggattacaggcatgagtcactgcgcccagccccaaataattacttttaaactatagtatctaaatttactttaatgttgacttcaactgatgcaaattaatttgataattttctcactgtttcccgttatcattacatagatgctggctaaaataatatacttcctctcaaacttttaacgtaattccaggttcaaaatgcctgattaaactgctacaagaatattctggtacctctagaactccacagagataagttcactcaactcttggaaccttgtattctcagggtgcaatatgagaaacaaatcccacagattgcattgattggttatttgttttggccactctgtaaaacacatcttcctgtttatgccacttatcttgcctgtaacataagaactttagttctgcatatgtggtcagtggtttgcactttttcctcccaagatctacatgcaaaagttgctgttgctgctgctgctacaaaaacagaaaaaaaaaaatcaggatgaagacatgaaaggactttgggaatggttgccctaaaaaaggaaagagagataaaatcatcatgctatgtttctttgctttattaaaatgatcaaaaaagaaaaaaa

SEQ ID NO: 119022 - DNA, 560 bp, Homo sapiens
  Payload ID: 3318
  Gene Symbol: C4orf26
  Gene Name: chromosome 4 open reading frame 26
  Uniprot ID: Q17RF5
  ENST ID: ENST00000435974
  CDS Start-End: 19-549
gactgctcagtagaagccatggctcgcagacactgcttctcctactggttactggtatgctggttggtggtaactgtggcagaagcactgtccactttctatctccagcagcatattaatttgcacatggacaagaagaggtatttacgcctcctggagattcacaaaataatgcggacgctaccgactgccagatctttacactcacccctccacctgccccgaggagtccggtcacaagggcccagcccatcacaaagacacccaggtgtcccttccatttttttccacgaaggcccagaatccattttaggtttccaaacagacctttcgtcccttcaaggtgtaaccaccgttttccattccagccattttattggccacaccgttaccttacttataggtatttccccagaagaagactccagagaggaagctcatctgaggaaagctgagagggaagagaaacccaaacatactgaagcaaaaaaaagcctatccttcagaaaaaagcaacaaaaagatttctgttttatctttcgaaactaaaactattggat

SEQ ID NO: 119023 - DNA, 635 bp, Homo sapiens
  Payload ID: 3318
  Gene Symbol: C4orf26
  Gene Name: chromosome 4 open reading frame 26
  ENST ID: ENST00000511093
  CDS Start-End: 36-158
atcaggttcaacgcagtgactgctcagtagaagccatggctcgcagacactgcttctcctactggttactggtatgctggttggtggtaactgtggcagaagtagagacggggtttcaccatgttagccaggatggtctcgatctcctgacctcgtgatctgccagcctcggcctcccaaagttctgggattacaggcatgagccacagcgcccggccaaaatccgcacatcttaaaggacaagaagaggtatttacgcctcctggagattcacaaaataatgcggacgctaccgactgccagatctttacactcacccctccacctgccccgaggagtccggtcacaagggcccagcccatcacaaagacacccaggtatttccccagaagaagactccagagaggaagctcatctgaggaaagctgagagggaagagaaacccaaacatactgaagcaaaaaaaagcctatccttcagaaaaaagcaacaaaaagatttctgttttatctttcgaaactaaaactattggatttgaagattaagtatcctaaacatcactgactagaaactgttctctttgtcagcagtgaagatattggatcataggttattgatggttgcaaaattggaca

SEQ ID NO: 119024 - DNA, 1725 bp, Homo sapiens
  Payload ID: 3318
  Gene Symbol: C4orf26
  Gene Name: chromosome 4 open reading frame 26
  ENST ID: ENST00000616557
  CDS Start-End: 36-293
atcaggttcaacgcagtgactgctcagtagaagccatggctcgcagacactgcttctcctactggttactggtatgctggttggtggtaactgtggcagaaggacaagaagaggtatttacgcctcctggagattcacaaaataatgcggacgctaccgactgccagatctttacactcacccctccacctgccccgaggagtccggtcacaagggcccagcccatcacaaagacacccaggtatttccccagaagaagactccagagaggaagctcatctgaggaaagctgagagggaagagaaacccaaacatactgaagcaaaaaaaagcctatccttcagaaaaaagcaacaaaaagatttctgttttatctttcgaaactaaaactattggatttgaagattaagtatcctaaacatcactgactagaaactgttctctttgtcagcagtgaagatattggatcataggttattgatggttgcaaaattggacaataaccacgttatttttatcctcaacctcttatggtcacaggatatttatgcaaataaaatctttaaatgggtggctctagtaattcctatccatactaagatgctgagagaatccatctcctcctctaaattaaacaggatttaaataaattgagatcattataaaccacacgaagaaactgatgacaccgtttttatactcattggaaaacatacagagcaaggtgcattgacaaagtaaactttaaaagaaattataaagcttaaagcaattaaaaagttatgaggagtctgactgtagctaatactttaaagatataaactgacttgtctaacccaaataataataattattattattttcttggagacagaatttcactcttgttacccaggctggagtttagtggtgctgtctcggctcactgcaacctctgcctcccgggttcaagcaattctcttgcctcagcctcccaagtagctgggattataggtgctcgctaccaagcctggccaattttttgtatttttagtagagatggggtttcaccatgttggccaggctggtctcgaactcctgacctcaggtgatccacccacctcggcctcccagagtgctgggattacaggcatgagtcactgcgcccagccccaaataattacttttaaactatagtatctaaatttactttaatgttgacttcaactgatgcaaattaatttgataattttctcactgtttcccgttatcattacatagatgctggctaaaataatatacttcctctcaaacttttaacgtaattccaggttcaaaatgcctgattaaactgctacaagaatattctggtacctctagaactccacagagataagttcactcaactcttggaaccttgtattctcagggtgcaatatgagaaacaaatcccacagattgcattgattggttatttgttttggccactctgtaaaacacatcttcctgtttatgccacttatcttgcctgtaacataagaactttagttctgcatatgtggtcagtggtttgcactttttcctcccaagatctacatgcaaaagttgctgttgctgctgctgctacaaaaacagaaaaaaaaaaatcaggatgaagacatgaaaggactttgggaatggttgccctaaaaaaggaaagagagataaaatcatcatgctatgtttctttgctttattaaaatgatc

SEQ ID NO: 119025 - DNA, 1230 bp, Homo sapiens
  Payload ID: 3319
  Gene Symbol: C4orf27
  Gene Name: chromosome 4 open reading frame 27
  Uniprot ID: Q9NWY4
  ENST ID: ENST00000393381
  CDS Start-End: 77-1117
tttgaacccggaagcggttggcggcgctcggaagcggccgcggatcggggaattctgctggcgctgcagctgcagaatggtcggcggtggcgggaagcgcaggcccggcggagaggggccgcagtgtgaaaaaacaactgatgtgaagaaaagtaaattctgtgaagctgatgtctccagtgaccttcgaaaagaagtagaaaatcattataagctttctttacctgaagatttctatcacttctggaagttctgtgaagaacttgatcctgaaaagccatctgattcactttctgcaagccttggacttcaattagttggtccttatgatatccttgctggaaaacataaaacgaagaaaaaatcaacaggcctgaattttaaccttcactggaggttttactatgatcctcctgagttccagaccattattattggagataataaaactcagtaccacatggggtatttcagggattctcctgatgaatttcctgtatatgttggtataaatgaagcaaagaaaaattgtataattgttccaaatggagataatgtatttgctgcagtcaaattatttttgacgaaaaaacttagagaaataacggataaaaagaaaatcaatctcttgaaaaacatagatgaaaaactcacagaagcagccagagaattggggtactcgcttgaacagagaaccgtgaagatgaaacagagagataagaaagttgtgacaaagacctttcatggtgcaggcttggttgttccagtagataaaaatgatgttgggtaccgagagctccctgaaacagatgctgacctcaagagaatttgcaagacaatagttgaggctgcaagtgatgaggagagactaaaagcttttgctcccattcaggaaatgatgacttttgtgcagtttgctaatgatgaatgtgattatggcatggggcttgaattgggaatggatctcttttgctatggctcacattattttcataaagttgctggccagcttttacctcttgcatataatctgttgaagaggaatctgtttgcagaaattattgaggagcatctggcaaacagaagtcaagagaacatagaccaacttgctgcatgagtaaggtggctttgattggtgtacagtatttcaaaggactagtattaaacttgtgatttttgttttgtttttaaggaatacaaaaaataaacatttactaaaaacgtttataa

SEQ ID NO: 119026 - DNA, 2960 bp, Homo sapiens
  Payload ID: 3320
  Gene Symbol: C4orf3
  Gene Name: chromosome 4 open reading frame 3
  Uniprot ID: Q8WVX3
  ENST ID: ENST00000399075
  CDS Start-End: 1-600
atgaccagtctaataaatagccccattaataggagaccattacagaatgtagagggaaataataggtgccaaaggaaggcaaaaaactatggaaacaaatacttcattcactgccttgatcttgagaaaataaccctctccccaagaagaaaacatgacatagaaggtggagacaagttaaatgtgaagttttcacaattgcggtcacggaggcagcggaaagccgagccaggcgcctgcgcgctgggaagagtaggttcagagtgcattccggaacccggggcgcggcgcactgcgcaggcggccggactccgctcagtttccggtgcggcgaacaccaaagtccgggaacttaagcattttcggtttctagggttgttacgaagctgcaggagcgagatggaggtggacgcaccgggtgttgatggtcgagatggtctccgggagcggcgaggctttagcgagggagggaggcagaacttcgatgtgaggcctcagtctggggcaaatgggcttcccaaacactcctactggttggacctctggcttttcatccttttcgatgtggtggtgtttctctttgtgtattttttgccatgacttgttcgctgatatctaaattaagaagttggttcttgagtgaattctgaaaatggctacaaacttcttgaataaagaagacaggactctcaatagaagaatttcacatctccaagggacccttcctttcattttacactttgttactaatttgcagaactctattaattgggtaggatttcacccattcctagctaagttcttaaaattaaaccctttggttcgtgtttaaaaactttcaaacatctgatggctttacaggggctgaatataaaagcatttgtacttaaaggtcttgtgtattcattaagaaatatagtaatgtcttttaatgttttaagagttgatcagggtttactatgatgcaagtaataggatgattaataagggaaggtttttatgaattcaaaagtcaattattcaaaagcagggaaagattttgagagagggaacaaagtattcttagattgcgtagaagctgctaggttccagttttaatttttaggtttagttggactctgttatgaaaagataggttatgggtgggcgacaggttgatacagtcttagaaaaagcaggtaatatcaaagtattggaaagctagcatgcatgccctcttacctgggtatcttcccccttttttccttttaaactcttgagcctcctataacgaaggattatgtgtttcaaacctattttttttttactgtttcattaagtgtgcttgtgcccaaaatatttacttgtataatatctgtaacttgcttaaatacttcagcaaagtcagcatatttactcattcaacaaatatttgagccaggcattattttagacacagcagtgaacaaaacaaaaaggcattcttgccttcatggagcttacattcttattgttatttaaatctaaatgttataaaacaagaatttatattctagggttgatcagctagtatttaatcaaaaaggccacactcccatagcagctactctaagctgtagtagctaataaaaaatattaatgttggccgggcacagtggctcacgcctataatcccagcactttgggaggccaagggtggtagatcacttgaggtcaagagttgtgacaccagcctggccaacctggtgaaaccctatctctattaaaaaatacaaaaaaatacaaaaaaattagctgggcatgttggcatgcacctgtagtcccagctatttgggaggctgaggcacgagaattgcttgaatccgggaggtggaggttgcagtgagccaagatggggccactgcactctaacgtgggcaacagagaccctgtctcaaaaagaaaatattcctgttagccctaaaggctttacatgaggaatggtagaagtggtcttttgtttaaattagttgcattcagcatatatgaattgtcttaaatattttggggatactcccccgccttttaaacagggcataagatctggtaaactctctgtatatcttcctacctttcaaaatcgttcttagggttagtcaagtctggaatataattgctgactataaagttagcaattatgcttttaaggtgttgtcacatcaacctaaagagaaccatctatggaaggtatggttgaaacatctgtaggaacacagaactgggatttcactgagtttaccaaatcaactgtgtgaactgtttctgcactgcttgctaatggtttcatctaataaatgtttacttatatagctgagtttggttttattctaacaaattacctggtggtgtgattgtgaggtgattaacagttctcacatagtttactgttaggtcacacacagacttccgatcataatccatactgcctttttgagcctaaaatcagcctactaccacaattaccaaatattctgaaaatttctagtatggtgaagatggagagatcttggtgtgaaggttaattttatatgtcatcttgattatgctaggagatgcccagatttctgggtttgtccatgagggtgtttccagaagagattagcatttgaatcagtagactgaataaaaaagagccacccactccactgcgggtgggccaaccccttgagggcctagctggaataaaaaggcagaggaagggcaaattctgtcttctctctgcttgaacagggacatccatgttctatccttggacattggttctcctgattctctggctttcagacatggaccagggcccctggttctcagacctttgggtttggactggaactacaccattggctttcctgggcttactgtctgcggaaagcagattgtgggacttctcagcctccataatcacaagagccaatccctcataataaatttatttctatata

SEQ ID NO: 119027 - DNA, 667 bp, Homo sapiens
  Payload ID: 3320
  Gene Symbol: C4orf3
  Gene Name: chromosome 4 open reading frame 3
  Uniprot ID: Q8WVX3
  ENST ID: ENST00000504110
  CDS Start-End: 387-587
aggagaggtgacctcgtgcagtttcagggaggagtccatcacctgactggactgggcctttcagggggacgagaacgtatttcttccaacgaaacctgaataaccagctatctgcctgggacgccgcgaggcagaagtaggcgggcccattgacttagtgtcaaggcggaggccgcgcttcatgccagcggtcacggaggcagcggaaagccgagccaggcgcctgcgcgctgggaagagtaggttcagagtgcattccggaacccggggcgcggcgcactgcgcaggcggccggactccgctcagtttccggtgcggcgaacaccaaagtccgggaacttaagcattttcggtttctagggttgttacgaagctgcaggagcgagatggaggtggacgcaccgggtgttgatggtcgagatggtctccgggagcggcgaggctttagcgagggagggaggcagaacttcgatgtgaggcctcagtctggggcaaatgggcttcccaaacactcctactggttggacctctggcttttcatccttttcgatgtggtggtgtttctctttgtgtattttttgccatgacttgttcgctgatatctaaattaagaagttggttcttgagtgaattctgaaaatggctacaaacttcttgaataaagaag

SEQ ID NO: 119028 - DNA, 8901 bp, Homo sapiens
  Payload ID: 3321
  Gene Symbol: C4orf32
  Gene Name: chromosome 4 open reading frame 32
  Uniprot ID: Q8N8J7
  ENST ID: ENST00000309733
  CDS Start-End: 185-583
gagccagtgacaggaggggccgggctggtacttcaggcgcccaggccggcggggcgcgctccggcggctcctgtcagcggcgggtgcggcggatcccagggcagccttcgggcggcggcgctgcctggtgcgtcgcggcgtggtcctccggcggctgtccggggcggtaggagttggctgcgggatgtgctcagccggggagctgctgcggggcggcgacggcggggaacgcgacgaggacggggacgcgctggcggagcgggaggcggcagggaccgggtgggatcccggggcgagcccgcggcggcgcggacagcggccgaaggagagcgagcaggatgttgaagactcacagaaccacactggtgagccggttggagatgactacaagaaaatgggaacactttttggtgaactgaacaaaaaccttatcaacatgggcttcacaaggatgtattttggagaacgaatagtggaaccagtaatagtcattttcttttgggttatgctgtggttccttggcctgcaagcccttggactagttgctgttctttgccttgttattatttatgtgcaacagtaaaacatggccgaattgaattgtttgacatttggtagccatatatgtaattgaagaagttatatatttcactttttgacaaccgaaaaagtttgccttgtttcaaatcatgtgctggctgttttgtaagtaaatttatacatggatgtcacttaaaactaaactcttgatcataacagggttgaatatatattttgaatatacattagcttattcaaaactcttgtttcactactgtgatctctgtctcctttatacacctctatccccatgccaaatcttaagtaacaccaccagaaagtgaacagggaaaataacaggacatggaattcaaatcaagcaatatagttcttataaagagttccaataaaacatttcagaagaaaaagtatgaaacaagctaaaagtaagtttcacttagaaaacttctccccactcacactccccaccaaataatctcatattatttgggaaatatttggatttcaattgtccctacccagcctaaactaaggtaaatgataattagcatacactaccttaatattgtgatgaaaatcagtaaagatagaacgttttctaaaggtcaaaaataatatatttattattactggggaaagctcccaggttaaatataacttttttaaaatgtaacatttggacctagacctactttaatatatcatttgaagtttcagacaattttggtgctaattactttttgtgagtttttaaagtctcatagcctagttgactgcaccctatggtaatgccatattttcttgtatctaacaagttgcatattttttcctagagagacattttcagtgtatttttttttagaaatttataattttatagttctttcataacacttattctgagttttgaaacaatgtatttcctatcttgacatggattttttcacaaaaaatttgtattttactgttgttttcaggaaaaaaatcagatcatttttctttgatatctatatcagaaaggtacaatattaacagtataaaaccaaatgcttaaatttggaacttagccaattttgataatctttttctaaggctaaagtcacatcagtaattggctagccatgttattaaggtgtcttaattcagcattttcaggttttatattgaaatacgcatttctttaaatattctttgaaaatggagaatggctttagtgatattttgggttttgttagagaacctaaaatctttacactttcatctcaaagattataaaggaaaggggggtagttaagatttagaattcaagttaaatttcagaaattggggcagtcaggcatttgtatctttggtagggcaacaagtaaaacatgtagagtgcttgctatcccacttcataaagcttttacccaatcttatttctaaacctctgtgcattcttagtgtcttctcattctgaaacagaaaataaggaaaaacatttaacttagttttctaaaatcagataatcctaaacaaaaatgttagtcagggtcactaaaaagtattgcacatttatataaatacagtccttttaaaatttgacttttaaaaaacaaaagactttgtacgatattgtgtttttattgcttttgcaatatttttatagtagcctttatgaactcagtataagtgcaagttgtttgaaaaggtgtttttattagtgcacaatagaattgtgaggttttcaatagatgtcatgagattttgtatatctacataaaatatcagtacatttttttctaatgctactggaaattttacttttcctttgcaacacataaatgatatgatgtacaaaataacagctctggttccaccagtacctaatgttgaaaacatttttaaagtaatttttaatactaactatttagtatactgtcagtactgtacatctgcacactggtgttaatagggtatatattaaattatataaagaaataagatattttgctgttattctttctacatatattattggtcagtacatcaaataatatttggctttgatatgggaaaaaacaaactttgcctatgtaatggaaataaaatattttcttttatgaaatatattagaatgcagattatactaatatcctgaaataaaactggtaatttatttggttcatggtataaagaattagattgggccgggcgcggtggctcacgcctgtaatcctagcactttgggaggctgaggcgggtggatcacaaggtcaggagatcgagaccttcctggctaacatggtgaaaccccatccctactaaaggtacaaaaaattagccgggcctggtggcaggtgcctgtcgtcccagctactcaggaggctgaggcaggagaatggcgtgaacccgggaggcagagcttgcagtgagcactccagcactctgggtaacagagtgagaccccatctcaaaaaaaaaaaaaaaaaaaaaaaaattggattgaaaatgattctcatcatttcaatctcaaatacaagccagttttagaaactgttattgcttatgaataaagaaatagaagttacaatgctaaggttattacataatgcatactcatatggccagtaattcaaaagaaaaaggtcgaagtctacaaataaacagactgtagatgagtaaatccatttttcttaaagtaaaaactctgtattttgtagaattctgtcctctcataccttaagctgtcatgggcaaggtattttcccattcctggctacaggcagatcattcctagtccagtagtgtgctggagcaagcttgcactggcttacaagagccaactgtgaacattttttctgccttcagtgctgtcaagttggtagtttgaaattggccatggtgagagtatttacaccaaaaaaattagtaaacactgcaaatcagatcttttttttttttttttccttgaaagccagctgttaaacatacatcagcacaccctagaggccacattcccatttctattcctacagatacgaaagtaaagaacagaacacattttgtgaaataaaagaaagcatatgaggtaaatccccatcgacccacccaaaactgaatctggctctttcccttgtgggtattatggttcatggttatcttctgaccaacaaatctctatttaatcatgttttgaccacagaaaatctctctaggctgtcaccaagctgtaaatccactaaagactatccaggcaatcaggaaaggcaaaacttacagaatgatagaggaaaaattacagtataagtaaaggtctgttgtaatatagaaagctcaaaatagtcaaagccaggtttggagcaatcaaaggctattcgtgtggttcatagattgttttaatagttattttacaaatgtttattaatttcaggtgtttaaaatgctttcattaccaatttatggctttacaattgaagggagaaaaaaaaatgtaagacggccaggcgcggtggctcatccctataaaagtgctgggacagcactttgggaggccgaagcgggcggatcacctgaggtcgggagttcgagactagcctgaccaacatggagaaaccccgtctctactaaaaaaaaaaaaaaaaaaatacaaaattagctaggcgtggtggtgcatgcctgtaatctcagctactcaggaggctgaggcaggagagtcgcttgaacccggaagccaaagtttgcagtgagccaagattatgcccttgcactcaatctgggcaacaagagcgaaactccatctcaaaaaaaaaaaaaaaagactttcatgcctggtaatagagttggccgagaagaatataaacttatttacaaactatgacttcaggagtattggtggattagaggtcatttgcaactcttgtctctctgcccaacatttaatttttggtatgcgttggagttcagtccaacagcctgctctcacatcactccacacagcagctcggcaatgtcaccactcccgtggctgcagagttaccatttgcatcctaacagctccccaatttgcatctctagatcagagcactgtacagaatttaagactcctacattcaattgcttgcccaatatttatttgcatttggttatcccatagtacccaagactcagcgtgtccaaacgagcgcagcatccttctcccaaatctttaattcctgtttcccatctcagcaaatgacacaatcctttccctaactgctcaagcaggagttgtagatgacatccttgactctgtgtttcctacactacctacatgtaaccaagtaccaaatctattttacttctaaaaatataatctttctacttctattcattcctagcatcactgagtccattctgccatcatctcacctggcatgctgagaatcctgattagcctccctaccttcattttccactttgtagttacagatctttctaaagaattattctaacatgattctgatatccttgacctaaatcttttcaatggctttctgttttcgttatgataaagtccttatgccttaatatgttttacaaggctcttcatgtactggttcttgcgtacctcatctctctatactgccactctccatttccaggattcaactatactgaacttttccccagttcctttaaagagacatgctttcttacttccagaactttgtacatgctttacttctttaactgctccctaccagactgaccaatatctacacagccttaagacctcaagtgagacatcatgtcctccagggaaacttctctgactcctttaaatccagttttggttcttcattatggcttggtttctcaagtgcaaccctgtgctttccaggtcagcacttctcatgctatattgcaatagcttatttgtcagctgctgctttaataattgattaattattaaattaatcaataggcttcacaagggaagagaacatgtctgtcattctataattgcattgctagtgcctaacacaatgcctgggacataataggccatcaaaatatttatcaagtaaacccacttcatctactcatggtcttcatatagaccactaacaaaaaagatctagagctggttgtactttgaagttctttgactccaaaagtatacttactgtgcacaaagagcatgggttgatgtatacattataatttataaagctattcacttctgataaaagaatactgctgttatttggatacatacacagtatttccactatacacttgtgtattttaggagaaaatgtattttcaatgtttggttgattcactatttttccaaaaaggatattttacaatacctacggtcactgatactaccagaacttcacttttgttcagtattttttaatagacctttatttactacattttaattttttaatttttttcttttattttattgttattatactttaagttttagggtacatgtgtacaatgtgcaggttagttacatatgtatacatgtgccatgctagtgtgctgcacccattaactcgtcatttagcattaggtatatctcctaatgctatccctctcccctccccccaccccacaacagtccccagagtgtgatgttccccttcctgtgtccatgtgttctcattgttcaattcccatctatgagtgagaacatgtggtgtttggttttttgtccttgcgatagtttactgagaatgatgatttccaatttcatccatgtccctacaaaggacatgaactcatccttttttatggctgcatagtattccatggtgtatatgtgccacattttcttaatccagtctatcattgttggacatttgggttggttccaagtctttgctattgtgaatagtgctgcaataaacatacgtgtgcatgtgtctttatagcagcatgatttatagtcctttgagtatatacccagtaatgggatggctgggtcaaatggtatttctagttctagattcctgaggaatcgccacactgacttccacaatggttgaactagtttacagtcccaccaacagtgtaaaagtgttcctatttctccacatcctctccagcacctgttgtttcctgactttttaatgatcgccattctaactggtgtgagatggtatctcattgtggttttgatttgcatttctctgatggtcagtgatggtgagcattttttcatgtgttttttggctgcataaatgtcttcttttgagaagtgtctgttcatgtcctttgcccactttttgatggggttgtttgtttttttcttgtaaatttgtttgagttcattgtagattctggatattagccctttgtcagatgagtaggttgcgaaaattttctgccattttgtaagttgcctgttcactctgatggtagtttcttttgctgtgcagaagctcttgagttgaattagatcccatttgtcaattttgtcttttgttgccattgcttttggtgttttagacatgaagtccttgcccatgcctatgtcctgaatggtaatgcctaggttttcttctagggtttttatggttttaggtctgacatgtaagtctttaatccatcttgaaataatttttgtataaggtgtaaggaagggatccagtttcagctttctacatatggctagccagttttcccagcaccatttattcaatagggaatcctttccccattgcttgtttttctcaggtttgtcaaagatcagatagctgtagacatgcggcgttatttctgagggctcttttgtgttccattgatctatatctctgttttggtaccagtaccatgctgttttggttattgtagccttgtagtatagtttgaagtcaggtagcatgatgcctccagctttgttcttttggcttaggattgacttggcgatgcgggctcttttttggttccatatgaactttaaagtagttttttccaattctgtgaagaaagtcattggtagcttgatggggatggcattgaatctataaattaccttgggcagtatggccattttcacgatattgattcttcctatccatgagcatggaatgttcttccatttgtttgtatcctcttttatttcattgagcagtggtttgtagttctccttgaagaggtccttcacgtcccttgtaagttggattcctaggtattttgttctctttgaagcaattgtgaatgggagttcactcatgatttggctctctgtttgtctgttattggtgtataagaatgcttgtgatttttgtacattgattttgtatcctgagactttgctgaagttgcttatcagcttaaggagattttgggctgagacaatggggttttctagatatacaatcatgtcatctgcaaacagggacaatttgacttcctcttttcctaattgaatactttttacttccttctcctgcctaattgccctggccagaacttccaacactatgttgaataggagtggtgagagagggcatccctgtcttgtgccagttttcaaagggaatgcttccagtttttgcccattcagtatgatattggctgtgggtttgtcatagatagctcttattattttgagatacgtcccatcaatacctgatttattgagagtttttagcatgaagcgttgttgaattttgtcaaaggccttttctgcatctattgagataatcatgtggtttttgtctttggttctgtttatatgctggattacattgattgatttgcgtatattgaaccagccttgcatcccagggatgaagcccacttgaacatggtggataagctttttgatgtgctgctggatttggttcgccagtattttattgaggatttttatttttaattttttgttttgttttttgaggcgaagtctcgctccgttgccaggctggagggcagtggcacgatctcgactcactgcaacctccgcctcccaggtttaagcaattctcctgtctcagcaggagtggttgggattacaggcacatgctggcatgcctgtatttttgtatttttagtagagacggggtttcaccatgttggccaggatggtctcaatcgcttgacctcatgatccgcccgcctcggcctcccaaagtgctgggattacaggcgtgagccactgcacccggcctacattttaatttttacaaaaaactcttaaacttttttgtgagcagaaattctcaagtatcgaagcgtggtgttttaggctccagaagaaatccactattacagtgtcctagtagcccagacatatgtgttaaatgacatgtatatactttgttattctttctaataaataatactcttttacaa

SEQ ID NO: 119029 - DNA, 6170 bp, Homo sapiens
  Payload ID: 3322
  Gene Symbol: C4orf33
  Gene Name: chromosome 4 open reading frame 33
  Uniprot ID: Q8N1A6
  ENST ID: ENST00000281146
  CDS Start-End: 722-1321
gaagattgctggggactccacgttcaaccgaatcccacgctggtgggaagaggacgcggtcgatacaggcgtcccgcgggtcactctgggtctcgtcgggccacctaggagagtgccgcgggagcttgacggcagcctgagagcggcgttctacgcggagcggcgggggttggagaggacaacgccaagacggctgggaagccccaggccagcagcggaagtccactcggcccgccctgcgactttgaaaccggtgccccggaccactccttggagacggtggcgcctcttgcgtcatcacgcgggcgttggagcttacgccatcgcgcgtcctagagtcctagcacgctattggctggctgtcaagcaatgggaggagtcgtgagaacctggatgacagcgggctgagccaccggcttggcgcggcggccaaactggtgggacagtgtctccaggtagtgaggcccaacctctttaaaacaaacaaacaaacaaacaaaaaaccaaaatgcaaacgtgagtagagaatgaaatacacagtttaaatgccctcactatctttgggttactaatatactaagcctttctggactaagtaaaagatgcaggttcctgcggctagggatagaagccagactggcgtcttcagaatctcccaccaaggctgtacctctggaggagttctaggtttggatttggtcatctcaagaagagacttcagatggattttaaaattgaacacacttgggatggttttccagtgaagcatgagcccgtatttatcaggctgaatccaggtgacagaggagtgatgatggacattagtgctccatttttcagggatcctccagccccacttggagaaccaggaaaacctttcaatgaactgtgggattatgaagttgtggaagcatttttcttgaatgatataactgagcaatatttagaagttgaactttgtccccacggacagcatttagtgcttttactttctggaagaagaaatgtgtggaaacaagaacttcctttatcgttcagaatgtccagaggagagacaaaatgggaaggcaaagcttatctcccttggagttattttccaccaaatgtgacaaaattcaattcatttgcaattcatggatcaaaagataaacgaagttatgaagctctttaccctgtacctcagcatgaactgcagcaaggacaaaaacctgatttccattgcctagaatacttcaagtctttcaattttaacacactgcttggagaagagtggaaacaaccggaatcagacctgtggctaatagagaaatgtgatatataggagtaatagataaccataccgatcattttttcctctataccttttaagataaacaaaaaataaatatcaattttttaagatgtcatgcatacatttcaacaacaaatatcttcatagaagtcactgaaaatatagtatctgtggcaaattgtatatgattaacaagaaaatatatgattctttgtagatgatttcatctgtaaagtcacaatgtttctcagagtcacttagtccaggatgttgcattcccagcacacagtacagttattcttgaaaactacaagtgaaaaagggggaacaattgaggttgtccaaggccacctagaggactgtcttgcactaccttgtgattcaaccatttcattcctagatatataccccagaaaaatgactgctcatagcagctttattcataatagcacaaaattgtaaacagtgaaatttccatccataggaaaatggatagacaaactacaatatagtcagtggaatactgttcatttaaaaaaggactgctgatacatgcaacaacctgtatgaatctcaaaaacattaagttgagcaaaacaaaccaaacataacatactatctaattacttttatattaaagccacttccaggcaaaactaatatttgatgatagataccagaacagtggctgcttagagtgagggcagggaattcaaattgaatggaaaaggggcctgaggaaattttccggggtgattgaaatgttttgtattttgatctggatgatggttatgtagctgcatatatttgtcaacattcctcatgctgtatgtttagatttgtgattttactatatgtaaattaattccttaataaaatactattataaaataagctgtaaattaaatggaattaacttcaagtttacattgagtttatatgtttccattgaacaatcactagtgatggttaaatgtggcttatcgacttactcatttcttatatatgttctctatctaaaaagagagctggtgtaagataaatgctaacttttacaaaaggtattattaagtatcctgactacacatcatggtggcagtgttaggcatcttagataaattgagaaattattcttaaaactgacaatagcaactaattaatttgatatagaaacgatctgcctgttttagatacgaatggcatattttaaataacctaggacgatttatttataaattacctgaataattttataaatgcatataaaactatcaaaataaaaacaagatatattttagagcatcttgattttagaagcgaatcgaacactgtgaatcacagtttcagatataaatcataactatttataatatggataaaaatgaagcacaaatatgatagatacaatcacaacaatataaaatactgaatttgaatgttgtagcttgtgagctttctcaaatctaatgtgtatctttttaaaatttgtttagatgttttttaaacatctcttaactttctttcatctagataaggcatttccttttcttccaataccaagcaagcaaaaatacattatataaacattttcttttgaaaggaacatgcatatcaactacagaatttcggaaagcttgtccattagtcaggtacaaatgatatattctagaaacttgtatccaagaaacttttatttgagagtgggtgtttgtaatagccatttcaaatttgtttttcaacttcaggaccatgaaagaataatcatccttttgtttaaaatatgcataaatgcatttctttgctgtgatttgaattgttcactgcagtgtcaagcagattctctcttctcaccacctaaatagattacacaatgtgcatatttattcaggtgcattctcatgctttttcccagctccaggaaagtgtaagtcacagtctgaagggaaatgtgctttttatttttggctccaaactactttttttaaacgttaaaaaggttttttgccacaggaaaaaaaacatttaatttcccctccttctcctccttttgctccttttttaaatgttaggcttttggaggacagaagataatgagcataattaatctgatattgaaaaagaaagggtagcaagtggataaagcaattacagtaagccctcagcccttttctcatgcctcaaagcttaaggattgtctcttcttttccatgtaaatttccataatattttacacattgctttattacagcatttatttcactggtcctagatagctcttctgacccacctcctatcctctcagcctaactttttactccagccatcagttgcatacagtgaactgactggccagttgcctcagctgtactgtgtatgtcttacttcctgcccctagggcttctctgcttcctctgctgtgtggaacacttgcaggaacccatttagccattctctcacatgaactacccgggatgtgtgaagggactaaaacaccccatggggcacctcttgaccaaagagggtgggagttgatggataactacttctctgttacatccctcagtttaacaatttatggtcccttccacacagctcctcagaagttctcttaaaaggattccaccctgattacccacagcagtggccaactagtaacacatttttgcattatctttccttcatttccatcattttctgttttgctcttcctggtacctctctcctctctggaattgcttaactacagtcaacctctttggaagttattgtcctatgtttgcttcatggggaacccaggctaagtcagtgattacctaaagcagccctagaaagccgttcgtcaggatgagaatctagaattgtatcacagggcatttggtgacaaggaccccattgttggtggtaatggctctgctataagtaacttcacagttattaaaacagtggtagactggcttgaggtgcagctgaggcacctgaagctatgaaagccatctagtcataatgactcttcgtgtcaactgttcagcaggcaaatagaagcgggctaccatgcagagctagagttataactattaatggaagcagtatagagtatgtccttcctaggggattcattgagtcatcctttggtgtttcaatgtcaagtggtaatcttaaatgggcaactgtagcaaccacagcctgacaaggtaaagcaactaaggactctgaccctttgaggataaaggtctaggtcacctcaccattcaaaccacttgaaactactgaagagtttggccaaatgtgagagaaatacagaatttgtgatggaagagagagatgataactatcaattatagacttgaaatcagttacaggagccacataacttgttccactaaatcttttgcatttagtatttgtataatggctgcccacttccttgaagactctgtgacagattggactcaatgtggaatgtgtgtggctctgagtgctgcaaggagtggactgtatttaatatctcttgtgtcctacctcacatcctcttaggccatttttcaattcacccattttactctttgatagcactttacctcttttgtcccatgtatctctagatttctgtattagtgcttttctgacacctcagttatgtggaacacctgtgggaatctgctaatctactctgacgtatatgcaaacctggaagtttgagggaattgacaatagggacaggattcagtggataaatactccccttttccgtcccttgggcagacaattctgaagtgcattctgtatagttccttagtggtctccagtaggactccactagggtcttcagttacctacagtactgatcagcttaaaaatgcaatcttagattggcttgctttatttaatttttccaaagttcccaatcccattccttagaatcacattccaaaattaatgcactgcacacaaccctctgcttttgtcaggggtagaaggggtatccagcctaaggcacctaagtccaagaggaatatgtgcctaacaaatcttctaactaaatatatatatatatatatatatatatataaaatatatatgtttatatataacatatatatatagagagagagcataaaatgtgctgtgtatgtgtgtagcatattttttgttaaatcaccattcctgggccctactcattttctgataatttcttatcttaatttgctctgaaagagcaaaacttataaaattgactattgtaactctattttttaccaactatcatttttcatggaaggaatagtaaaaagagttacctctgaagctaagatgacacatgtatgaggaatataggaagccagaaatcatgaatctatgaaaagtgaggggtgtctgtgcatattttattttatttcataataaataaccagtaattaaaatattcttttccatgtaatgggatctacgagtaaatttttgtctgatatttataaatctaatatgtaatataaaggagaaataggaaatgctgtcaaatgacatttcactttactacttatttgaattacaatgaaataatatatagctacatcactggctcctgagagagctttgggtgttctgtaaattttttactttgcactcttgaaaaattcgcagagaatgcaaggtttagtaaaaatttattttcttttggcagcctatcacctgtaatttccgttaaacagcatttctgactcaatagtacactgaaagcccatgtttgtaataatgccctaaagcactgcagtacctagagtatatattttgaagagatagctttgctgaaatagaaaaccaaactgtaaattgaagtctgagcattcagagaaataaaaattatgctaaaaacaaacgt

SEQ ID NO: 119030 - DNA, 1588 bp, Homo sapiens
  Payload ID: 3322
  Gene Symbol: C4orf33
  Gene Name: chromosome 4 open reading frame 33
  Uniprot ID: Q8N1A6
  ENST ID: ENST00000425929
  CDS Start-End: 93-692
gcagctgggtggagcctaaagccgagccctctcctgtgacctcggctgaaaagaagaagccagtgtttgagaaaagcttcgtgagacttcagatggattttaaaattgaacacacttgggatggttttccagtgaagcatgagcccgtatttatcaggctgaatccaggtgacagaggagtgatgatggacattagtgctccatttttcagggatcctccagccccacttggagaaccaggaaaacctttcaatgaactgtgggattatgaagttgtggaagcatttttcttgaatgatataactgagcaatatttagaagttgaactttgtccccacggacagcatttagtgcttttactttctggaagaagaaatgtgtggaaacaagaacttcctttatcgttcagaatgtccagaggagagacaaaatgggaaggcaaagcttatctcccttggagttattttccaccaaatgtgacaaaattcaattcatttgcaattcatggatcaaaagataaacgaagttatgaagctctttaccctgtacctcagcatgaactgcagcaaggacaaaaacctgatttccattgcctagaatacttcaagtctttcaattttaacacactgcttggagaagagtggaaacaaccggaatcagacctgtggctaatagagaaatgtgatatataggagtaatagataaccataccgatcattttttcctctataccttttaagataaacaaaaaataaatatcaattttttaagatgtcatgcatacatttcaacaacaaatatcttcatagaagtcactgaaaatatagtatctgtggcaaattgtatatgattaacaagaaaatatatgattctttgtagatgatttcatctgtaaagtcacaatgtttctcagagtcacttagtccaggatgttgcattcccagcacacagtacagttattcttgaaaactacaagtgaaaaagggggaacaattgaggttgtccaaggccacctagaggactgtcttgcactaccttgtgattcaaccatttcattcctagatatataccccagaaaaatgactgctcatagcagctttattcataatagcacaaaattgtaaacagtgaaatttccatccataggaaaatggatagacaaactacaatatagtcagtggaatactgttcatttaaaaaaggactgctgatacatgcaacaacctgtatgaatctcaaaaacattaagttgagcaaaacaaaccaaacataacatactatctaattacttttatattaaagccacttccaggcaaaactaatatttgatgatagataccagaacagtggctgcttagagtgagggcagggaattcaaattgaatggaaaaggggcctgaggaaattttccggggtgattgaaatgttttgtattttgatctggatgatggttatgtagctgcatatatttgtcaacattcctcatgctgtatgtttagatttgtgattttactatatgtaaattaattccttaataaaatactattataaaataagctgtaaattaaatggaattaacttcaagttt

SEQ ID NO: 119031 - DNA, 396 bp, Homo sapiens
  Payload ID: 3322
  Gene Symbol: C4orf33
  Gene Name: chromosome 4 open reading frame 33
  ENST ID: ENST00000508673
  CDS Start-End: 91-396
agctgggtggagcctaaagccgagccctctcctgtgacctcggctgaaaagaagaagccagtgtttgagaaaagcttcgtgagacttcagatggattttaaaattgaacacacttgggatggttttccagtgaagcatgagcccgtatttatcaggctgaatccaggtgacagaggagtgatgatggacattagtgctccatttttcagggatcctccagccccacttggagaaccaggaaaacctttcaatgaactgtgggattatgaagttgtggaagcatttttcttgaatgatataactgagcaatatttagaagttgaactttgtcccaagaacttcctttatcgttcagaatgtccagaggagagacaaaatgggaaggcaaagcttatc

SEQ ID NO: 119032 - DNA, 1126 bp, Homo sapiens
  Payload ID: 3322
  Gene Symbol: C4orf33
  Gene Name: chromosome 4 open reading frame 33
  ENST ID: ENST00000502887
  CDS Start-End: 339-836
gagaacctggatgacagcgggctgagccaccggcttggcgcggcggccaaactggtgggacagtgtctccaggtagtgaggcccaacctctttaaaacaaacaaacaaacaaacaaaaaaccaaaatgcaaacgtgagtagagaatgaaatacacagtttaaatgccctcactatctttgggttactaatatactaagcctttctggactaagtaaaagatgcaggttcctgcggctagggatagaagccagactggcgtcttcagaatctcccaccaaggctgtacctctggaggagttctaggtttggatttggtcatctcaagaagagacttcagatggattttaaaattgaacacacttgggatggttttccagtgaagcatgagcccgtatttatcaggctgaatccaggtgacagaggagtgatgatggacattagtgctccatttttcagggatcctccagccccacttggagaaccaggaaaacctttcaatgaactgtgggattatgaagttgtggaagcatttttcttgaatgatataactgagcaatatttagaagttgaactttgtccccacggacagcatttagtgcttttactttctggaagaagaaatgtgtggaaacaagaacttcctttatcgttcagaatgtccagaggagagacaaaatgggaaggcaaagcttatctcccttggagttattttccaccaaatgtgacaaaattcaattcatttgcaattcatggatcaaaagataaacgaagttatgaagctctttaccctgtacctcagcatgaactgcagcaaggacaaaaacctgatttgtaagtagaaaataaatgaagatatgttccaaatacacgagttttttcgaaattaattcttagtggagcagaagtaacacttttgatcaaagaagacgacatatgtgcacaagtatctagtagagtccaatgttcactgatggtcctcagaaaatacttggaaaactttggactgtcataatctctctcactactgtcagtagagcacttatttttccatagtggtatgagaaaagtgttgtttgcatgtgagaaaagtaaatgttgtaatagctgatatagaagtatggtcac

SEQ ID NO: 119033 - DNA, 465 bp, Homo sapiens
  Payload ID: 3322
  Gene Symbol: C4orf33
  Gene Name: chromosome 4 open reading frame 33
  ENST ID: ENST00000508622
  CDS Start-End: 272-465
ggctgaaaagaagaagccagtgtttgagaaaagcttcgtggtctgtgttctctagttgttccctcttctctctgacattcctttcgtcgtcgccagaatttttgtggatttggtggttgtatgaagaataagtgaatctaccagaacttcctagtagctaagatcttgattcccagaggatccagtaactgagacacctgcacactttacaataaataaaagacaaaggatgacataagaacccatggtgcttatagttacaagacttcagatggattttaaaattgaacacacttgggatggttttccagtgaagcatgagcccgtatttatcaggctgaatccaggtgacagaggagtgatgatggacattagtgctccatttttcagggatcctccagccccacttggagaaccaggaaaacctttcaatgaactgtgggattatgaagttgtggaagcatt

SEQ ID NO: 119034 - DNA, 881 bp, Homo sapiens
  Payload ID: 3323
  Gene Symbol: C4orf36
  Gene Name: chromosome 4 open reading frame 36
  Uniprot ID: Q96KX1
  ENST ID: ENST00000295898
  CDS Start-End: 287-640
ggaggcgtgtgcctgcggcgcggccccgaggcgtgtgcgcggccatgtgcgcttagcgcagcgcgctcttacctcagtaccccggccgcgaccctccgagcccctggagcccgggtaaccaggccgccggcgccggctcgcggggacccgccaccctggaagccccgcgcacacagcgcattcctggcgagtcggaggcagggtggggcccaggtaaagtgaacagagttatctgtgacattccatcaggcacctatgtaacgaaatcataccgtaataactcaccatggcgtatggagtgccaagaaagaacacagtgaaaaccattttgcggggcagttgttataatgtacaggaaccttgggatattgcattgcttgcaaagacctggtccacaaacctagccaatatcaagttgcctttcttggaagaaatttcatttggtggttctgtgcagctcacaaaatgtaccaccattaaagatggactgctcccttctgcagaatctatcaaactcgaaagggagtatgaagtgaagcgtctttgtaaactgaagtgtcaagaaaatacatctaaggaaattcagcttctcctgagggaaaggccagccggtttgagaagacctcttccatctaaatgacacctgaagcgcggattgtagatgaagaaactcagcagcgccggcgggaactgcttctcctgggccgcccaggacccgctcccggccccggccgtcgctgcgctgcagccatcctggcccggcccccacctcaggaagcctcccacggcccgcccagagaccgagaaaatctcttaatttcagtggaactcagtttgtttctctttttaaacattgccagttataaatgtattttatttta

SEQ ID NO: 119035 - DNA, 2306 bp, Homo sapiens
  Payload ID: 3323
  Gene Symbol: C4orf36
  Gene Name: chromosome 4 open reading frame 36
  Uniprot ID: Q96KX1
  ENST ID: ENST00000473559
  CDS Start-End: 665-1018
actttacggcgagattaagctcagggtcaagttctgagcaaaaagtgtcaaggagcctttttgcaacctcctataatattgaaacagattctgtgccctttaaaggagataataactaacatctggggagcgctttacaatttagaaaaggcctttcacacacaggcctgtttcatcttcacaacaatcttataaaacagatatattgttcccatttcccaaataatgaaacggaagcgccgaaaatatctcctatagggctcttcaaactgtggtcaacttagtaaatgatgttgacagtggaagtgtgatcattttattttcctgcctttggaattgaagattgtaattttgcaaaaattttgttgaagatgatgtagctttggttcagagagctggagtacaatggcaccatctcagctcgccgcaacctccacctcctgggttcaagcgattctcctgcctcagcctcccgagtagctgggattacaggttccaagtctcttcttcggcctctcaaacatggtaccatccctaatgaagtcaacgggtccagcatgacaggatggaagtacaagtgtcagcacctatgtaaagtgaacagagttatctgtgacattccatcaggcacctatgtaacgaaatcataccgtaataactcaccatggcgtatggagtgccaagaaagaacacagtgaaaaccattttgcggggcagttgttataatgtacaggaaccttgggatattgcattgcttgcaaagacctggtccacaaacctagccaatatcaagttgcctttcttggaagaaatttcatttggtggttctgtgcagctcacaaaatgtaccaccattaaagatggactgctcccttctgcagaatctatcaaactcgaaagggagtatgaagtgaagcgtctttgtaaactgaagtgtcaagaaaatacatctaaggaaattcagcttctcctgagggaaaggccagccggtttgagaagacctcttccatctaaatgacagtcagttcatgattgaatctgtactctgtgtcttgcatccaaagggcatgaaggtctctggacctttcactatgtatagttcagggcagatatttgaatgcccactggtggatgggccactgcccacagctgtgggttagtacccagttctgacagatcttctgagtccctgacatactcttgttccttgtgtcacaaacgacagcactgtaagtagatgaaaatgcatttggagttgagtcgtttgtgctattcattttaatttttgtaaaattgcactaaaagaagaggaaatttcttcagctgcattgttttcaaaagacatcttaaatatgcatctttgagatcccaaggagggaccaaaagaaggcaagagagaaattctcttaaaaatgataaactgaaacatttcatttggttaagaaaaataatagacttcatttttagtacctccctagtttccaattttcttttttttaaatatatatattttttattgtactttaagttctagggtacatgtgcacaacgtgcaggtttgttacatatgtatacatgggccatgttggtgtgctgcatccagtaactcatcatttacattaggtatatctcctaatgctatccctcccccatacccccaccccacaacaggcccccgtgtgtgatgttccccttcctgtgtccaagtgttctcatttttcaattctcacctatgagtgagaacatgcggtgtttggttttttgtccttgtgatagtttgctgagaatgatggtttccagcttcacccatgtccctacaaaggacatgaactcattattttttatggctgcatagtattccatggtgcatttgtgccacattttcttaatccagtctatcattgttggacatttgggttggttccaagtctttgctattgtgagtagtgccacaataaacatacgtgtgcatgtgtctttatagcagcatgatttatattcctttgggtatatacctagtaatgggatggctgggtcaaatggtatttctagttctagatccctgaggaattgccacactgtcttccacaatggttgaactagtttacagtcccaccaacagtgtaaaagtgttcctatttctccacatcctccccagcacctgttgtttcctgactttttaatgatcctcattctaactggtgtgagatgatatctcattgtggttttgatttgcatttctctgatggccagtgatgatgcacattttttcatgtgcctgttggctgcataaatgtcttcttttg

SEQ ID NO: 119036 - DNA, 766 bp, Homo sapiens
  Payload ID: 3323
  Gene Symbol: C4orf36
  Gene Name: chromosome 4 open reading frame 36
  ENST ID: ENST00000506308
  CDS Start-End: 428-766
ggcgcccgcggcgagcgggaaggaggcgtgtgcctgcggcgcggccccgaggcgtgtgcgcggccatgtgcgcttagcgcagcgcgctcttacctcagtaccccggccgcgaccctccgagcccctggagcccgggtaaccaggccgccggcgccggctcgcggggacccgccaccctggaagccccgcgcacacagcgcattcctggcgagtcggaggcagggtggggcccaggtgtgggaaggagccgaggctgaggccgttcccttctccgcgggctctgtgggcggccgaggcccccacccgtcccgggaaccagttcctcccgggccctgcgcgtccgtccggggaagggtaaagtgaacagagttatctgtgacattccatcaggcacctatgtaacgaaatcataccgtaataactcaccatggcgtatggagtgccaagaaagaacacagtgaaaaccattttgcggggcagttgttataatgtacaggaaccttgggatattgcattgcttgcaaagacctggtccacaaacctagccaatatcaagttgcctttcttggaagaaatttcatttggtggttctgtgcagctcacaaaatgtaccaccattaaagatggactgctcccttctgcagaatctatcaaactcgaaagggagtatgaagtgaagcgtctttgtaaactgaagtgtcaagaaaatacatctaaggaaattcagcttctcctgagggaaaggccagccggtttgagaagacct

SEQ ID NO: 119037 - DNA, 1610 bp, Homo sapiens
  Payload ID: 3323
  Gene Symbol: C4orf36
  Gene Name: chromosome 4 open reading frame 36
  ENST ID: ENST00000462714
  CDS Start-End: 203-301
cgcggcgagcgggaaggaggcgtgtgcctgcggcgcggccccgaggcgtgtgcgcggccatgtgcgcttagcgcagcgcgctcttacctcagtaccccggccgcgaccctccgagcccctggagcccgggtaaagtgaacagagttatctgtgacattccatcaggcacctatgtaacgaaatcataccgtaataactcaccatggcgtatggagtgccaagaaagaacacagtgaaaaccattttgcggggcagttgttataatgtgctggaatgttgtgcacctcctgggcttgagtgatcctcccatctcagcctcctgagtagctgggaccacaggcacacaccactgtgcccgacaggaaccttgggatattgcattgcttgcaaagacctggtccacaaacctagccaatatcaagttgcctttcttggaagaaatttcatttggtggttctgtgcagctcacaaaatgtaccaccattaaagatggactgctcccttctgcagaatctatcaaactcgaaagggagtatgaagtgaagcgtctttgtaaactgaagtgtcaagaaaatacatctaaggaaattcagcttctcctgagggaaaggccagccggtttgagaagacctcttccatctaaatgacagtcagttcatgattgaatctgtactctgtgtcttgcatccaaagggcatgaaggtctctggacctttcactatgtatagttcagggcagatatttgaatgcccactggtggatgggccactgcccacagctgtgggttagtacccagttctgacagatcttctgagtccctgacatactcttgttccttgtgtcacaaacgacagcactgtaagtagatgaaaatgcatttggagttgagtcgtttgtgctattcattttaatttttgtaaaattgcactaaaagaagaggaaatttcttcagctgcattgttttcaaaagacatcttaaatatgcatctttgagatcccaaggagggaccaaaagaaggcaagagagaaattctcttaaaaatgataaactgaaacatttcatttggttaagaaaaataatagacttcatttttagtacctccctagtttccaattttcttttttttaaatatatatattttttattgtactttaagttctagggtacatgtgcacaacgtgcaggtttgttacatatgtatacatgggccatgttggtgtgctgcatccagtaactcatcatttacattaggtatatctcctaatgctatccctcccccatacccccaccccacaacaggcccccgtgtgtgatgttccccttcctgtgtccaagtgttctcatttttcaattctcacctatgagtgagaacatgcggtgtttggttttttgtccttgtgatagtttgctgagaatgatggtttccagcttcacccatgtccctacaaaggacatgaactcattattttttatggctgcatagtattccatggtgcatttgtgccacattttcttaatccagtctatcattgttggacatttgggttggttccaagtctttgctattgtgagtagtgccacaataaacatacgtgtgcatgtgtcttta

SEQ ID NO: 119038 - DNA, 448 bp, Homo sapiens
  Payload ID: 3323
  Gene Symbol: C4orf36
  Gene Name: chromosome 4 open reading frame 36
  ENST ID: ENST00000504008
  CDS Start-End: 206-448
gcccgcggcgagcgggaaggaggcgtgtgcctgcggcgcggccccgaggcgtgtgcgcggccatgtgcgcttagcgcagcgcgctcttacctcagtaccccggccgcgaccctccgagcccctggagcccgggtaaagtgaacagagttatctgtgacattccatcaggcacctatgtaacgaaatcataccgtaataactcaccatggcgtatggagtgccaagaaagaacacagtgaaaaccattttgcggggcagttgttataatgtacaggaaccttgggatattgcattgcttgcaaagacctggtccacaaacctagccaatatcaagttgcctttcttggaagaaatttcatttggtggttctgtgcagctcacaaaatgtaccaccattaaagatggactgctcccttctgcagaatctatcaaactcgaaagggagtat

SEQ ID NO: 119039 - DNA, 564 bp, Homo sapiens
  Payload ID: 3323
  Gene Symbol: C4orf36
  Gene Name: chromosome 4 open reading frame 36
  ENST ID: ENST00000512468
  CDS Start-End: 185-325
agtaccccggccgcgaccctccgagcccctggagcccgggtaaccaggccgccggcgccggctcgcggggacccgccaccctggaagccccgcgcacacagcgcattcctggtaaagtgaacagagttatctgtgacattccatcaggcacctatgtaacgaaatcataccgtaataactcaccatggcgtatggagtgccaagaaagaacacagtgaaaaccattttgcggggcagttgttataatgtggtctcacactgtcacgcaggctggaatgttgtgcacctcctgggcttgagtgatcctcccatctcagcctcctgagtagctgggaccacaggcacacaccactgtgcccgacaggaaccttgggatattgcattgcttgcaaagacctggtccacaaacctagccaatatcaagttgcctttcttggaagaaatttcatttggtggttctgtgcagctcacaaaatgtaccaccattaaagatggactgctcccttctgcagaatctatcaaactcgaaagggagtatgaagtgaagcgtctttgtaaactgaa

SEQ ID NO: 119040 - DNA, 1215 bp, Homo sapiens
  Payload ID: 3324
  Gene Symbol: C4orf45
  Gene Name: chromosome 4 open reading frame 45
  Uniprot ID: Q96LM5
  ENST ID: ENST00000434826
  CDS Start-End: 86-646
agagtctttcgttctttctggtgcagcttaactgatttgaagaagccgaagaagaaaatccagtagcacggttaagactttagccatggcatctgtatcataccaaaagccaacatctactactgtgggaaaacaaatgatttttacaggtccagactacataaaggattatttacccaaaattcatcagcacacctcctatgtaggagaacagcatctggcgttagaaaaaactggagatctcagatatttatggaggcctgcctcaaatagaagcttgccagcaaaatataaacatgagtacgtcagtgaaattggttggagaataccacagtataattttatcaacaaatcaagactggggagtggctttcatatcaagtatgaagaactaagtcaagcttctcttgattcaataacccacagatatcaaaacccatggcaaccaaaacctcatgtcctggatatgcaaggaaaacagagtcgcgcttcttttgcctggcatatgagtgctttcgaggacactgatcagagaaattccaaatgggctattcttgttaggcagtgtaagtcatcattgccaagagcttccaaaccacctaagctgccgaagctaccaaaaaaggaaaagaaaaggaaacattaacctctaaatcagcataactcaacctgcttttagaaggagaaactgcctactactgtataacaaaaaataagatcataataatccacaagtgcttctcatattgccccaggacagatgtcttgcaagagtacgcttcagcttaaagcccaaataaacagtttggaaaaaaggtgttgtcagtctttgcaaccattaatattgtttcatgaaactaattgttattgactatcatactaatagtagctgtttactgagtgcttataacatctaacactattccaagtgctttacattcattctctaatataatttcataaccataggagataggttctattatttccccagctttgcagataaggaaattaaggctttgaaagagtacatggttaggaagtagcagaacttggatttgaccccaggttatggggctctaaagctaacatatatggcttttaaagtattttataatattggcatggtgctttagcagtaaaaagcagttatatccctaattttcagaagattctcacagcacccttgttgaacaggtactatctttcttttac

SEQ ID NO: 119041 - DNA, 3521 bp, Homo sapiens
  Payload ID: 3325
  Gene Symbol: C4orf46
  Gene Name: chromosome 4 open reading frame 46
  Uniprot ID: Q504U0
  ENST ID: ENST00000379205
  CDS Start-End: 246-587
gcccttcgagatcgattggaggctcgcgcaggagccgtgagttgcctaaggtgaattgactcatatgattggctgtcccgaaaaatgaaacgtctttgtggtccggggctgagacccacgaggagactgggcgggatttctggcgttaggaggcggggcctttcggctttgggcgcgagtggttaaaagacagttggtgtcggttcggcttctcgggtcggattccgcggtcccaacccttccccatggccgaccctgaggagttgcaggtttcttcgccgcccccgccgcctccctcttctccctcctcttcagacgcctctgcagcatcttccccgggcggcccagtgagtttgggctggccagttccgagcaggagcagcggcccaacggtggaccagctggaggaagtggagctgcagatcggagacgcagccttttcattaaccaaacttcttgaagccacatctgcagtatcagctcaagtggaagaacttgccttcaaatgtacagaaaatgcacgtttccttaaaacgtggcgggacctcttgaaagaaggctatgattctttgaaacctgatgactgatttggcatacttcgttgtttaataatgactgcaataattcatacttcttatgtcatattttgtacatgtaccacacatataggatgacctctgtccagcagttctgtatatactcagaatgaaatttttcttggttttcttggtttttgtgaaagcagaataccgatgctatttttgttgcggaccagtacttgtttgtccttaaatactttatgcctctgaactttcatagaatcctttatgaaagttaacttcatcaatagacggttaatattaatagagccacagtgctaccagtagcaaactaggtagaccattatttgttttgcaacaagatgctaagcatggcagactttgaagttgcgtttcatcttaaggaccaagggaggtaactttaaggttgccagtggtggatccagctccgttaggctaagttgtctacagctaatgattgtgtctttattctatatccccagcacctaaaacagggtcacacaacattcactaaatgtttgttgaataaaagagttaacaaacataattgaaagctttttttcttcctatatttagcatgaagactgtcattgtttctctaggaaatgtatgaatctgaacttttttgacttgaagaaaaacattctttttttacagagatttggactttgatgataggttttaaaaatatatgataaatattttttgtacttgtttgattttttttttaaagactttacttcagaaagggaaagactgtttagaaagaatgcatattttttccctatttatttctgtggttactgcttttgcagtttaacagtgtttgtatttgatatttgtatatgtttgattgctatctttaaagtgccttatcagatttatggctctgtgctattactttttgagctttgcaagttgtgtacataataattctaaagaagttactttgtttgcaatgcatcaaatttaaatgatgtgattttttttgtattatttgatcttagtgacagtgttctattttgcatcctgtatcttatgttgcttttggtgttttgtgttgtgtgtcaacgattaagccaactaattctctaccatatataacttctggacatttttgatacaacatcttaattctttgtagatatggagataggtacagaactatattctaatgccccacaatggggctatgagaggggacagatggatgggcaaagaatagttttgtttaacatattaggtcatagttcttgattagtttttttagttaaagataaacacatagggtgtgatttctataccaaagatatgcttatttcagtattagaaaaatattcttcttacatctcctgaaaattgcaatttttaaaatgtgtaaaaataaattattattaaaagcacattttatttccatttgtttggattcattaccttaaaactttattgacatatttcaaagatataggaaaggtaaatgatttcaagaaaatccgtgtatttctaccatgcagatgtaataaatgttagcatttggctatattttcttcagacacacatatgcatgtaattgcaaatgttagatacatttgaagtttgctttgttacctgtttgatcctgtcccgttcctccctccccagagtccccagaggtaaccactagagggggcataatatagcatgtgtttttatatttttaatacaaatatattttttaaaagcgctacaaaatattgttttatatatgtggtagccagcttccagatggccccagtgatccctggcctcctggtgttcatgccccagtatagccttctcctgcattttacagtgctgacttttgtaactaccaggatattgagcaaatgcagtgtgtgatttctgaggccatatcttttactcttttttttttttttaagagacaagatctcactctattgctcaggctggagtgtggtggcaggatcatagctcactgtaaccttaaacttggactcaaacaatcctcccatctcgcctcctcctataaagcactgggattacaggcatttttgctcatttttctatgttgttttttttacttgtcagtttttagatattacatattttgaatactaatgatctgttatgtatgttccaattatcttttttagtctggtttgtcttcatattttggttatgaaatcttgaatttttaaaaacgtaattttaccaatctttcataatgatttgctttttctggtttttgtataggaaatgtcataaaaatagtcctattcagccttccaaaagttacaaaatttttgtttttaacatttagatgtttagtccaactgaaatttgttttcttttatggcatgattttggaatcttgttttaattatttttacatatttatagctgttcctccaagtatcaatttttcaagtgcaacatctgtcatgcagttactatgtaagggccagattctgacctttctgttctttttatctgaaggaaatttgaacatgccacccccaaatatgccgatttggcatactgattatttcgagctaaaggtgcttgactaacagtagttgcagaaatggctattttaactgtcctttcctacctgtagcaagccatacaaacttctttgataaagatgctttcctgataccaagatgagaagatggctctaatcagctgagacagcaccagaggaatctacaaacaagaaactattagtttcttaacatatatttaccttccacagtttctgcctctggaagcctaaaactgctttccttcgtcttgtcacacttctctgaaatgtattctttgtggaagatgctatatagtccagagttgtaagccactacttgtgtttaccttttcattgagttttctcctgtgtgatgtacgttgcatatattaataaaattacttgtttttctcttg

SEQ ID NO: 119042 - DNA, 3358 bp, Homo sapiens
  Payload ID: 3325
  Gene Symbol: C4orf46
  Gene Name: chromosome 4 open reading frame 46
  ENST ID: ENST00000508457
  CDS Start-End: 92-289
ggggcctttcggctttgggcgcgagtggttaaaagacagttggtgtcggttcggcttctcgggtcggattccgcggtcccaacccttccccatggccgaccctgaggagttgcaggtttcttcgccgcccccgccgcctccctcttctccctcctcttcagacgcctctgcagcatcttccccgggcggcccagtgagtttgggctggccagttccgagcaggagcagcggcccaacggtggaccagctggaggaagtggagctgcagatcggagacccttttcattaaccaaacttcttgaagccacatctgcagtatcagctcaagtggaagaacttgccttcaaatgtacagaaaatgcacgtttccttaaaacgtggcgggacctcttgaaagaaggctatgattctttgaaacctgatgactgatttggcatacttcgttgtttaataatgactgcaataattcatacttcttatgtcatattttgtacatgtaccacacatataggatgacctctgtccagcagttctgtatatactcagaatgaaatttttcttggttttcttggtttttgtgaaagcagaataccgatgctatttttgttgcggaccagtacttgtttgtccttaaatactttatgcctctgaactttcatagaatcctttatgaaagttaacttcatcaatagacggttaatattaatagagccacagtgctaccagtagcaaactaggtagaccattatttgttttgcaacaagatgctaagcatggcagactttgaagttgcgtttcatcttaaggaccaagggaggtaactttaaggttgccagtggtggatccagctccgttaggctaagttgtctacagctaatgattgtgtctttattctatatccccagcacctaaaacagggtcacacaacattcactaaatgtttgttgaataaaagagttaacaaacataattgaaagctttttttcttcctatatttagcatgaagactgtcattgtttctctaggaaatgtatgaatctgaacttttttgacttgaagaaaaacattctttttttacagagatttggactttgatgataggttttaaaaatatatgataaatattttttgtacttgtttgattttttttttaaagactttacttcagaaagggaaagactgtttagaaagaatgcatattttttccctatttatttctgtggttactgcttttgcagtttaacagtgtttgtatttgatatttgtatatgtttgattgctatctttaaagtgccttatcagatttatggctctgtgctattactttttgagctttgcaagttgtgtacataataattctaaagaagttactttgtttgcaatgcatcaaatttaaatgatgtgattttttttgtattatttgatcttagtgacagtgttctattttgcatcctgtatcttatgttgcttttggtgttttgtgttgtgtgtcaacgattaagccaactaattctctaccatatataacttctggacatttttgatacaacatcttaattctttgtagatatggagataggtacagaactatattctaatgccccacaatggggctatgagaggggacagatggatgggcaaagaatagttttgtttaacatattaggtcatagttcttgattagtttttttagttaaagataaacacatagggtgtgatttctataccaaagatatgcttatttcagtattagaaaaatattcttcttacatctcctgaaaattgcaatttttaaaatgtgtaaaaataaattattattaaaagcacattttatttccatttgtttggattcattaccttaaaactttattgacatatttcaaagatataggaaaggtaaatgatttcaagaaaatccgtgtatttctaccatgcagatgtaataaatgttagcatttggctatattttcttcagacacacatatgcatgtaattgcaaatgttagatacatttgaagtttgctttgttacctgtttgatcctgtcccgttcctccctccccagagtccccagaggtaaccactagagggggcataatatagcatgtgtttttatatttttaatacaaatatattttttaaaagcgctacaaaatattgttttatatatgtggtagccagcttccagatggccccagtgatccctggcctcctggtgttcatgccccagtatagccttctcctgcattttacagtgctgacttttgtaactaccaggatattgagcaaatgcagtgtgtgatttctgaggccatatcttttactcttttttttttttttaagagacaagatctcactctattgctcaggctggagtgtggtggcaggatcatagctcactgtaaccttaaacttggactcaaacaatcctcccatctcgcctcctcctataaagcactgggattacaggcatttttgctcatttttctatgttgttttttttacttgtcagtttttagatattacatattttgaatactaatgatctgttatgtatgttccaattatcttttttagtctggtttgtcttcatattttggttatgaaatcttgaatttttaaaaacgtaattttaccaatctttcataatgatttgctttttctggtttttgtataggaaatgtcataaaaatagtcctattcagccttccaaaagttacaaaatttttgtttttaacatttagatgtttagtccaactgaaatttgttttcttttatggcatgattttggaatcttgttttaattatttttacatatttatagctgttcctccaagtatcaatttttcaagtgcaacatctgtcatgcagttactatgtaagggccagattctgacctttctgttctttttatctgaaggaaatttgaacatgccacccccaaatatgccgatttggcatactgattatttcgagctaaaggtgcttgactaacagtagttgcagaaatggctattttaactgtcctttcctacctgtagcaagccatacaaacttctttgataaagatgctttcctgataccaagatgagaagatggctctaatcagctgagacagcaccagaggaatctacaaacaagaaactattagtttcttaacatatatttaccttccacagtttctgcctctggaagcctaaaactgctttccttcgtcttgtcacacttctctgaaatgtattctttgtggaagatgctatatagtccagagttgtaagccactacttgtgtttaccttttcattgagttttctcctgtgtgatgtacgttgcatatattaataaaattacttgtttttc

SEQ ID NO: 119043 - DNA, 1134 bp, Homo sapiens
  Payload ID: 3326
  Gene Symbol: C4orf47
  Gene Name: chromosome 4 open reading frame 47
  Uniprot ID: A7E2U8
  ENST ID: ENST00000378850
  CDS Start-End: 23-952
agtaccaccaccagacgccaccatgcctgcggaaggaggaaaaacggacatggaaaggattggcctctttagtgagatggaatatattactgtgggtgataaatatgtgtcacaatttaatcgaccctttaatgaggctgcaagcaaaaataaacagatgctacctggagggtccaaagaaatgtcagatcttcaggcaggttattttgatccccattttgtaaggatttttgaaggtgaaggctacataaatctgaatcaagtgaggagacgggatatggtggaagcagccaaaaaaaatctaggcaaagcattcctccctagtaatggagagaaaaagccatgtggcttaggaagctactatggaacaataggtggtccagtcccatttttcagcgcacagtcaaaacctcgagaaaaatacaaggcacctggaaagaatttatacacaaacccgggaaagaaaggaactggatatggctatgcaaatattaccataggtaaacagttttcacactctgccgacttctatgatgcagcaaaactaaagtataagaaagcgaatgaagagcaccatcgtttacttaaaggagcaccatttaagttaaatcttcacccaagggactattttgacgctaatccttatttttctgaggaatctttaccaccaattaaaaaagaagagaagaagaaaacaatttcaaatacttttaaaccgtcttctcctggtaaaaagcctggtggaatgaaggcaggaacatttgatccttacccatcacattctgctgacccttatgtggctaaattggcaaatatttctggcaaagatgataagattttccacccaccaagtggaccaaaaagcagaccagttgaaagtataatgactttgaatgtcagaagggcactaaattcaaagaactacaagacttcttcagtaccatcctattagcaactggaagacaagtagctttctagatcttaactatgagtaattcactatcaagagctaattatttgaaaaaatataagatgttatggagcagatagctcaagcagttaaaagaaattctgcaactctaattctcttccttattttaatactactagttaataaatagtatttgctaataa

SEQ ID NO: 119044 - DNA, 714 bp, Homo sapiens
  Payload ID: 3326
  Gene Symbol: C4orf47
  Gene Name: chromosome 4 open reading frame 47
  ENST ID: ENST00000511138
  CDS Start-End: 230-714
cgtgcagaggcgctgcgcagcccaggcgtgtcgcgcgcttgggaaccctcgccgctcccgcagcgcagttaacgtggacaagctggggcaacctggacgagctggggcaacctgatctcggctgtcggagtgggtgtcctcaagaaagtaggactttgctataaaacacgtgaccctagggaaacttttgaagttagcggtatagagagtaccaccaccagacgccaccatgcctgcggaaggaggaaaaacggacatggaaaggattggcctctttagtgagatggaatatattactgtgggtgataaatatgtgtcacaatttaatcgaccctttaatgaggctgcaagcaaaaataaacagatgctacctggagggtccaaagaaatgtcagatcttcaggcaggttattttgatccccattttgtaaggatttttgaaggtgaaggctacataaatctgaatcaagtgaggagacgggatatggtggaagcagccaaaaaaaatctaggcaaagcattcctccctagtaatggagagaaaaagccatgtggcttaggaagctactatggaacaataggtggtccagtcccatttttcagcgcacagtcaaaacctcgagaaaaatacaaggcacctggaaagaatttatacacaaacccgggaaagaaaggaactggatatggctatgcaaatattaccataggtaaaca

SEQ ID NO: 119045 - DNA, 785 bp, Homo sapiens
  Payload ID: 3326
  Gene Symbol: C4orf47
  Gene Name: chromosome 4 open reading frame 47
  ENST ID: ENST00000511581
  CDS Start-End: 252-785
cgtgcagaggcgctgcgcagcccaggcgtgtcgcgcgcttgggaaccctcgccgctcccgcagcgcagttaacgtggacaagctggggcaacctggacgagctggggcaacctgatctcggctgtcggagtgggtgtcctcaagaaaggtgacttggtcctcgcggacgccaggactttgctataaaacacgtgaccctagggaaacttttgaagttagcggtatagagagtaccaccaccagacgccaccatgcctgcggaaggaggaaaaacggacatggaaaggattggcctctttagtgagatggaatatattactgtgggtgataaatatgtgtcacaatttaatcgaccctttaatgaggctgcaagcaaaaataaacagatgctacctggagggtccaaagaaatgtcagatcttcaggcaggttattttgatccccattttgtaaggatttttgaaggtgaaggctacataaatctgaatcaagtgaggagacgggatatggtggaagcagccaaaaaaaatctaggcaaagcattcctccctagtaatggagagaaaaagccatgtggcttaggaagctactatggaacaataggtggtccagtcccatttttcagcgcacagtcaaaacctcgagaaaaatacaaggcacctggaaagaatttatacacaaacccgggaaagaaaggaactggatatggctatgcaaatattaccataggtaaacagttttcacactctgccgacttctatgatgcagcaaaactaaagtataag

SEQ ID NO: 119046 - DNA, 832 bp, Homo sapiens
  Payload ID: 3326
  Gene Symbol: C4orf47
  Gene Name: chromosome 4 open reading frame 47
  ENST ID: ENST00000508698
  CDS Start-End: 175-285
cgctcccgcagcgcagttaacgtggacaagctggggcaacctggacgagctggggcaacctgatctcggctgtcggagtgggtgtcctcaagaaaggactttgctataaaacacgtgaccctagggaaacttttgaagttagcggtatagagagtaccaccaccagacgccaccatgcctgcggaaggaggaaaaacggacatggaaaggattggcctctttagtgagatggaatatattactgtgggtgataaatatgtgtcacaatttaatcatgtggcttaggaagctactatggaacaataggtggtccagtcccatttttcagcgcacagtcaaaacctcgagaaaaatacaaggcacctggaaagaatttatacacaaacccgggaaagaaaggaactggatatggaaagcgaatgaagagcaccatcgtttacttaaaggagcaccatttaagttaaatcttcacccaagggactattttgacgctaatccttatttttctgaggaatctttaccaccaattaaaaaagaagagaagaagaaaacaatttcaaatacttttaaaccgtcttctcctggtaaaaagcctggtggaatgaaggcaggaacatttgatccttacccatcacattctgctgacccttatgtggctaaattggcaaatatttctggcaaagatgataagattttccacccaccaagtggaccaaaaagcagaccagttgaaagtataatgactttgaatgtcagaagggcactaaattcaaagaactacaagacttcttcagtaccatcctattagcaactggaagacaagtagctttct

SEQ ID NO: 119047 - DNA, 477 bp, Homo sapiens
  Payload ID: 3327
  Gene Symbol: C4orf48
  Gene Name: chromosome 4 open reading frame 48
  Uniprot ID: Q5BLP8
  ENST ID: ENST00000409860
  CDS Start-End: 152-439
ccggggtccctgaaccgcggtaagggcggtggtgcgggcgtccgaatgggcgttttctagatacggggcgcggactagaggctcgctgggcccggagaccggcggactggagtcggggaaccggagggcggccccgctccctctgctggccatggcccccccgcccgcgtgccggtccccgatgtcaccgccgccgccgccgctgctgctgctgctgctgagtctggcgctgctgggcgcccgggcccgcgccgagcccgccgggagtgccgtccccgcgcagagccgcccatgcgtggactgccacgccttcgagttcatgcagcgcgccctgcaggacctgcggaagacagcctgcagcctggacgcgcggacggagaccctactgctgcaggcagagcgccgtgccctgtgtgcctgctggccagcggggcactgaggaccacgctgctccgtgtgaataaatgcccagtggca

SEQ ID NO: 119048 - DNA, 433 bp, Homo sapiens
  Payload ID: 3327
  Gene Symbol: C4orf48
  Gene Name: chromosome 4 open reading frame 48
  Uniprot ID: Q5BLP8
  ENST ID: ENST00000409248
  CDS Start-End: 3-389
gcatgcgcgttgcgcgccggacgcggaacgtctgccggtgtccccgcgctgctggtcccggggtccctgaaccgcgggcggccccgctccctctgctggccatggcccccccgcccgcgtgccggtccccgatgtcaccgccgccgccgccgctgctgctgctgctgctgagtctggcgctgctgggcgcccgggcccgcgccgagcccgccgggagtgccgtccccgcgcagagccgcccatgcgtggactgccacgccttcgagttcatgcagcgcgccctgcaggacctgcggaagacagcctgcagcctggacgcgcggacggagaccctactgctgcaggcagagcgccgtgccctgtgtgcctgctggccagcggggcactgaggaccacgctgctccgtgtgaataaatgcccagtggcacgcctg

SEQ ID NO: 119049 - DNA, 5201 bp, Homo sapiens
  Payload ID: 3328
  Gene Symbol: C4orf50
  Gene Name: chromosome 4 open reading frame 50
  Uniprot ID: Q6ZRC1
  ENST ID: ENST00000324058
  CDS Start-End: 1299-2129
cactcacaatcgatgagcttgcacaggacgtggaggcttgtttccagcagctgtccaccctgcagccgggcagcaggggctggcagtgctcagcctctgcatgtaggggagagaactggagctttgctcagaagtggcacagtggctgggagagagctcactctcagcaggtttggggaaattggggtatttgttctaatgaagaagcgaagtctaaagagagtggtgaaggtgataagccgggaaagaccacggccctgggcaccagcgaagttcctggtaacccagggacactgcctcattgggatgaagccagcccaaaccctccacaggggcctgctgagccctggggtgccctcgagagagtgaggagcaggtttcatcagctcatttctggattgaagaaacagagaagccagattttacatgacaacaccaaacttcacggagaccaagagaggttccatgaaagagtgtgcgcccttgaaagagagagagagagagaggtgacaaaaatatccaggctcgagcgggataaccacaggctggtaggggacatctctcagttaaagaaagaactggatcaatatttacaggcaatctctgaccttgaagactgcaatgggaagagttactgcaaaattttggagcttgaagaggaaaatgaaacactgaaagggaatctgggccaactccagaaagccacgtctgagagtgtcaggaaatccaaagacacgatggagcaagtcaccctggaaaactggaagctccagacactgatctcggagcttggcgtcagttataaagagctgataaaggatatcgtgctaggaatagaagacatgatccgggccttaagtggggagaacgagcaccttctacgcagggtccatgtcctggagagggaagtcaccttgcagaggagcacggatcaggggcgtttggtgaggggaagggagcacctccagggaaaagccaagatgcacgctctagacaaagaggtgcaggtgactccactcacaggacagctgctttcaagagcctgtgggccacccttggaggaggaaatgagtctggctgcagggcagacaggaccttccacaggcaccgggaattccagacgcggtgctgattctccccctccatcgctggtctggagaaacactggtgtagccaatgccctgcaaggaaatgtcagtggagcagaagtgaaagaagcacatttggagaaagaggagaagaggcccaggtgttctgtggctcaggggcaagctctgagctccctgagcaatggccccatgctccgggactcagaggccgaggttactgaggaggatcccaggctgcgggcccagcagctccatcaccgggtgctgaccctgcagtgccagctcagggaccagggcgctgcccaccaggcgtctctggacgaggccacccgcctccaggaggagctccaggccaagcttgaagaacttcagaaaaagcaacatgaagcaaagttggcagtgactcccctgaaggccaagatagcttccctcgtccggaagtgccgggagaggaaccgcctgatcacccacctgctgcaggagctgcacagacatgggctggggaacctcctgctctccgagctggcgcagaacatgctcaacgacgtggcactggctgagtacacggccaccttcctggctccgggagtcccagagacaagccaccacctggacgtcaagtctgagatgacggcagctttaagagctcagacatacctcttgaatcctgaaatggacagtgtcctccaaagctcattgtcttcagagtcctggcctattcccgagccggagtggccagcacagacagcccaactggattctctgaagctccctctgtccttggtgtccacgcttgatcctggaacgtgcctggcagcggtcactgtggaaccaggtctccccgcacaacgtctgcaagaaaaaggcggaatgccctgtcctgccctccaagtcgataacgtcccagcaccctctgagctcctgagcccagcaaggatcctggcttttcaccaagagcttagacaaagcatttgcagcaattcccaggtccataaatcaccgctggagttagaaatgtaatagggccactcattctccggagccatttcatagactccataaatatttgaagcagaaccttcagagagtgctttaagaaattggtagcaatcagagccctcatttagtggcaagtggttttgccttcggctttgggattttgtgttcattgtcagagcttgagagaaacgctggcctgtgcctggcaaattctgaggagtttggctttggcaatgtcaaggcagcataggaaatatttactgtaccaaaacctattgaatgattggtccagaggttctcaactgggcacagttttagccccccagggaaaatctggccatgtctggagacatttttggttgtcacagctgggacactgctactggcatctggtgggtagaggccagggatgctatgaaatgtcctacaatacccaggccagcctcctacagcaaagaattacagcccgagggtcgccagtgctgaggtcgagagtccaggacggatctcatagctcccaacaagatcagccatggagaattgttttgttttgttttttctctgcccccggggtccttcccatgttttaaaagattttttgtctactaagtgaaacgcctaagtcaccatatattttacatttaaaaacattaaaactaaccagaactttctaatcagtccatccactccaaaaacgtctgttgatatccactggatgccaggcaatgtggcatgaaggagaagagacaagtcaatgttgatcctggcgccggggacctcacaggacaatgggagagatactcctgtgagtaaatcagcacgcacgcaagtgtcacatgtgccctgagcaacgggatgaaggtaagggtccgttctacttggcttgggacaactggaagtcagccacaaaggaatggctgggcagtgtccggtgggtgaggtgggaagggtgctgctgtacgagggaacgcatgtgcaaaggccctgaggcataaaactgaactgtggatgtgcccctggaggggaagtgggcaaagcatgctcttgtcaagccagctgcaagcagtcactgcatcgttcccatccagcaccccttccttccaccgagaacagagactcgtgccccgaatcaggtgggcgacccaggagaagagcacttctatcctgagggcagccccccaaaaagagagtctagggggcttggacgacacacaccagaccctgacccaggctcacccaccagagatgtcacctctctctttgggaaggggctgaggaggggcttaagggaaaggccaaagccgctacctgtccaattctgtcctctcctggaagtgactgtcccttcatggaaggacaaacaaggacaaggacaaggaactgacggctccccaggaagtgtcaaagtgtatagatttattttaacgtagtttagctttttgtttgaaatgaaaattacacagagttcccgtagactcttccccgggcttcccttgatgttaacatctcatgtgacttatgttgtacaattatagaaactagtgggttttatttcgaggaaaattggggagccattgagacgtaagaaaggcagcctcagcacattgagttccaccctttaaattcgtttatggggttttctgatgggttagcacattcatccatgtattcctggattgatttacccacagatctgtctatttatttatttattcaatatgcatttagtgactgctgtgcgagtgtctggctggatgctgctggggaagaagtgaagatgatgctgtccacctaggttttcagggacccccctggagaccctgtggccccgttaccacccctcaagaatccccagattggaaaccactgcggtgatccctttgttggttcaaccaccccagggcttccctataatttccaagcaggaagtgacctgcagcactggtttggtgatccgccttctgcctccctctgtattttgggacaatgtcattagctttgagcatcaggaacatgacagagagaggacagaaacccggtgcagccgaggacagccagctgagcccttgctgagccagcgagatgcagcgtggtgccaccacatctggtctccaggagtcccaggagctcagacgtccgtcgtcttgtgacttcatgctcccctctgccgcgctcacgtgctgggcctgggcagaaaggcaacccaggaaatccattaaagcaagccaagacgacctttgcagcgtaacccaacgattccctaataaatcatgtttccaaggcagagccacttattctcccgggccatgaattgccgtctgggtctagcactttgggtcggctcaagctttgtgccgtggctccctggggcacagtacaggatggcggactcccctcgcctggtctgtagaccccagcatttggaagggcacatggtggctccttgccacccatcagatgctccaggggcaggacctgctctggcaacccagtaggttcactttggtagaacctctgtggactccttagttcttccaggttgaatcctgggcagaaatcacatgaaagctgtgaagcacagacatcagtttagaaattgtgtactttcccgctgaatcccaaatgcacaataactgtacaccttgcggttgcatgaatctacaaggtctcctatgcgccctcattcataaactcaaggctgagaatgttggcaggccaagtcctgcccctccccggagtgagctgccttggttcacacgggagtggtccagcgacaggacccgacacctcccctccggaagctcttcagcaggacctgcctcgggtcctggggcagctatcctccggggcctgcctgcagtgaaaccatcagtccgtggagatgttcactggattcctgaccagttgtgggtcgggctcaaccctccctctgggttttcaggatttgtaatgatcgctccatttgtgtaaaataggccggcattttctcttgttactgagatgtatttttctatgtgagttaaatgtataatttgtgtaattttgtacattaaaatgtatgctttttcacaattaaagggtttttttcccttc

SEQ ID NO: 119050 - DNA, 4557 bp, Homo sapiens
  Payload ID: 3328
  Gene Symbol: C4orf50
  Gene Name: chromosome 4 open reading frame 50
  ENST ID: ENST00000531445
  CDS Start-End: 48-2300
ggggtgcccccgaggagcctgactcccaggaacatgagagcaaggaaatgcttttctttgcaggagagacaggtttgccactgtttcccagatttgccttatcagttgaaggggccgaacccactgatcatggtcatccacaggctgtgagcaaaggacacaacaggtgtgcactcacaatcgatgagcttgcacaggacgtggaggcttgtttccagcagctgtccaccctgcagccgggcagcaggggctggcagtgctcagcctctgcatgtaggggagagaactggagctttgctcagaagtggcacagtggctgggagagagctcactctcagcaggtttggggaaattggggtatttgttctaatgaagaagcgaagtctaaagagagtggtgaaggtgataagccgggaaagaccacggccctgggcaccagcgaagttcctggtaacccagggacactgcctcattgggatgaagccagcccaaaccctccacaggggcctgctgagccctggggtgccctcgagagagtgaggagcaggtttcatcagctcatttctggattgaagaaacagagaagccagattttacatgacaacaccaaacttcacggagaccaagagaggttccatgaaagagtgtgcgcccttgaaagagagagagagagagaggtgacaaaaatatccaggctcgagcgggataaccacaggctggtaggggacatctctcagttaaagaaagaactggatcaatatttacaggcaatctctgaccttgaagactgcaatgggaagagttactgcaaaattttggagcttgaagaggaaaatgaaacactgaaagggaatctgggccaactccagaaagccacgtctgagagtgtcaggaaatccaaagacacgatggagcaagtcaccctggaaaactggaagctccagacactgatctcggagcttggcgtcagttataaagagctgataaaggatatcgtgctaggaatagaagacatgatccgggccttaagtggggagaacgagcaccttctacgcagggtccatgtcctggagagggaagtcaccttgcagaggagcacggatcaggggcgtttggtgaggggaagggagcacctccagggaaaagccaagatgcacgctctagacaaagaggtgcaggtgactccactcacaggacagctgctttcaagagcctgtgggccacccttggaggaggaaatgagtctggctgcagggcagacaggaccttccacaggcaccgggaattccagacgcggtgctgattctccccctccatcgctggtctggagaaacactggtgtagccaatgccctgcaaggaaatgtcagtggagcagaagtgaaagaagcacatttggagaaagaggagaagaggcccaggtgttctgtggctcaggggcaagctctgagctccctgagcaatggccccatgctccgggactcagaggccgaggttactgaggaggatcccaggctgcgggcccagcagctccatcaccgggtgctgaccctgcagtgccagctcagggaccagggcgctgcccaccaggcgtctctggacgaggccacccgcctccaggaggagctccaggccaagcttgaagaacttcagaaaaagcaacatgaagcaaagttggcagtgactcccctgaaggccaagatagcttccctcgtccggaagtgccgggagaggaaccgcctgatcacccacctgctgcaggagctgcacagacatgggctggggaacctcctgctctccgagctggcgcagaacatgctcaacgacgtggcactggctgagtacacggccaccttcctggctccgggagtcccagagacaagccaccacctggacgtcaagtctgagatgacggcagctttaagagctcagacatacctcttgaatcctgaaatggacagtgtcctccaaagctcattgtcttcagagtcctggcctattcccgagccggagtggccagcacagacagcccaactggattctctgaagctccctctgtccttggtgtccacgcttgatcctggaacgtgcctggcagcggtcactgtggaaccaggtctccccgcacaacgtctgcaagaaaaaggcggaatgccctgtcctgccctccaagtcgataacgtcccagcaccctctgagctcctgagcccagcaaggatcctggcttttcaccaagagcttagacaaagcatttgcagcaattcccaggtccataaatcaccgctggagttagaaatgtaatagggccactcattctccggagccatttcatagactccataaatatttgaagcagaaccttcagagagtgctttaagaaattggtagcaatcagagccctcatttagtggcaagtggttttgccttcggctttgggattttgtgttcattgtcagagcttgagagaaacgctggcctgtgcctggcaaattctgaggagtttggctttggcaatgtcaaggcagcataggaaatatttactgtaccaaaacctattgaatgattggtccagaggttctcaactgggcacagttttagccccccagggaaaatctggccatgtctggagacatttttggttgtcacagctgggacactgctactggcatctggtgggtagaggccagggatgctatgaaatgtcctacaatacccaggccagcctcctacagcaaagaattacagcccgagggtcgccagtgctgaggtcgagagtccaggacggatctcatagctcccaacaagatcagccatggagaattgttttgttttgttttttctctgcccccggggtccttcccatgttttaaaagattttttgtctactaagtgaaacgcctaagtcaccatatattttacatttaaaaacattaaaactaaccagaactttctaatcagtccatccactccaaaaacgtctgttgatatccactggatgccaggcaatgtggcatgaaggagaagagacaagtcaatgttgatcctggcgccggggacctcacaggacaatgggagagatactcctgtgagtaaatcagcacgcacgcaagtgtcacatgtgccctgagcaacgggatgaaggtaagggtccgttctacttggcttgggacaactggaagtcagccacaaaggaatggctgggcagtgtccggtgggtgaggtgggaagggtgctgctgtacgagggaacgcatgtgcaaaggccctgaggcataaaactgaactgtggatgtgcccctggaggggaagtgggcaaagcatgctcttgtcaagccagctgcaagcagtcactgcatcgttcccatccagcaccccttccttccaccgagaacagagactcgtgccccgaatcaggtgggcgacccaggagaagagcacttctatcctgagggcagccccccaaaaagagagtctagggggcttggacgacacacaccagaccctgacccaggctcacccaccagagatgtcacctctctctttgggaaggggctgaggaggggcttaagggaaaggccaaagccgctacctgtccaattctgtcctctcctggaagtgactgtcccttcatggaaggacaaacaaggacaaggacaaggaactgacggctccccaggaagtgtcaaagtgtatagatttattttaacgtagtttagctttttgtttgaaatgaaaattacacagagttcccgtagactcttccccgggcttcccttgatgttaacatctcatgtgacttatgttgtacaattatagaaactagtgggttttatttcgaggaaaattggggagccattgagacgtaagaaaggcagcctcagcacattgagttccaccctttaaattcgtttatggggttttctgatgggttagcacattcatccatgtattcctggattgatttacccacagatctgtctatttatttatttattcaatatgcatttagtgactgctgtgcgagtgtctggctggatgctgctggggaagaagtgaagatgatgctgtccacctaggttttcagggacccccctggagaccctgtggccccgttaccacccctcaagaatccccagattggaaaccactgcggtgatccctttgttggttcaaccaccccagggcttccctataatttccaagcaggaagtgacctgcagcactggtttggtgatccgccttctgcctccctctgtattttgggacaatgtcattagctttgagcatcaggaacatgacagagagaggacagaaacccggtgcagccgaggacagccagctgagcccttgctgagccagcgagatgcagcgtggtgccaccacatctggtctccaggagtcccaggagctcagacgtccgtcgtcttgtgacttcatgctcccctctgccgcgctcacgtgctgggcctgggcagaaaggcaacccaggaaatccattaaagcaagccaagacgacctttgcagcgtaacccaacgattccctaataaatcatgtttcc

SEQ ID NO: 119051 - DNA, 846 bp, Homo sapiens
  Payload ID: 3329
  Gene Symbol: C4orf51
  Gene Name: chromosome 4 open reading frame 51
  Uniprot ID: C9J302
  ENST ID: ENST00000438731
  CDS Start-End: 1-609
atgtcacactacttctacttgactccacaaattcttctgccctttagccctcttacttctcaagagtttgatctgatcagacgcaaggctggagcatcttggcaggatgaaacacgatggtcagattcttccgtgacaacatacacaggcagttaccggaaaaaacaactggacaagtccatgtgcagccaattttcttttagagcaggacagcatgagcctgagtgtaaacagatgtcattgacaaacagttctgcctgtcatcttctctgctgggctggtacccaagagactacagatatcaaaggactattccctgatataaccaggccctttaaaaagtcatttgatgtcaagcatggagtggcacatcaaatttgggattttggtgattgttttccgacacctccaaattatggaaaatactgtgtgagacctaaaaagccagcacaggaggccctgataaactacagtcgacgagggaaaggtgtcctaaagcatcttcatggacggtgcgattctgaaagcaaggtttgctcatctgaggattcagaagctgatcgatactccgattatggctggggaggaccctcatcgccatttaactgagttggaaaatgaagccacaaggctggaggcgtggagtttgcttaataaacaactttgaggtatggggccctcccaacaccctccccccacccgccccgcccaggaacgtctggaccctggcaggttggctttctgggacaattccatgggcttcatttatcagttttttccctttttaattggtggagagagacaaaagtttttataatctttattaaattttcctttttaaataaa

SEQ ID NO: 119052 - DNA, 722 bp, Homo sapiens
  Payload ID: 3329
  Gene Symbol: C4orf51
  Gene Name: chromosome 4 open reading frame 51
  ENST ID: ENST00000511965
  CDS Start-End: 1-488
cagattcttccgtgacaacatacacaggcagttaccggaaaaaacaactggacaagtccatgtgcagccaattttcttttagagcaggacagcatgagcctgagtgtaaacagatgtcattgacaaacagttctgcctgtcatcttctctgctgggctggtacccaagagactacagatatcaaaggactattccctgatataaccaggccctttaaaaagtcatttgatgtcaagcatggagtggcacatcaaatttgggattttggtgattgttttccgacacctccaaattatggaaaatactgtgtgagacctaaaaagccagcacaggaggccctgataaactacagtcgacgagggaaaggtgtcctaaagcatcttcatggacggtgcgattctgaaagcaaggtttgctcatctgaggattcagaagctgatcgatactccgattatggctggggaggaccctcatcgccatttaactgagttggaaaatgaagccacaaggctggaggcgtggagtttgcttaataaacaactttgaggtatggggccctcccaacaccctccccccacccgccccgcccaggaacgtctggaccctggcaggttggctttctgggacaattccatgggcttcatttatcagttttttccctttttaattggtggagagagacaaaagtttttataatctttattaaattttcctttttaaat

SEQ ID NO: 119053 - DNA, 2358 bp, Homo sapiens
  Payload ID: 3330
  Gene Symbol: C5orf15
  Gene Name: chromosome 5 open reading frame 15
  Uniprot ID: Q8NC54
  ENST ID: ENST00000231512
  CDS Start-End: 204-1001
atccgcagccaactgtgtggcggtccccactttcgcctagcggcaactccctcctccctgcaatccttccttcttattccggtttccagagcacgtctccaggcttcgacgtcaccacgctgggacgtatgtgccgagggccgcggcgtctgacctcatggcgtagagcctagcaacagcgcaggctcccagccgagtccgttatggccgctgccgtcccgaagaggatgagggggccagcacaagcgaaactgctgcccgggtcggccatccaagcccttgtggggttggcgcggccgctggtcttggcgctcctgcttgtgtccgccgctctatccagtgttgtatcacggactgattcaccgagcccaaccgtactcaactcacatatttctaccccaaatgtgaatgctttaacacatgaaaaccaaaccaaaccttctatttcccaaatcagcaccaccctccctcccacgacgagtaccaagaaaagtggaggagcatctgtggtccctcatccctcgcctactcctctgtctcaagaggaagctgataacaatgaagatcctagtatagaggaggaggatcttctcatgctgaacagttctccatccacagccaaagacactctagacaatggcgattatggagaaccagactatgactggaccacgggccccagggacgacgacgagtctgatgacaccttggaagaaaacaggggttacatggaaattgaacagtcagtgaaatcttttaagatgccatcctcaaatatagaagaggaagacagccatttcttttttcatcttattatttttgctttttgcattgctgttgtttacattacatatcacaacaaaaggaagatttttcttctggttcaaagcaggaaatggcgtgatggcctttgttccaaaacagtggaataccatcgcctagatcagaatgttaatgaggcaatgccttctttgaagattaccaatgattatattttttaaagcactgtgatttgaatttgcttatgtaattttatttgcttgactttttatatgatattgtgcaaatgtttgccataggcaattggtacttaaatgagaggtgagtctctcttttgccttggtgctttggaaattaaatgtcacaaacgagtatataattttttatctgtacttttagagctgagtttaatcaggtgtccaaaatgtgagttaaacattaccttatatttacactgttagtttttattgttttagatttattatgcttcttctggaagtattagtgatgctacttttaaaagatcccaaacttgtaactaaattctgacatatctgttactgctgactcacattcattctccgccattcaaatactattttttatccacatttttttttgttcccaaactgtaatgtacaaggatatgtgtgataatgctttggatttgagtaatatttttttttcttccaagaaaactgctttggatatttttagataatttaaacataatttaggataatgatattgctcaatctgaccacaattttaggtaaaacattaaatgtgtcaagaaatcttggcaacagagactctgcagcttgcagtggacatagataaaatgttacagagatactatttttttggttggaattactatattaaatttagaagcagaaactggtaaaatgttaaatacatgtacaattgcttttagttagcaattgattgtagcatgggttcctccaaggtttcaagcaatgggcagagtttaaaattatatcagattcgtttacttcgtttattattttacagtaaatttgaataaatcttaggggtcattatcacttaaataatactgtacctaggtctttcaaattaaaattatacctgaatgaagttgtttgtatacataaaggatatttgtgtacaattaccttttttcccccacacttgttttctttgtttttgttttttatggcaactggaaagtatttactatgggattcatttatgtctgtctttctatcataaagaattgatcaatatgtaaatatgtgatttgaaccatggttgacttacaagtgtcactacagctttttagaaaacatagccctaatatatgttaagcaggacccgggtgagccagtgggcttgcgctttatgtagagctggaagaaggccgtccatcctgtctcttgggcggacagtgtactttcctaatagggaagggaagcacaatggaaatacccctgaaccgttttattgcagtaatttttttcatatctgaaactattatttaatattttgaataagattttaaaaaataaatggcaaagatataaatctatgatttca

SEQ ID NO: 119054 - DNA, 3612 bp, Homo sapiens
  Payload ID: 3331
  Gene Symbol: C5orf22
  Gene Name: chromosome 5 open reading frame 22
  Uniprot ID: Q49AR2
  ENST ID: ENST00000325366
  CDS Start-End: 128-1456
aatccgaaaacgcaaccgggtgagggagcgcttccgcccggagagagctggccgggatgaggcgccggctttcccgggtcttctccagctgccaccgctttactgcaaaactgacgggcgcaaaaacatgagtgactccgcgggagggcgcgctggtctccggcgttaccccaagctcccagtgtgggtggtggaggatcatcaggaggttctaccctttatataccgggccataggctcaaagcatcttcctgccagtaatgtaagttttttacatttcgactcacatccagacctccttattcctgtgaatatgccagcagacaccgtgtttgataaggaaacactctttggagaattaagtattgaaaattggattatgcctgcagtttatgctggccatttttcacatgtaatatggtttcatcccacatgggctcagcagatcagagagggcagacaccactttttagtaggcaaagacacttctaccacaacaatcagggttacaagtacagatcattatttcctaagtgatggtctgtatgtacctgaagaccagctagagaaccaaaaacctttacaattggatgtaattatggtaaaaccttataaactctgtaacaatcaagaagaaaacgatgcagtgtcttctgctaagaaaccaaagctagccctggaagattcggaaaacactgcctctactaactgtgactcttcttcagaaggactggaaaaggacacagcaacacagagaagtgaccagacttgcctagaaccatcatgttcatgttcttctgaaaatcaggaatgccagactgctgccagcactggggaaattctggaaattttgaagaaagggaaggcatttgttttagatattgacttggattttttttcagtcaagaatcccttcaaagaaatgttcactcaggaagagtacaaaatcttacaagagctgtaccaatttaagaaacctggcaccaacctaacagaggaagatttggtagatattgttgatactcgaattcatcaattagaggatttagaagccactttcgctgatttgtgtgatggtgatgatgaagaaacggtacagagatgggcttcaaaccctggaatggaatcactagttccccttgtacagagtttgaaaaaacggatggaagtaccagactatgaaatggttcaccaggctggtttaacctgcgattattcagaacttcctcaccatatcagcacagaacaagaaatagagtgtcttattcaatctgtgcattatttgctgaaaaatttaccaaatcctactcttgtgacaattgcaaggtcaagtctggatgattactgtccttctgaccaagttgacactattcaagaaaaggtcctcaatatgctacgtgccctctatggaaatctagacctccaagtgtatgcagcagagtctcctccatcttgaaacaaacaaaacattaggctcctgttgtatcttggtttagtaacaggcccttaattaacttatttgtacatgagtcttccagagaacactgttttatattaactttcagttgaaatctttcagatattttgaatctctgaacaaccattgtcagttgtgaatgatggtaaattttttggcatcaagtctcataaccccaactgatagaactgttgcttatctgtcttccttaagtattttttagggttttgtttttttttttgtttgtttgtttgtttgtcttcacttttcccccaggtctgttgagctgtatgagattcattcatacttcatttattcattcaactaatatttgttgaacacttacatgtaccagacattattaagtgctgggtatatggtaatgaacagaatagacaaggcccctgcccttttaggggagacagatgagaagtaaattacgggttatgagaaatgttatgaaggaaaggacaacaacagacatgtcttagtacttagggtatcatggctttataggaaagtaacattctctatctttttttttttttttaattttataaaaatagagatggggtctcaccatgttacccaggctggtctcaaactcctgggcacaagcaatccacctgccttcgcctcccgaagtgctgggattacagatgtaagtcactaccccagccagaaactaacattctcaaaagctactaccaaaaaaaccccacaaatttgccaatccatgaaagtatcataggaagtctacctttccaaggaatttggcattgtggccctgctcttgccaaatgctctccagcattgttggtatcaaggtggtctggttgagtaaacttgaccaaacaaaaattaactgttttttgcttttctgtttttgttttgctgatcaaaaaagcccttcagggtctcttgtgcatccaggaggtcattgtagatatcaataatatagtgcctaagtgccactttattgccaagtctagattgatacttttttcagataaaccagctttttatgtaaagagtaagggaaaaagttaaatctttaattctgacctgccataaatacccaaagatataaactgtcttccaccacccccctcataactaagacatccttcctgagtcactcttaatcatgaaacttgattttctcaattggccagtcttctgatctttagtatctctttagttcagtaatttttacctacctacttgatttattttcctttaaaaggtgaaatgacatttaaagaaaaacaaacacccatcattcctcagtcccaacacagcagttcttttcactcttgcttgtaactttcaggccttacccacatgtgttcctatagagttgcatgtagctaaaattatagtgtgctgcctaactttgtgctaataacgaaggacacacattatcattgcctcacagtggatggcacctgaccccatttttccaaggattctattttccagtgaatttttgtcaccgagttaatttcccaagtctgatagcatgaatgcttatttgtgctgtgaaaagcagagcagcctgactcagctttccattttcataggataatatgtgccaaaaaaggtttattttcttggtaaaatcagaattgtagaattgtgctatttttaatttttaaaatttttggttagagcttatagacattacttttatgattattttgcgtgctaaataagttaaagggtatgttttgaactatagcactaattaatgtgtgtgatcctagtatgttgatagctttgattttgtgagtggtttactagtcatttattatgattcccatgaactctgatatgattcattgtggttttaactcaggttgaataaaagcatccatttcttttataggaaggtttgtttaattctcatgttctgtgatcatctctttgagaataaaattcagtccctaatagttgaaaagaatcaacttagtaaattatgtcttgcacattccaaataggaaggtatttactttatcaagatgtgtttcatttgtgttctgagtaccagtgaggggataccgtggtacagtgttttgaattgtgtactaatatcattaaagcatgggattttagtggctttttaaaaaatgtga

SEQ ID NO: 119055 - DNA, 978 bp, Homo sapiens
  Payload ID: 3331
  Gene Symbol: C5orf22
  Gene Name: chromosome 5 open reading frame 22
  ENST ID: ENST00000513967
  CDS Start-End: 105-515
gggagcgcttccgcccggagagagctggccgggatgaggcgccggctttcccgggtcttctccagctgccaccgctttactgcaaaactgacgggcgcaaaaacatgagtgactccgcgggagggcgcgctggtctccggcgttaccccaagctcccagtgtgggtggtggaggatcatcaggaggttctaccctttatataccgggccataggctcaaagcatcttcctgccagtaatgtaagttttttacatttcgactcacatccagacctccttattcctgtgaatatgccagcagacaccgtgtttgataaggaaacactctttggagaattaagtattgaaaattggattatgcctgcagtttatgctggccatttttcacatgtaatatggtttcatcccacatgggctcagcagatcagagagggcagacaccactttttagtaggcaaagacacttctaccacaacaatcaggactggaaaaggacacagcaacacagagaagtgaccagacttgcctagaaccatcatgttcatgttcttctgaaaatcaggaatgccagactgctgccagcactggggaaattctggaaattttgaagaaagggaaggcatttgttttagatattgacttggattttttttcagtcaagaatcccttcaaagaaatgttcactcaggaagatttggtagatattgttgatactcgaattcatcaattagaggatttagaagccactttcgctgatttgtgtgatggtgatgatgaagaaacggtacagagatgggcttcaaaccctggaatggaatcactagttccccttgtacagagtttgaaaaaacggatggaagtaccagactatgaaatggttcaccaggctggtttaacctgcgattattcagaacttcctcaccatatcagcacagaacaagaaatagagtgtcttattcaatctgtgcattatttgctg

SEQ ID NO: 119056 - DNA, 3117 bp, Homo sapiens
  Payload ID: 3331
  Gene Symbol: C5orf22
  Gene Name: chromosome 5 open reading frame 22
  ENST ID: ENST00000510659
  CDS Start-End: 107-517
gagggagcgcttccgcccggagagagctggccgggatgaggcgccggctttcccgggtcttctccagctgccaccgctttactgcaaaactgacgggcgcaaaaacatgagtgactccgcgggagggcgcgctggtctccggcgttaccccaagctcccagtgtgggtggtggaggatcatcaggaggttctaccctttatataccgggccataggctcaaagcatcttcctgccagtaatgtaagttttttacatttcgactcacatccagacctccttattcctgtgaatatgccagcagacaccgtgtttgataaggaaacactctttggagaattaagtattgaaaattggattatgcctgcagtttatgctggccatttttcacatgtaatatggtttcatcccacatgggctcagcagatcagagagggcagacaccactttttagtaggcaaagacacttctaccacaacaatcaggactggaaaaggacacagcaacacagagaagtgaccagacttgcctagaaccatcatgttcatgttcttctgaaaatcaggaatgccagactgctgccagcactggggaaattctggaaattttgaagaaagggaaggcatttgttttagatattgacttggattttttttcagtcaagaatcccttcaaagaaatgttcactcaggaagagtacaaaatcttacaagagctgtaccaatttaagaaacctggcaccaacctaacagaggaagatttggtagatattgttgatactcgaattcatcaattagaggatttagaagccactttcgctgatttgtgtgatggtgatgatgaagaaacggtacagagatgggcttcaaaccctggaatggaatcactagttccccttgtacagagtttgaaaaaacggatggaagtaccagactatgaaatggttcaccaggctggtttaacctgcgattattcagaacttcctcaccatatcagcacagaacaagaaatagagtgtcttattcaatctgtgcattatttgctgaaaaatttaccaaatcctactcttgtgacaattgcaaggtcaagtctggatgattactgtccttctgaccaagttgacactattcaagaaaaggtcctcaatatgctacgtgccctctatggaaatctagacctccaagtgtatgcagcagagtctcctccatcttgaaacaaacaaaacattaggctcctgttgtatcttggtttagtaacaggcccttaattaacttatttgtacatgagtcttccagagaacactgttttatattaactttcagttgaaatctttcagatattttgaatctctgaacaaccattgtcagttgtgaatgatggtaaattttttggcatcaagtctcataaccccaactgatagaactgttgcttatctgtcttccttaagtattttttagggttttgtttttttttttgtttgtttgtttgtttgtcttcacttttcccccaggtctgttgagctgtatgagattcattcatacttcatttattcattcaactaatatttgttgaacacttacatgtaccagacattattaagtgctgggtatatggtaatgaacagaatagacaaggcccctgcccttttaggggagacagatgagaagtaaattacgggttatgagaaatgttatgaaggaaaggacaacaacagacatgtcttagtacttagggtatcatggctttataggaaagtaacattctctatctttttttttttttttaattttataaaaatagagatggggtctcaccatgttacccaggctggtctcaaactcctgggcacaagcaatccacctgccttcgcctcccgaagtgctgggattacagatgtaagtcactaccccagccagaaactaacattctcaaaagctactaccaaaaaaaccccacaaatttgccaatccatgaaagtatcataggaagtctacctttccaaggaatttggcattgtggccctgctcttgccaaatgctctccagcattgttggtatcaaggtggtctggttgagtaaacttgaccaaacaaaaattaactgttttttgcttttctgtttttgttttgctgatcaaaaaagcccttcagggtctcttgtgcatccaggaggtcattgtagatatcaataatatagtgcctaagtgccactttattgccaagtctagattgatacttttttcagataaaccagctttttatgtaaagagtaagggaaaaagttaaatctttaattctgacctgccataaatacccaaagatataaactgtcttccaccacccccctcataactaagacatccttcctgagtcactcttaatcatgaaacttgattttctcaattggccagtcttctgatctttagtatctctttagttcagtaatttttacctacctacttgatttattttcctttaaaaggtgaaatgacatttaaagaaaaacaaacacccatcattcctcagtcccaacacagcagttcttttcactcttgcttgtaactttcaggccttacccacatgtgttcctatagagttgcatgtagctaaaattatagtgtgctgcctaactttgtgctaataacgaaggacacacattatcattgcctcacagtggatggcacctgaccccatttttccaaggattctattttccagtgaatttttgtcaccgagttaatttcccaagtctgatagcatgaatgcttatttgtgctgtgaaaagcagagcagcctgactcagctttccattttcataggataatatgtgccaaaaaaggtttattttcttggtaaaatcagaattgtagaattgtgctatttttaatttttaaaatttttggttagagcttatagacattacttttatgattattttgcgtgctaaataagttaaagggtatgttttgaactatagcactaattaatgtgtgtgatcctagtatgttgatagctttgattttgtgagtggtttactagtcatttattatgattcccatgaactctgatatgattcattgtggttttaactcaggttgaataaaagcatccatttctttta

SEQ ID NO: 119057 - DNA, 583 bp, Homo sapiens
  Payload ID: 3331
  Gene Symbol: C5orf22
  Gene Name: chromosome 5 open reading frame 22
  ENST ID: ENST00000511208
  CDS Start-End: 95-244
ccgcccggagagagctggccgggatgaggcgccggctttcccgggtcttctccagctgccaccgctttactgcaaaactgacgggcgcaaaaacatgagtgactccgcgggagggcgcgctggtctccggcgttaccccaagctcccagtgtgggtggtggaggatcatcaggaggttctaccctttatataccgggccataggctcaaagcatcttcctgccagtaatagaattaagtattgaaaattggattatgcctgcagtttatgctggccatttttcacatgtaatatggtttcatcccacatgggctcagcagatcagagagggcagacaccactttttagtaggcaaagacacttctaccacaacaatcagaaggactggaaaaggacacagcaacacagagaagtgaccagacttgcctagaaccatcatgttcatgttcttctgaaaatcaggaatgccagactgctgccagcactggggaaattctggaaattttgaagaaagggaaggcatttgttttagatattgacttggattttttttcagtcaagaatcccttcaaagaaatgttca

SEQ ID NO: 119058 - DNA, 914 bp, Homo sapiens
  Payload ID: 3331
  Gene Symbol: C5orf22
  Gene Name: chromosome 5 open reading frame 22
  ENST ID: ENST00000504464
  CDS Start-End: 78-488
gccgggatgaggcgccggctttcccgggtcttctccagctgccaccgctttactgcaaaactgacgggcgcaaaaacatgagtgactccgcgggagggcgcgctggtctccggcgttaccccaagctcccagtgtgggtggtggaggatcatcaggaggttctaccctttatataccgggccataggctcaaagcatcttcctgccagtaatgtaagttttttacatttcgactcacatccagacctccttattcctgtgaatatgccagcagacaccgtgtttgataaggaaacactctttggagaattaagtattgaaaattggattatgcctgcagtttatgctggccatttttcacatgtaatatggtttcatcccacatgggctcagcagatcagagagggcagacaccactttttagtaggcaaagacacttctaccacaacaatcaggactggaaaaggacacagcaacacagagaagtgaccagacttgcctagaaccatcatgttcatgttcttctgaaaatcaggaatgccagactgctgccagcactggggaaattctggaaattttgaagaaagggaaggcatttgttttagatattgacttggattttttttcagtcaagaatcccttcaaagaaatgttcactcaggaagagtacaaaatcttacaagagctgtaccaatttaagaaacctggcaccaacctaacagaggaagatttggtagatattgttgatactcgaattcatcaattagaggatttagaagccactttcgctgatttgtgtgatggtgatgatgaagaaacggtacagagatgggcttcaaaccctggaatggaatcactagttccccttgtacagagtttgaaaaaacggatggaagtaccagactatgaaatggt

SEQ ID NO: 119059 - DNA, 568 bp, Homo sapiens
  Payload ID: 3331
  Gene Symbol: C5orf22
  Gene Name: chromosome 5 open reading frame 22
  ENST ID: ENST00000507818
  CDS Start-End: 99-568
gcttccgcccggagagagctggccgggatgaggcgccggctttcccgggtcttctccagctgccaccgctttactgcaaaactgacgggcgcaaaaacatgagtgactccgcgggagggcgcgctggtctccggcgttaccccaagctcccagtgtgggtggtggaggatcatcaggaggttctaccctttatataccgggccataggctcaaagcatcttcctgccagtaatgtaagttttttacatttcgactcacatccagacctccttattcctgtgaatatgccagcagacaccgtgtttgataaggaaacactctttggagaccattggattctcacgtctatttctgcatttagtccattgccatatgctgttttggttgaaatatatgatgaagattcaggctttcacagagaattaagtattgaaaattggattatgcctgcagtttatgctggccatttttcacatgtaatatggtttcatcccacatgggctcagcagatcagagagggcagacaccactttttagtaggcaaagacacttctaccacaacaatcag

SEQ ID NO: 119060 - DNA, 4270 bp, Homo sapiens
  Payload ID: 3332
  Gene Symbol: C5orf24
  Gene Name: chromosome 5 open reading frame 24
  Uniprot ID: Q7Z6I8
  ENST ID: ENST00000338051
  CDS Start-End: 62-628
aagaaatggggtcagcaggagttccagcatctcagaattgtggtgaaaaccaatacaaaaaatgatgcatcctgttgccagcagtaatccagctttctgtgggcctggcaagccttcctgcctcaatgaagatgccatgagagctgctgatcagtttgacatatattcctcccagcaaagcaaatacagccacacagtcaaccacaaaccaatggtttgtcagaggcaagacccattaaatgaaacacacttgcagactacaagtggcagaagcatagaaataaaagatgaactaaagaaaaagaagaatctcaaccgatctggtaagcgtggccggccttcgggaaccaccaaatcagcaggataccggaccagcacaggcagacccctgggaaccaccaaagcagctggatttaagacaagtccaggcagacctttggggacaactaaagctgcgggatacaaagtcagcccaggcagacctccaggtagcattaaagctctatcccgtcttgccgatcttggttatggctgtggcactgctgcttttccttaccctatgatgcatggcagagcagttcatggggtagaggaaactagcagtgaagtcaaaccacccaatgagtgaatgaggcaggaaaagagggccaggtttagaaggaagattgtgaataatcccaaagcttcttggttttattttgatatacataattttatggcctgggctttccaaatttgttttcctgtttggtttttttcctgcttttgctcaaaaactgccatatgctgacagatgcactcagggcatgagcagcggcattgtatttgtacataggttcaagtgtaacacctaactaaatcatttttccttttcctttagagttatggtcatgtctcatgtttcattactactttggggctgttctaaatagatgctttatgtgataaacaactgaaaccattatacctattagtttgtgaagtaagcctacagtataataaagacactaacgtatttttaactgatggagcaaaaaagcaaactaatgaatcaggattacttgaggtaatggctgtgtgagtttttgtaacatttattttcacaagatgggacacatatttgtatgctttggcatttacatccacttcaaatgttaaaaaacttatttttaatgttttaggtttaagcagcttgtaatttattgatctacatggcattaattgatttaaccattatacctgaaataattcttcagtgtttgcctttgagcagtgataggttgtgtattttttaattgcctaagagcatatataccaaacactacaaacaattcatatttacagaaaatttaaactattttataaaaactgcacattacatttttggtgaaatatagtgcattctgaggatagcatatttcatataatagaaaaagaagcattctctaggtttgcatgtagctatagtcactatattttgcctttcatatagaaagttttaaagtattatgtttaaaaacatttattggctgggtgtggtggctcacacccagcactttgggaggccgaggcaggcggatcacttgaggtcagcagttcaagactagcctggccaacatggtgaaaccccatctctactaaaaatataaaaattagccaggcgtggtggcgggcgcctgtaatccaagctactggggaggctgaggcaggagaattgcttaaatccaggaggcggaggttgcagtgagccaagattgtgccactgcactccagcctgggtgacagagtaagactccgtctcaaataaataaataaataaataaataaataaataaataaataaaaccatttattgatgttgctcatttatttggaacgtttttagtttttctcagaaattgtcccattgcattagcacttactgtgttttcaggttgatatctaccaaaggacacaaattgaatggtagactgtaaaactggtataaacagaatgcagtttcccgaccatcagaacccaaatattaagaagcatataggaatccatctatgcatgaaacatgtaaaaaatatgttggttagtttaattaaaaatcttattgtgggtccagtgagaccatctcatccaaaagattttttttcccccaatgatgtttgctttagaagcaagatagaaaggaaaaaaagtattaggtagatatgtatagtagggacagagggaaatctttcttctttcctttctgaaagtaatacttcttgttacacattttatttattgagtttgttctaaataaaatattataaacttcagacttgaaaaaattccacttaactttaaagttacaatgtttgtatttgggattttaaatgcctttgagattaaaatgtagaattgcaggacccaaaaacttttaaaataattaaaattttaaaagagcacatgttgtgttttttgggcttgctattaatgcaaactctgattgcaaatggatgtcatgtttcataccttttttatcaggaaaaaagcagcaagccttcaggtgttccagtgatgcctgacacaattgagctggactttatgctgctctttacagtaagaggtgttgcattgtatgtggggactatgtgcactggcgtctaagacagtgacctcaacaatattagctttgcacaaaccatagagaacgatgttggatggttacataatcagttataacattctggcagctaaattgctacaagagctttttcttgcaaaagcttaaaatacaagatttttaataatttactcagaacagtataacttctgacacacacaaatgcttgcctctttattcatatgttcgttacctactctgtacatgtatctgtcatttagctgtttctcaagatgatgttcagcagttggctgcttagaaatctttttcaagccagtttctaaagacatttgtttaatgttctaccatagaataatgcacaccattgtcaaagatttgattattgtgttttatagtaagtccatttgacatttatttccctttcagtttattttccttccttattttgttatacatacccttccctttctcccctgcctttcgtacattcattcctcttcctctaccctccagcacatctacttactggtgctgtgctgtgtgtcagaagataaaacaggtgtattattgtataatgaattttgtatacatgtttatgaaatggtgagatcaactaaaggaggcatgttcataacagtgtttattatcagcagctatgtcccaggaaaaaaaaatgggaggggcaaatggctacagttgtaaatggataacatcatttagaaagccgaatttactgttcatctgagcggttacctggagtattatatctatgcactggtgagcatctcctgattccacttacttttctccctgtgaacagtttaccggtgccatgctgaagagaaagacatctaagtgataacatgaatgaagtcttaaaatttaaagtatttttactgctatataaactaaagactacattgtgcatattttgttaacactgtctcttgttatgataaacactgaaatagcatgttaaacagttgcctatactttaatataatcagttggggaaaactggccttttctcccccactgtatgattgtttcttgaaaggtaaattgctaattttatacagtgtaattctgttcttcacaaaataggtttcattattctatatttaaactgttggtcagaaaatgatctgcaattcaagtaagtctgcattacttttttctttaaaaagtactttaacatgccttatttattatattagcaaatgagctaataacagatgaaattttcattttttgacagatataaccttgcataagtagtatttagggtgattttgatactatctttagagttttgcattggatattaaaaaatatattggcacaatgtattggaagaaaatgagtagtatctggtttaatttttaatatttagggacattttaaaaaatcaatgttttaattagactaaaaattctttatattttttatttactttttaaagaaacatctgtcaaagtaatattgattccaaactgatgtttgtgtgaatttacatgtctattttcatgaactaagaatagagtttctttgagttgaggagaaaaaaatatatatgtgggtccatttattaggttaaagttgacccattcagtgtaaaaataaccatagtgtgtgagctaaagaaaaaaaaaa

SEQ ID NO: 119061 - DNA, 5065 bp, Homo sapiens
  Payload ID: 3332
  Gene Symbol: C5orf24
  Gene Name: chromosome 5 open reading frame 24
  Uniprot ID: Q7Z6I8
  ENST ID: ENST00000394976
  CDS Start-End: 229-795
gcctcttcgtactgcgtccggggcaggaccgtgcgcggcggccgcggcgggtgctgggagccagcgcctgcctcgccgccgccctcgctgcctgccactccgtcttggcccgttctccgcaccgtgcagaggcggcgggctggggagggagcggcgccagcacgaggttcccagccgctgggaagcccctagacgcgccgaggggccgggctacgagcggctgagaaaatgatgcatcctgttgccagcagtaatccagctttctgtgggcctggcaagccttcctgcctcaatgaagatgccatgagagctgctgatcagtttgacatatattcctcccagcaaagcaaatacagccacacagtcaaccacaaaccaatggtttgtcagaggcaagacccattaaatgaaacacacttgcagactacaagtggcagaagcatagaaataaaagatgaactaaagaaaaagaagaatctcaaccgatctggtaagcgtggccggccttcgggaaccaccaaatcagcaggataccggaccagcacaggcagacccctgggaaccaccaaagcagctggatttaagacaagtccaggcagacctttggggacaactaaagctgcgggatacaaagtcagcccaggcagacctccaggtagcattaaagctctatcccgtcttgccgatcttggttatggctgtggcactgctgcttttccttaccctatgatgcatggcagagcagttcatggggtagaggaaactagcagtgaagtcaaaccacccaatgagtgaatgaggcaggaaaagagggccaggtttagaaggaagattgtgaataatcccaaagcttcttggttttattttgatatacataattttatggcctgggctttccaaatttgttttcctgtttggtttttttcctgcttttgctcaaaaactgccatatgctgacagatgcactcagggcatgagcagcggcattgtatttgtacataggttcaagtgtaacacctaactaaatcatttttccttttcctttagagttatggtcatgtctcatgtttcattactactttggggctgttctaaatagatgctttatgtgataaacaactgaaaccattatacctattagtttgtgaagtaagcctacagtataataaagacactaacgtatttttaactgatggagcaaaaaagcaaactaatgaatcaggattacttgaggtaatggctgtgtgagtttttgtaacatttattttcacaagatgggacacatatttgtatgctttggcatttacatccacttcaaatgttaaaaaacttatttttaatgttttaggtttaagcagcttgtaatttattgatctacatggcattaattgatttaaccattatacctgaaataattcttcagtgtttgcctttgagcagtgataggttgtgtattttttaattgcctaagagcatatataccaaacactacaaacaattcatatttacagaaaatttaaactattttataaaaactgcacattacatttttggtgaaatatagtgcattctgaggatagcatatttcatataatagaaaaagaagcattctctaggtttgcatgtagctatagtcactatattttgcctttcatatagaaagttttaaagtattatgtttaaaaacatttattggctgggtgtggtggctcacacccagcactttgggaggccgaggcaggcggatcacttgaggtcagcagttcaagactagcctggccaacatggtgaaaccccatctctactaaaaatataaaaattagccaggcgtggtggcgggcgcctgtaatccaagctactggggaggctgaggcaggagaattgcttaaatccaggaggcggaggttgcagtgagccaagattgtgccactgcactccagcctgggtgacagagtaagactccgtctcaaataaataaataaataaataaataaataaataaataaataaaaccatttattgatgttgctcatttatttggaacgtttttagtttttctcagaaattgtcccattgcattagcacttactgtgttttcaggttgatatctaccaaaggacacaaattgaatggtagactgtaaaactggtataaacagaatgcagtttcccgaccatcagaacccaaatattaagaagcatataggaatccatctatgcatgaaacatgtaaaaaatatgttggttagtttaattaaaaatcttattgtgggtccagtgagaccatctcatccaaaagattttttttcccccaatgatgtttgctttagaagcaagatagaaaggaaaaaaagtattaggtagatatgtatagtagggacagagggaaatctttcttctttcctttctgaaagtaatacttcttgttacacattttatttattgagtttgttctaaataaaatattataaacttcagacttgaaaaaattccacttaactttaaagttacaatgtttgtatttgggattttaaatgcctttgagattaaaatgtagaattgcaggacccaaaaacttttaaaataattaaaattttaaaagagcacatgttgtgttttttgggcttgctattaatgcaaactctgattgcaaatggatgtcatgtttcataccttttttatcaggaaaaaagcagcaagccttcaggtgttccagtgatgcctgacacaattgagctggactttatgctgctctttacagtaagaggtgttgcattgtatgtggggactatgtgcactggcgtctaagacagtgacctcaacaatattagctttgcacaaaccatagagaacgatgttggatggttacataatcagttataacattctggcagctaaattgctacaagagctttttcttgcaaaagcttaaaatacaagatttttaataatttactcagaacagtataacttctgacacacacaaatgcttgcctctttattcatatgttcgttacctactctgtacatgtatctgtcatttagctgtttctcaagatgatgttcagcagttggctgcttagaaatctttttcaagccagtttctaaagacatttgtttaatgttctaccatagaataatgcacaccattgtcaaagatttgattattgtgttttatagtaagtccatttgacatttatttccctttcagtttattttccttccttattttgttatacatacccttccctttctcccctgcctttcgtacattcattcctcttcctctaccctccagcacatctacttactggtgctgtgctgtgtgtcagaagataaaacaggtgtattattgtataatgaattttgtatacatgtttatgaaatggtgagatcaactaaaggaggcatgttcataacagtgtttattatcagcagctatgtcccaggaaaaaaaaatgggaggggcaaatggctacagttgtaaatggataacatcatttagaaagccgaatttactgttcatctgagcggttacctggagtattatatctatgcactggtgagcatctcctgattccacttacttttctccctgtgaacagtttaccggtgccatgctgaagagaaagacatctaagtgataacatgaatgaagtcttaaaatttaaagtatttttactgctatataaactaaagactacattgtgcatattttgttaacactgtctcttgttatgataaacactgaaatagcatgttaaacagttgcctatactttaatataatcagttggggaaaactggccttttctcccccactgtatgattgtttcttgaaaggtaaattgctaattttatacagtgtaattctgttcttcacaaaataggtttcattattctatatttaaactgttggtcagaaaatgatctgcaattcaagtaagtctgcattacttttttctttaaaaagtactttaacatgccttatttattatattagcaaatgagctaataacagatgaaattttcattttttgacagatataaccttgcataagtagtatttagggtgattttgatactatctttagagttttgcattggatattaaaaaatatattggcacaatgtattggaagaaaatgagtagtatctggtttaatttttaatatttagggacattttaaaaaatcaatgttttaattagactaaaaattctttatattttttatttactttttaaagaaacatctgtcaaagtaatattgattccaaactgatgtttgtgtgaatttacatgtctattttcatgaactaagaatagagtttctttgagttgaggagaaaaaaatatatatgtgggtccatttattaggttaaagttgacccattcagtgtaaaaataaccatagtgtgtgagctaaagaaaaaaaaaagtaaatttctcctttatattctaagaagctttaaaagaacaattcaggggttattgataactgctactctgtcggtcattgtctctatatgcagtaaaattttatggtccctttataggaatataaagaattcaaaacagtttttcaaaagatttttttccttggacataaaaaattttgatgctattctatttttgtttttattacagcttaactgtatgctgttaaactctaggatgtatctgaatctttccttttttcccccctcctccaaatatataaatctgtgctctcacatgtaatgtatttaatttttggaaaatttaatgctatatagtaaatcaagtgtgtgatttaaagtaatcagatcactttgattcttttaagttttcagaatttcttttttccacaggtaattttggagaaaataattaccaattaactgataataagcacgctgtcctctgctgtaaaaagtctgaatagatactgtgtatgtttttatgtccatgaacttgagctactcgtgtgcaattatgtgtatgggaatggagtagtgttcatgatttgtatctacatcatcatatggatgtatatttattaataaagtcattactttaaaaccagc

SEQ ID NO: 119062 - DNA, 851 bp, Homo sapiens
  Payload ID: 3332
  Gene Symbol: C5orf24
  Gene Name: chromosome 5 open reading frame 24
  Uniprot ID: Q7Z6I8
  ENST ID: ENST00000435259
  CDS Start-End: 264-830
gttcccagccgctgggaagcccctagacgcgccgaggggccgggctacgagcggctgagcacacaacaggtaatacattctaaacgcctcgtgtcaaaataaggagagtccttatttgtgcaccgtggggcacagttaaggagcaggaagaagacaaaggaggccgttatttatgtgccgtcctattatcaaaactttccgtggtggggcagggtgcgtggctattggcctctgctgaatggactttcagagtgattgagaaaatgatgcatcctgttgccagcagtaatccagctttctgtgggcctggcaagccttcctgcctcaatgaagatgccatgagagctgctgatcagtttgacatatattcctcccagcaaagcaaatacagccacacagtcaaccacaaaccaatggtttgtcagaggcaagacccattaaatgaaacacacttgcagactacaagtggcagaagcatagaaataaaagatgaactaaagaaaaagaagaatctcaaccgatctggtaagcgtggccggccttcgggaaccaccaaatcagcaggataccggaccagcacaggcagacccctgggaaccaccaaagcagctggatttaagacaagtccaggcagacctttggggacaactaaagctgcgggatacaaagtcagcccaggcagacctccaggtagcattaaagctctatcccgtcttgccgatcttggttatggctgtggcactgctgcttttccttaccctatgatgcatggcagagcagttcatggggtagaggaaactagcagtgaagtcaaaccacccaatgagtgaatgaggcaggaaaagagggcc

SEQ ID NO: 119063 - DNA, 2923 bp, Homo sapiens
  Payload ID: 3332
  Gene Symbol: C5orf24
  Gene Name: chromosome 5 open reading frame 24
  Uniprot ID: Q7Z6I8
  ENST ID: ENST00000504727
  CDS Start-End: 121-588
cccgttctccgcaccgtgcagaggcggcgggctggggagggagcggcgccagcacgaggttcccagccgctgggaagcccctagacgcgccgaggggccgggctacgagcggctgagaaaatgatgcatcctgttgccagcagtaatccagctttctgtgggcctggcaagccttcctgcctcaatgaagatgccatgagagctgctgatcagtttgacatatattcctcccagcaaagcaaatacagccacacagtcaaccacaaaccaatggtttgtcagaggcaagacccattaaatgaaacacacttgcagactacaagtggcagaagcatagaaataaaagatgaactaaagaaaaagaagaatctcaaccgatctggtaagcgtggccggccttcgggaaccaccaaatcagcaggataccggaccagcacaggcagacccctgggaaccaccaaagcagctggatttaagacaagtccaggcagacctttggggacaactaaagctgcgggatacaaagtcagcccaggcagacctccaggaaaaaagcagcaagccttcaggtgttccagtgatgcctgacacaattgagctggactttatgctgctctttacagtaagaggtgttgcattgtatgtggggactatgtgcactggcgtctaagacagtgacctcaacaatattagctttgcacaaaccatagagaacgatgttggatggttacataatcagttataacattctggcagctaaattgctacaagagctttttcttgcaaaagcttaaaatacaagatttttaataatttactcagaacagtataacttctgacacacacaaatgcttgcctctttattcatatgttcgttacctactctgtacatgtatctgtcatttagctgtttctcaagatgatgttcagcagttggctgcttagaaatctttttcaagccagtttctaaagacatttgtttaatgttctaccatagaataatgcacaccattgtcaaagatttgattattgtgttttatagtaagtccatttgacatttatttccctttcagtttattttccttccttattttgttatacatacccttccctttctcccctgcctttcgtacattcattcctcttcctctaccctccagcacatctacttactggtgctgtgctgtgtgtcagaagataaaacaggtgtattattgtataatgaattttgtatacatgtttatgaaatggtgagatcaactaaaggaggcatgttcataacagtgtttattatcagcagctatgtcccaggaaaaaaaaatgggaggggcaaatggctacagttgtaaatggataacatcatttagaaagccgaatttactgttcatctgagcggttacctggagtattatatctatgcactggtgagcatctcctgattccacttacttttctccctgtgaacagtttaccggtgccatgctgaagagaaagacatctaagtgataacatgaatgaagtcttaaaatttaaagtatttttactgctatataaactaaagactacattgtgcatattttgttaacactgtctcttgttatgataaacactgaaatagcatgttaaacagttgcctatactttaatataatcagttggggaaaactggccttttctcccccactgtatgattgtttcttgaaaggtaaattgctaattttatacagtgtaattctgttcttcacaaaataggtttcattattctatatttaaactgttggtcagaaaatgatctgcaattcaagtaagtctgcattacttttttctttaaaaagtactttaacatgccttatttattatattagcaaatgagctaataacagatgaaattttcattttttgacagatataaccttgcataagtagtatttagggtgattttgatactatctttagagttttgcattggatattaaaaaatatattggcacaatgtattggaagaaaatgagtagtatctggtttaatttttaatatttagggacattttaaaaaatcaatgttttaattagactaaaaattctttatattttttatttactttttaaagaaacatctgtcaaagtaatattgattccaaactgatgtttgtgtgaatttacatgtctattttcatgaactaagaatagagtttctttgagttgaggagaaaaaaatatatatgtgggtccatttattaggttaaagttgacccattcagtgtaaaaataaccatagtgtgtgagctaaagaaaaaaaaaagtaaatttctcctttatattctaagaagctttaaaagaacaattcaggggttattgataactgctactctgtcggtcattgtctctatatgcagtaaaattttatggtccctttataggaatataaagaattcaaaacagtttttcaaaagatttttttccttggacataaaaaattttgatgctattctatttttgtttttattacagcttaactgtatgctgttaaactctaggatgtatctgaatctttccttttttcccccctcctccaaatatataaatctgtgctctcacatgtaatgtatttaatttttggaaaatttaatgctatatagtaaatcaagtgtgtgatttaaagtaatcagatcactttgattcttttaagttttcagaatttcttttttccacaggtaattttggagaaaataattaccaattaactgataataagcacgctgtcctctgctgtaaaaagtctgaatagatactgtgtatgtttttatgtccatgaacttgagctactcgtgtgcaattatgtgtatgggaatggagtagtgttcatgatttgtatctacatcatcatatggatgtatatttattaataaagtcattactttaaaa

SEQ ID NO: 119064 - DNA, 643 bp, Homo sapiens
  Payload ID: 3332
  Gene Symbol: C5orf24
  Gene Name: chromosome 5 open reading frame 24
  ENST ID: ENST00000508791
  CDS Start-End: 622-643
gggagcggggtagggcggcggcgagaacgggcgcctcgctgaccggggagaagaggcctcctgccaaggggccctagtgtagccggagtgagaggaggggccccggacgtagcctgctcttccccggtgtggagccattacggggggacattcctcctgcggcggggggagggagccccctttcttttctttgagaggtcagaatccgcagtccgcccttcgcctttaaataaaagcctgccggctcgagatcggcgtcgcgatggagtgcccgtggacttctacgcttgcggaactccgagtggacggatagcggcttatgaattttgctttttagagggtacacaaccctttctctagggtggcgtgcatcttctgcaaacttgttattgccaatacgctaatagtcgctttcagcacacaacaggtaatacattctaaacgcctcgtgtcaaaataaggagagtccttatttgtgcaccgtggggcacagttaaggagcaggaagaagacaaaggaggccgttatttatgtgccgtcctattatcaaaactttccgtggtggggcagggtgcgtggctattggcctctgctgaatggactttcagagtgattgagaaaatgatgcatcctgttgccagca

SEQ ID NO: 119065 - DNA, 269 bp, Homo sapiens
  Payload ID: 3332
  Gene Symbol: C5orf24
  Gene Name: chromosome 5 open reading frame 24
  ENST ID: ENST00000507390
  CDS Start-End: 1-254
agccttcctgcctcaatgaagatgccatgagagctgctgatcagtttgacatatattcctcccagcaaagcaaatacagccacacagtcaaccacaaaccaatggtttgtcagaggcaagacccattaaatgaaacacacttgcagactacaagtggcagaagcatagaaataaaagatgaactaaagaaaaagaagaatctcaaccgatctggaaaaaagcagcaagccttcaggtgttccagtgatgcctgacacaattgagctgga

SEQ ID NO: 119066 - DNA, 2338 bp, Homo sapiens
  Payload ID: 3333
  Gene Symbol: C5orf28
  Gene Name: chromosome 5 open reading frame 28
  Uniprot ID: Q0VDI3
  ENST ID: ENST00000397080
  CDS Start-End: 139-786
ggctccgaccgaggggcggagccgctgctcgagctgctgctggattgaactcagagaagccgggggtgctggaaatgtaaacaagaatagactgttcattcctgatggcttttagtctatactaacatattgtttgtcatggcatccgagactgaaaagacccatgctttactgcagacttgtagcactgaatctcttatttccagccttggtctgggggcattttgcctcgtagctgacagacttcttcagttttccacaattcagcaaaatgactggcttcgtgctctctcagataatgcagtacattgtgtaattggcatgtggtcatgggcggtagtcactggaatcaagaagaagactgactttggagaaatcattttagctggatttttagcctctgttattgatgtagaccacttttttctagctggatccatgtctttaaaggctgctttgactctcccgcgaagacctttccttcactgttctactgtgattcccgttgtggttctgaccctgaaatttactatgcaccttttcaagctcaaagactcatggtgctttcttccctggatgttatttatatcctggacttcacatcatatccgagatgggattcgtcatggtttgtggatatgcccatttggaaaaacttctcctttgccattctggctttatgtaataatcacatcatctttacctcacatctgttcattcgttatgtatttaacaggaaccagacaaatgatgtcttcaaaacatggagttcgtattgatgtctgaggtacacggcagtcttagagaagcaaatggctcagatgatgataattaagagtagccaacattaaagttaatttttaaaaatacagttaggtgtttatattatttagttattataattctgcaatcctcttgctcaggaagtgtatacaacttttttaaaaattatacttgttattattctacttctctcttctatgacaactctagtgcaatattagagtttcatttattccacaatatatttttactgtttttttctatttatctggctttactagtagttcttttagattaacatccagttcattttctggaaatatacctggaatttagtccatttcctaatgaaaaacagctcaaattttagggtaactaatttgtaaagagttaacattatatttggatccaattttcctgagatattgaaatagtgaaatcaccaaataaatgatatgaatcatttaactatacaaatgtatagttaatgctaacatgtatttattttcatatatgttgatcctgagtgaaatttaatttgcagaatgctttatgagttatgattactggcaaaaccttcagagcacttgtgacacatcattataatatccagtagctaacattagatctagcttattatttcagaaattaatttaggaaataattattaaaacatgttggctacagtagcactttactgaagtagtattttttggtatctctagcctagaatctcgtgtgttagttttaactgttttgaaaataataagtaacattaacaaaatgttgatatttggatcataaccgtaacatttgaatttatgcaaaaaaaagaccagaaatgtcatttcaaatgtaaattcctgaatgtaccattaaaattattttagttgctatcagtttgtttatatactattttatatactattctaaaatattttactctgcctgatactgaaagacagcatatatttttttcaaaataaagttttaggaaatttgctttttcctttttctttcaggttgatcttctattaaaatgattcctctttattagagaaggaaaatttagttgctatacatcttatatttgcacagtttattaaagtcagtgccctaaaggtacctgcttttctttgtggcatatatggcatctgctgtcttcagattttcttacacttttgtgatttataatgttagtgattggtgccttattctctgaggaaagatggagggttcataaagcaatgccttatccacagcagattttcttgtatattaagttaaacagaattctgtaaattattatgaaggttcaagctctttaggggagttttttttcttgttgttaacaaattggttgcaatctattatattttgcaattgattagatattacagtctacttatttttcaagagtaattattgtataagtttggttggtataatggtaaatattatatagtgggggtaaatttgattagagttttttttttaagcactggcttcagaaatccatggaaataaagtctgtatcttgtgtaacaattcctga

SEQ ID NO: 119067 - DNA, 1927 bp, Homo sapiens
  Payload ID: 3333
  Gene Symbol: C5orf28
  Gene Name: chromosome 5 open reading frame 28
  Uniprot ID: Q0VDI3
  ENST ID: ENST00000512085
  CDS Start-End: 296-943
ctctatggctccgaccgaggggcggagccgctgctcgagctgctgctggattgaactcagagaagccggggctatttcgtgtagtggagcccatggcctccaagaagaggaactttctctaccacaagacaaattttggaaaggaatctgattggctcagcctggaccactttcattactagattagtcaccattattagggaaatggaaaactctaattgggtgctggaaatgtaaacaagaatagactgttcattcctgatggcttttagtctatactaacatattgtttgtcatggcatccgagactgaaaagacccatgctttactgcagacttgtagcactgaatctcttatttccagccttggtctgggggcattttgcctcgtagctgacagacttcttcagttttccacaattcagcaaaatgactggcttcgtgctctctcagataatgcagtacattgtgtaattggcatgtggtcatgggcggtagtcactggaatcaagaagaagactgactttggagaaatcattttagctggatttttagcctctgttattgatgtagaccacttttttctagctggatccatgtctttaaaggctgctttgactctcccgcgaagacctttccttcactgttctactgtgattcccgttgtggttctgaccctgaaatttactatgcaccttttcaagctcaaagactcatggtgctttcttccctggatgttatttatatcctggacttcacatcatatccgagatgggattcgtcatggtttgtggatatgcccatttggaaaaacttctcctttgccattctggctttatgtaataatcacatcatctttacctcacatctgttcattcgttatgtatttaacaggaaccagacaaatgatgtcttcaaaacatggagttcgtattgatgtctgaggtacacggcagtcttagagaagcaaatggctcagatgatgataattaagagtagccaacattaaagttaatttttaaaaatacagttaggtgtttatattatttagttattataattctgcaatcctcttgctcaggaagtgtatacaacttttttaaaaattatacttgttattattctacttctctcttctatgacaactctagtgcaatattagagtttcatttattccacaatatatttttactgtttttttctatttatctggctttactagtagttcttttagattaacatccagttcattttctggaaatatacctggaatttagtccatttcctaatgaaaaacagctcaaattttagggtaactaatttgtaaagagttaacattatatttggatccaattttcctgagatattgaaatagtgaaatcaccaaataaatgatatgaatcatttaactatacaaatgtatagttaatgctaacatgtatttattttcatatatgttgatcctgagtgaaatttaatttgcagaatgctttatgagttatgattactggcaaaaccttcagagcacttgtgacacatcattataatatccagtagctaacattagatctagcttattatttcagaaattaatttaggaaataattattaaaacatgttggctacagtagcactttactgaagtagtattttttggtatctctagcctagaatctcgtgtgttagttttaactgttttgaaaataataagtaacattaacaaaatgttgatatttggatcataaccgtaacatttgaatttatgcaaaaaaaagaccagaaatgtcatttcaaatgtaaattcctgaatgtaccattaaaattattttagttgctatcagtttgtttatatactattttatatactattctaaaatattttactctgcctgatactgaaagacagcatatatttttttcaaaataaa

SEQ ID NO: 119068 - DNA, 736 bp, Homo sapiens
  Payload ID: 3333
  Gene Symbol: C5orf28
  Gene Name: chromosome 5 open reading frame 28
  ENST ID: ENST00000506860
  CDS Start-End: 209-736
tcgagctgctgctggattgaactcagagaagccggggtgttgaatgtttgttttctaaaggagacaatgattcataatttgtgacactgtaaatcctgaggtttatagaaaggattcatgactttgtaatggagggtgctggaaatgtaaacaagaatagactgttcattcctgatggcttttagtctatactaacatattgtttgtcatggcatccgagactgaaaagacccatgctttactgcagacttgtagcactgaatctcttatttccagccttggtctgggggcattttgcctcgtagctgacagacttcttcagttttccacaattcagcaaaatgactggcttcgtgctctctcagataatgcagtacattgtgtaattggcatgtggtcatgggcggtagtcactggaatcaagaagaagactgactttggagaaatcattttagctggatttttagcctctgttattgatgtagaccacttttttctagctggatccatgtctttaaaggctgctttgactctcccgcgaagacctttccttcactgttctactgtgattcccgttgtggttctgaccctgaaatttactatgcaccttttcaagctcaaagactcatggtgctttcttccctggatgttatttatatcctggacttcacatcatatccgagatgggattcgtcatggtttgtggatatgcccatttggaaaaacttctcctttg

SEQ ID NO: 119069 - DNA, 2950 bp, Homo sapiens
  Payload ID: 3333
  Gene Symbol: C5orf28
  Gene Name: chromosome 5 open reading frame 28
  Uniprot ID: Q0VDI3
  ENST ID: ENST00000500337
  CDS Start-End: 333-980
ctcagagaagccggggtgttgaatgtttgttttctaaaggagacaatgattcataatttgtgacactgtaaatcctgaggtttatagaaaggattcatgactttgtaatggagttttgatgcttgagtaacctgcaggagaggatgacactttcgatgtcagagctgcacttgtgggcccaggatttggagaagtggagagaaggtctgatgggagttgaaggagctgcaggtccagcttcttccccatgccagcaagggtgctggaaatgtaaacaagaatagactgttcattcctgatggcttttagtctatactaacatattgtttgtcatggcatccgagactgaaaagacccatgctttactgcagacttgtagcactgaatctcttatttccagccttggtctgggggcattttgcctcgtagctgacagacttcttcagttttccacaattcagcaaaatgactggcttcgtgctctctcagataatgcagtacattgtgtaattggcatgtggtcatgggcggtagtcactggaatcaagaagaagactgactttggagaaatcattttagctggatttttagcctctgttattgatgtagaccacttttttctagctggatccatgtctttaaaggctgctttgactctcccgcgaagacctttccttcactgttctactgtgattcccgttgtggttctgaccctgaaatttactatgcaccttttcaagctcaaagactcatggtgctttcttccctggatgttatttatatcctggacttcacatcatatccgagatgggattcgtcatggtttgtggatatgcccatttggaaaaacttctcctttgccattctggctttatgtaataatcacatcatctttacctcacatctgttcattcgttatgtatttaacaggaaccagacaaatgatgtcttcaaaacatggagttcgtattgatgtctgaggtacacggcagtcttagagaagcaaatggctcagatgatgataattaagagtagccaacattaaagttaatttttaaaaatacagttaggtgtttatattatttagttattataattctgcaatcctcttgctcaggaagtgtatacaacttttttaaaaattatacttgttattattctacttctctcttctatgacaactctagtgcaatattagagtttcatttattccacaatatatttttactgtttttttctatttatctggctttactagtagttcttttagattaacatccagttcattttctggaaatatacctggaatttagtccatttcctaatgaaaaacagctcaaattttagggtaactaatttgtaaagagttaacattatatttggatccaattttcctgagatattgaaatagtgaaatcaccaaataaatgatatgaatcatttaactatacaaatgtatagttaatgctaacatgtatttattttcatatatgttgatcctgagtgaaatttaatttgcagaatgctttatgagttatgattactggcaaaaccttcagagcacttgtgacacatcattataatatccagtagctaacattagatctagcttattatttcagaaattaatttaggaaataattattaaaacatgttggctacagtagcactttactgaagtagtattttttggtatctctagcctagaatctcgtgtgttagttttaactgttttgaaaataataagtaacattaacaaaatgttgatatttggatcataaccgtaacatttgaatttatgcaaaaaaaagaccagaaatgtcatttcaaatgtaaattcctgaatgtaccattaaaattattttagttgctatcagtttgtttatatactattttatatactattctaaaatattttactctgcctgatactgaaagacagcatatatttttttcaaaataaagttttaggaaatttgctttttcctttttctttcaggttgatcttctattaaaatgattcctctttattagagaaggaaaatttagttgctatacatcttatatttgcacagtttattaaagtcagtgccctaaaggtacctgcttttctttgtggcatatatggcatctgctgtcttcagattttcttacacttttgtgatttataatgttagtgattggtgccttattctctgaggaaagatggagggttcataaagcaatgccttatccacagcagattttcttgtatattaagttaaacagaattctgtaaattattatgaaggttcaagctctttaggggagttttttttcttgttgttaacaaattggttgcaatctattatattttgcaattgattagatattacagtctacttatttttcaagagtaattattgtataagtttggttggtataatggtaaatattatatagtgggggtaaatttgattagagttttttttttaagcactggcttcagaaatccatggaaataaagtctgtatcttgtgtaacaattcctgactaaattgcaaaaccttttctactttttctttcttcatattaaacaaataaatattattaaaaatatagggccttatttaagaatgctacatagtgaccggacgtggtggctcacgcctgtaatcccaacactttgggaggccgaggcaggcaggtcacttgaggtcaggagttcgagaccagcctggccaacatggtgaaaccccgtctctactaaaaatacaaaaattaactgggcgtgctggtgtgcacctgtagtttcagctattcgggaggctgaggcagacaatggcttgaacctgggaggcagaggttgtagtgagctgagatggggccactgcactgcagcctgtgtgacagagggagactgtcttaaaaaataaacataaaataaataaataagaatgctacataggca

SEQ ID NO: 119070 - DNA, 721 bp, Homo sapiens
  Payload ID: 3333
  Gene Symbol: C5orf28
  Gene Name: chromosome 5 open reading frame 28
  ENST ID: ENST00000510130
  CDS Start-End: 137-478
gccgctgctcgagctgctgctggattgaactcagagaagccggggtgttgaatgtttgttttctaaaggagacaatgattcataatttgtgacactgtaaatcctgaggtttatagaaaggattcatgactttgtaatggaggctgctttgactctcccgcgaagacctttccttcactgttctactgtgattcccgttgtggttctgaccctgaaatttactatgcaccttttcaagctcaaagactcatggtgctttcttccctggatgttatttatatcctggacttcacatcatatccgagatgggattcgtcatggtttgtggatatgcccatttggaaaaacttctcctttgccattctggctttatgtaataatcacatcatctttacctcacatctgttcattcgttatgtatttaacaggaaccagacaaatgatgtcttcaaaacatggagttcgtattgatgtctgaggtacacggcagtcttagagaagcaaatggctcagatgatgataattaagagtagccaacattaaagttaatttttaaaaatacagttaggtgtttatattatttagttattataattctgcaatcctcttgctcaggaagtgtatacaacttttttaaaaattatacttgttattattctacttctctcttctatgacaactctagtgcaatattagagtttcatttattccacaatatatt

SEQ ID NO: 119071 - DNA, 3049 bp, Homo sapiens
  Payload ID: 3334
  Gene Symbol: C5orf30
  Gene Name: chromosome 5 open reading frame 30
  Uniprot ID: Q96GV9
  ENST ID: ENST00000319933
  CDS Start-End: 309-929
ggaggcggaggagggggcggggactaagcagggcggtagctggcgccgagcgcggtgggagaggagagggtacccggctggctcggctggcggcctctgcctggatctcggcgccgcagtcctgcgcctctcccgcccctgtctcccgctccgcagccccgggcacggcggaggcagcggagccctgggccatcgtacctggagtagaacagaaaaattattatgtctgtgttcccttgggactcattggaaattgtacagtgacatcttctgggatttagtctggattgtgcagactggtgcttaaaatggaagtcgatattaatggagagtctagaagtaccctgaccaccttgcccttccctggggctgaggccaactccccgggaaaggcggaggcagagaagccccgctgctccagcacaccctgctccccgatgcggaggaccgtgtcaggctaccagatcctacacatggactctaactatttggttggcttcacgactggcgaggaactcctgaagttagctcagaagtgcacaggaggtgaagagagcaaagcagaagccatgccatccttacgctccaaacagctagatgcaggacttgcccgttcctctcgtttgtataaaaccagaagtaggtactaccagccatacgagattccagctgtcaatggcaggaggcgaaggcggatgccaagctcaggagacaagtgcactaaatctttaccttatgaaccttacaaggccctccatgggcctctgcctctttgtcttcttaaaggtaagagggctcactccaaatctctggactacctcaatctagataaaatgatcaaggagccagctgatacagaagtgctacagtaccagcttcaacacctaaccctccgaggggaccgtgtgtttgctaggaataatacatgaatgacttggagagagcttaaaccaatttaggtcagcctacgcttggctagaaaaaacccactgctgtactctgtacatgactcttcacactatagatggttatatcagctaagtgttcctggaacataaaaattgtttgggtcaaatttgaatacaggaatgaaatcacaggtacttgggggggggatatcattctagagcacgcaactgcaaagaaaacagaatgttgactgttagtttgtatagctttttagctaggaaaaaaaggctttggtacagtaatttcatctttatgattctgacactcaaattgggaatgttacctgcttggttgttgctgacttgatatgattcattagaaatttatatcttcagtactcaagtacttcttgaatctctgtattttactataaaatgtatgtaatgatttgttttatgaaatttagaacttgaacattgctgaattggaccactttttatttttaaatattgagtttaaatattttataactggttttgcactgaaaaaattaacatttcagattgacaagagagtaatctttcttcacttgcctcaataatgttattgagcaatgaattttttatttccgcatggaaagttattgatctctatggctgtaaaatatttctttatagcgttattaaagtgtgtcttaataaaattaaatttgggatacaaagtatttattttacaatgggtgggcgggggaaacttttccagaaagtttccaatatgacgttttcataagttgaaaaaactctccttagtgcttattttctaacttaaaattcacctggaactttaaatgggaaaggattcttttaattgtggattataggcataatactgtttgcatctgaattttctgtaagtgaataatagtttaatagaggaactcatgatttgtactattgaatgattaaactaagtatgaagtgataccattcagcatggcatcaggtcattgcagttttagttctgtgtaacacaagcactcactgaaattccagtttctaggattagtgtaggagcctaacgtgcttctactgttttaatgggttaatcctggattacttaacaatttatgtcaattgcactggtttaatttgttgctaaagaaataatgccctgggtttagtaacaaatacagctcaactattcttgaatatattttgaaaaaaaaatgtatgtaacttaccttttgtaaacgttccatttcttttttccctcatttttgactcttaaaggtgcaatttattactgaattgggatttctggcagcacagaactgctttttattttggggtctgtgagtttcttaggtattagcaatcttgcttataaaataagaacaccttttaattaatgagtgggtcattcctggtgcaattgtgatttttctttagccagaatgaatggcaaactctatttagagcaaagtaagtattagaaaaccctaggaactcttaatcaacgtttattacactttcattaaggcaaactacgtgaaagagccttggggaagttggcccatatcttactaagttgatcagatttctcgttgggctggaaatgtttcgctgttgtatattttaaagtaaattgcacctttgtaacatattgtattgacgaatgatcactaagattagctatatctatacagtcattagtttgacaagaaatagaatcctgtcagatgccaaagagtgggatttttatgtttaatgattaaacaccattatttattgacaatttaccctgtggaactgtattatttctaactatgaaataaaggggtgatgtaaacacacattgttgtgtggtgctttaaactaggtccactatcaacaggctacttactgttcaagaattccactgaagcacttattttaaggccctatttttcttaaacaaaacagtgacaacaacaatcaaaccatttacttttgatgctcattggcattttatgataaaagatgtattcatggcaatgatatgtattcaccctattaggaaacacaactggttacctatgagacctgttctgtccgtgtgcctacgttccttaataatagctaaataaaaatttgtagctttt

SEQ ID NO: 119072 - DNA, 2933 bp, Homo sapiens
  Payload ID: 3334
  Gene Symbol: C5orf30
  Gene Name: chromosome 5 open reading frame 30
  Uniprot ID: Q96GV9
  ENST ID: ENST00000510890
  CDS Start-End: 482-1102
cccttggccgctgttcccgcaccgcggggcagcgggcctggaggcccctttgagaagtagctttccccggccggcggcacctttggctgcgtgcccggccgcgctcagggtgcgactgcccgggtcagatagcacctcagggcgagccccggcggtctgatctcgccgaccctcctcgtcctggttgcaacccgcgtgcgaggccgcccgcgccctccgagtgtctgccggtgcagtgggggtggactggccggctgtggccgtgtgtgcgcgtgtggattggggcccggtccgagccagaagcttaagcggcagatgtcgggcattgccaccctcgccccacctgtcgcgggtggactttggggcagtacctggagtagaacagaaaaattattatgtctgtgttcccttgggactcattggaaattgtacagtgacatcttctgggatttagtctggattgtgcagactggtgcttaaaatggaagtcgatattaatggagagtctagaagtaccctgaccaccttgcccttccctggggctgaggccaactccccgggaaaggcggaggcagagaagccccgctgctccagcacaccctgctccccgatgcggaggaccgtgtcaggctaccagatcctacacatggactctaactatttggttggcttcacgactggcgaggaactcctgaagttagctcagaagtgcacaggaggtgaagagagcaaagcagaagccatgccatccttacgctccaaacagctagatgcaggacttgcccgttcctctcgtttgtataaaaccagaagtaggtactaccagccatacgagattccagctgtcaatggcaggaggcgaaggcggatgccaagctcaggagacaagtgcactaaatctttaccttatgaaccttacaaggccctccatgggcctctgcctctttgtcttcttaaaggtaagagggctcactccaaatctctggactacctcaatctagataaaatgatcaaggagccagctgatacagaagtgctacagtaccagcttcaacacctaaccctccgaggggaccgtgtgtttgctaggaataatacatgaatgacttggagagagcttaaaccaatttaggtcagcctacgcttggctagaaaaaacccactgctgtactctgtacatgactcttcacactatagatggttatatcagctaagtgttcctggaacataaaaattgtttgggtcaaatttgaatacaggaatgaaatcacaggtacttgggggggggatatcattctagagcacgcaactgcaaagaaaacagaatgttgactgttagtttgtatagctttttagctaggaaaaaaaggctttggtacagtaatttcatctttatgattctgacactcaaattgggaatgttacctgcttggttgttgctgacttgatatgattcattagaaatttatatcttcagtactcaagtacttcttgaatctctgtattttactataaaatgtatgtaatgatttgttttatgaaatttagaacttgaacattgctgaattggaccactttttatttttaaatattgagtttaaatattttataactggttttgcactgaaaaaattaacatttcagattgacaagagagtaatctttcttcacttgcctcaataatgttattgagcaatgaattttttatttccgcatggaaagttattgatctctatggctgtaaaatatttctttatagcgttattaaagtgtgtcttaataaaattaaatttgggatacaaagtatttattttacaatgggtgggcgggggaaacttttccagaaagtttccaatatgacgttttcataagttgaaaaaactctccttagtgcttattttctaacttaaaattcacctggaactttaaatgggaaaggattcttttaattgtggattataggcataatactgtttgcatctgaattttctgtaagtgaataatagtttaatagaggaactcatgatttgtactattgaatgattaaactaagtatgaagtgataccattcagcatggcatcaggtcattgcagttttagttctgtgtaacacaagcactcactgaaattccagtttctaggattagtgtaggagcctaacgtgcttctactgttttaatgggttaatcctggattacttaacaatttatgtcaattgcactggtttaatttgttgctaaagaaataatgccctgggtttagtaacaaatacagctcaactattcttgaatatattttgaaaaaaaaatgtatgtaacttaccttttgtaaacgttccatttcttttttccctcatttttgactcttaaaggtgcaatttattactgaattgggatttctggcagcacagaactgctttttattttggggtctgtgagtttcttaggtattagcaatcttgcttataaaataagaacaccttttaattaatgagtgggtcattcctggtgcaattgtgatttttctttagccagaatgaatggcaaactctatttagagcaaagtaagtattagaaaaccctaggaactcttaatcaacgtttattacactttcattaaggcaaactacgtgaaagagccttggggaagttggcccatatcttactaagttgatcagatttctcgttgggctggaaatgtttcgctgttgtatattttaaagtaaattgcacctttgtaacatattgtattgacgaatgatcactaagattagctatatctatacagtcattagtttgacaagaaatagaatcctgtcagatgccaaagagtgggatttttatgtttaatgattaaacaccattatttattgacaatttaccctgtggaactgtattatttctaactatgaaataaaggggtgatgtaaacac

SEQ ID NO: 119073 - DNA, 1573 bp, Homo sapiens
  Payload ID: 3334
  Gene Symbol: C5orf30
  Gene Name: chromosome 5 open reading frame 30
  Uniprot ID: Q96GV9
  ENST ID: ENST00000515669
  CDS Start-End: 265-885
ctctccgcctcgtgtctgggccgggcgcacgatgcccgcggtgctggggaaacccggccggaccagcttctgcgatgggcggcggggcggccccagcgtcccttggccttggtggaccggttcccaggcacccgaaggggactggggtctgtacctggagtagaacagaaaaattattatgtctgtgttcccttgggactcattggaaattgtacagtgacatcttctgggatttagtctggattgtgcagactggtgcttaaaatggaagtcgatattaatggagagtctagaagtaccctgaccaccttgcccttccctggggctgaggccaactccccgggaaaggcggaggcagagaagccccgctgctccagcacaccctgctccccgatgcggaggaccgtgtcaggctaccagatcctacacatggactctaactatttggttggcttcacgactggcgaggaactcctgaagttagctcagaagtgcacaggaggtgaagagagcaaagcagaagccatgccatccttacgctccaaacagctagatgcaggacttgcccgttcctctcgtttgtataaaaccagaagtaggtactaccagccatacgagattccagctgtcaatggcaggaggcgaaggcggatgccaagctcaggagacaagtgcactaaatctttaccttatgaaccttacaaggccctccatgggcctctgcctctttgtcttcttaaaggtaagagggctcactccaaatctctggactacctcaatctagataaaatgatcaaggagccagctgatacagaagtgctacagtaccagcttcaacacctaaccctccgaggggaccgtgtgtttgctaggaataatacatgaatgacttggagagagcttaaaccaatttaggtcagcctacgcttggctagaaaaaacccactgctgtactctgtacatgactcttcacactatagatggttatatcagctaagtgttcctggaacataaaaattgtttgggtcaaatttgaatacaggaatgaaatcacaggtacttgggggggggatatcattctagagcacgcaactgcaaagaaaacagaatgttgactgttagtttgtatagctttttagctaggaaaaaaaggctttggtacagtaatttcatctttatgattctgacactcaaattgggaatgttacctgcttggttgttgctgacttgatatgattcattagaaatttatatcttcagtactcaagtacttcttgaatctctgtattttactataaaatgtatgtaatgatttgttttatgaaatttagaacttgaacattgctgaattggaccactttttatttttaaatattgagtttaaatattttataactggttttgcactgaaaaaattaacatttcagattgacaagagagtaatctttcttcacttgcctcaataatgttattgagcaatgaattttttatttccgcatggaaagttattgatctctatggctgtaaaatatttctttatagcgttattaaagtgtgtcttaataaaattaaa

SEQ ID NO: 119074 - DNA, 2507 bp, Homo sapiens
  Payload ID: 3335
  Gene Symbol: C5orf34
  Gene Name: chromosome 5 open reading frame 34
  Uniprot ID: Q96MH7
  ENST ID: ENST00000306862
  CDS Start-End: 377-2293
gcggagctctgaagcggctccctgagggcgctggttttgaactggtcttgtgcggtttgcgctttctcttagtggttacagttggcgctgtctccgctttcctgtttcgtggcgggcatcttggccaaaacactctccctgccaccttattcctctagggttgtgatttttttctttcaccaagaaatatcactcgctggtaatttgtcaaactgaagaaacccctgaagaagcagtggtgggcaggcgccgacgctgcggcttccagagcattttggcaaatcaaagccagggaccgttgctgggcctcatttccgcaacttttcggctccgaactgcttctttgacttagaagatatcttatcctgccgttgtaatggcagctgaactgcgaatgatactttatgaagatgattcagtacaagtacaatatgttgatggttccacattgcaactttctccctgtggctctgaatttttatttgaaaagtcaccacctgtttcagcacatcctttagaacaaccagaaagaattcgtcaaaggacacattttgtcattagcacttacagagagcaactacagcgagccctagattttcgaaactcttcagctacttgcccttttttatctgaaaccatcataccttctgaaagaaaaaagcatatcttcattgacataacagaagtgagatggcccagtcttgatacagatggtaccatgatatatatggagagtggcattgtgaagataacatctttagatggtcatgcatacctctgcctgcccagatctcagcatgaatttacagtacattttttgtgtaaagttagccagaagtcagactcatctgcagtgttgtcagaaacaaataataaagccccaaaagataaactagttgaaaaaactggcaaaatctgtatacgtggaaatttaccaggacagagactgaagaataaagaaaatgagtttcattgccagatcatgaaatccaaagaaactttaaagaagatgagttgtgtaaatggaactgaagggagggaagagctgccttcgcctggtacaaagcacacatgtgtatacacatgggtcaagcagtgctggtctgtggctgcctgtccagaggaatggaaatatcctttgtctttagcacttcattttcataataaaatcagcaatatgtctaaaattgatgcacatataactcagagtagatttttaacttctgatatttcagaggaaagaggaaaagtggtttctgttcttcccagggccctgtcactcagctgtccagtcccacacctacacaggtggaatttttgtgattcacttttacagagacaatctgatgaatattcctatcctgaactagtgaaaatggtttggtacaaaggtgttacatatagacttacccatcaaaatatgaactcaatagagatttattctggggatggatctgttttcaaatcagaaggggcttattttgggaactattttacttattattctattcaagaaggatcaggaaagagagaagagaaaacttactcagtaaataaccttcctccagatagaccgggaagtccattcactgtcggttctctaattaaacaggcaacaagaattcttcaacattgtgtgaagatgagactttctttaagccataactatcgtatatgctgctggaaaatggtacctgggataaatgatagcaatatactgcctttggttttgaaagagtcactcatacccagtgtgggaagatttcttgcctactctgatgacaaagtacatgctatctttttagatggcattactctaaccctaaattggaatttcagctctcctattgagaagagacaggtaaatcaaggtcttaacttaggttggtgtaagttaacttttcctgatggacaagagcagttaattcagattgaacaccctgaaccatatgaaagatatgtgacaacagtaacatcatggtgcaggagactgacccagactagtcccagagagatgcccactcattcgtcatcttctgttctccaagaaaattggtctgttgcttctgaacttgaaaagatacagaagtttaacttgctactagaaaatagtggtatcctaaaccagatttctaacaagaaaaatgaacaacagtcttttgatcattataaaccaggatcttcagaaaccttgctaggagaagttaatgaaaatagagtatcaatagcattgaaaaaaacctctgaaatccttcacgatattgactgtcttctatcaaactctaaaaagtgaaaaatggaattattacaacatattattaaagtttaaggatgttgtttcaagtgactggtataaaattactagtaagccaagatattgtacgtattaccccggcacaatgattgtgaaagaactgacatttaactttgaaggtatttttaacttgtacatttttaaaatatgtatttatatcttaataataaatatttcgaagttttgaacgttt

SEQ ID NO: 119075 - DNA, 962 bp, Homo sapiens
  Payload ID: 3335
  Gene Symbol: C5orf34
  Gene Name: chromosome 5 open reading frame 34
  ENST ID: ENST00000509489
  CDS Start-End: 277-962
tggccaaaacactctccctgccaccttattcctctagggttgtgatttttttctttcaccaagaaatatcactcgctggtaatttgtcaaactgaagaaacccctgaagaagcagtggtgggcaggcgccgacgctgcggcttccagagcattttggcaaatcaaagccagggaccgttgctgggcctcatttccgcaacttttcggctccgaactgctcatatcttcattgacataacagaagtgagatggcccagtcttgatacagatggtaccatgatatatatggagagtggcattgtgaagataacatctttagatggtcatgcatacctctgcctgcccagatctcagcatgaatttacagtacattttttgtgtaaagttagccagaagtcagactcatctgcagtgttgtcagaaacaaataataaagccccaaaagataaactagttgaaaaaactggcaaaatctgtatacgtggaaatttaccaggacagagactgaagaataaagaaaatgagtttcattgccagatcatgaaatccaaagaaactttaaagaagatgagttgtgtaaatggaactgaagggagggaagagctgccttcgcctggtacaaagcacacatgtgtatacacatgggtcaagcagtgctggtctgtggctgcctgtccagaggaatggaaatatcctttgtctttagcacttcattttcataataaaatcagcaatatgtctaaaattgatgcacatataactcagagtagatttttaacttctgatatttcagaggaaagaggaaaagtggtttctgttcttcccagggccctgtcactcagctgtccagtcccacacctacacaggtggaatttttgtgattcacttttacagagacaatctgatgaatattcctatcctgaactagtgaaaatggtttggtacaaaggtgttacatatag

SEQ ID NO: 119076 - DNA, 511 bp, Homo sapiens
  Payload ID: 3335
  Gene Symbol: C5orf34
  Gene Name: chromosome 5 open reading frame 34
  ENST ID: ENST00000503655
  CDS Start-End: 1-380
cttcgcctggtacaaagcacacatgtgtatacacatgggtcaagcagtgctggtctgtggctgcctgtccagaggaatggaaatatcctttgtctttagcacttcattttcataataaaatcagcaatatgtctaaaattgatgcacatataactcagagtagatttttaacttctgatatttcagaggaaagaggaaaagtggtttctgttcttcccagggccctgtcactcagctgtccagtcccacacctacacaggtggaatttttgtgattcacttttacagagacaatctgatgaatattcctatcctgaactagtgaaaatggtttggtacaaaggtgttacatatagagagaagagaaaacttactcagtaaataaccttcctccagatagaccgggaagtccattcactgtcggttctctaattaaacaggcaacaagaattcttcaacattgtgtgaagatgagactttctttaagccataactatcgtatatgctgctgg

SEQ ID NO: 119077 - DNA, 890 bp, Homo sapiens
  Payload ID: 3336
  Gene Symbol: C5orf38
  Gene Name: chromosome 5 open reading frame 38
  Uniprot ID: Q86SI9
  ENST ID: ENST00000334000
  CDS Start-End: 118-534
cgcggtcaggccaggccgggtccaattaggggactcacagcctgccccgctgtgcaccccgaggaggcccggcccctgtgtccaatccggaagtcgcagggaagtggggaggtcaggatggtggcgcccgcggctcgggtcttcctccgggcagtgcgcgcggctctcacttccacggtcccggacctgctctgcctcctggcccgaggctccccgcgtggcctcgcgtctggtcgcctacccctcgcggtccactccgcccagcatggacctggatccggggcgccttggttgcgaattgccaggagggccctgagatttgtgttgtcaaaacactggggggatgattgttacctgacaaaccgcctctggcaggacctgaagcctcccagtcacgtcgagaacgggcaggagctcaggttggcgccgccggtgcagtgggcattacaggtgcaagggaaccagttgcaaactgcagtgctgtgcttgaggatggctcctcctgagccggcaggctcccgccaaagaatttagaacgagtctacgtggacacgcaagtttcagcgagcggggatttcctgcgaggccgagcgcgaggaacagccggccccggaggctcgggctcggggtctccccggggacgcggccgactgagaaggccggggcgctcgccgggcgcggcgccgtcctccgtgtcgcggggacggaaggaggcgacgcaggccaggagtcgtgcgcgcgggcggcgagggggcgctgtggcccgtgtctgccggcccgagtcccggcaacggtgggcgcgacccacctcctcccccggcggcttaattcggggaagaagaaaaaacggcatcgaggcatttcaataaaacctaagcgactcctgatcc

SEQ ID NO: 119078 - DNA, 681 bp, Homo sapiens
  Payload ID: 3336
  Gene Symbol: C5orf38
  Gene Name: chromosome 5 open reading frame 38
  Uniprot ID: Q86SI9
  ENST ID: ENST00000397835
  CDS Start-End: 1-681
atggtggcgcccgcggctcgggtcttcctccgggcagtgcgcgcggctctcacttccacggtcccggacctgctctgcctcctggcccgaggctccccgcgtggcctcgcgtctggtcgcctacccctcgcggtccactccgcccagcatggacctggatccggggcgccttggttgcgaattgccaggagggccctgagatttgtgttgtcaaaacactggggggatgattgttacctgacaaaccgcctctggcaggacctgaagcctcccagtcacgtcgagaacgggcaggagctcaggttggcgccgccggtgcagtgggcattacagccaaagaatttagaacgagtctacgtggacacgcaagtttcagcgagcggggatttcctgcgaggccgagcgcgaggaacagccggccccggaggctcgggctcggggtctccccggggacgcggccgactgagaaggccggggcgctcgccgggcgcggcgccgtcctccgtgtcgcggggacggaaggaggcgacgcaggccaggagtcgtgcgcgcgggcggcgagggggcgctgtggcccgtgtctgccggcccgagtcccggcaacggtgggcgcgacccacctcctcccccggcggcttaattcggggaagaagaaaaaacggcatcgaggcatttcaataa

SEQ ID NO: 119079 - DNA, 387 bp, Homo sapiens
  Payload ID: 3336
  Gene Symbol: C5orf38
  Gene Name: chromosome 5 open reading frame 38
  Uniprot ID: Q86SI9
  ENST ID: ENST00000457752
  CDS Start-End: 135-347
actaggcagaggccgcccgcggtcaggccaggccgggtccaattaggggactcacagcctgccccgctgtgcaccccgaggaggcccggcccctgtgtccaatccggaagtcgcagggaagtggggaggtcaggatggtggcgcccgcggctcgggtcttcctccgggcagtgcgcgcggctctcacttccacggtcccggacctgctctgcctcctggcccgaggctccccgcgtggcctcgcgtctggtcgcctacccctcgcggtccactccgcccagcatggacctggatccggggcgccttggttgcgaattgccaggagggccctgagccaaagaatttagaacgagtctacgtggacacgcaagtttcagcgagcgggga

SEQ ID NO: 119080 - DNA, 436 bp, Homo sapiens
  Payload ID: 3336
  Gene Symbol: C5orf38
  Gene Name: chromosome 5 open reading frame 38
  ENST ID: ENST00000505106
  CDS Start-End: 38-244
tccaatccggaagtcgcagggaagtggggaggtcaggatggtggcgcccgcggctcgggtcttcctccgggcagtgcgcgcggctctcacttccacggtcccggacctgctctgcctcctggcccgaggctccccgcgtggcctcgcgtctggtcgcctacccctcgcggtccactccgcccagcatggacctggatccggggcgccttggttgcgaattgccaggagggccctgaggacctgaagcctcccagtcacgtcgagaacgggcaggagctcaggttggcgccgccggtgcagtgggcattacaggtgcaagggaaccagttgcaaactgcagtgctgtgcttgaggatggctcctcctgagccggcaggctcccgccaaagaatttagaacgagtctacgtggacacgcaagtttcagcgagcgggga

SEQ ID NO: 119081 - DNA, 451 bp, Homo sapiens
  Payload ID: 3336
  Gene Symbol: C5orf38
  Gene Name: chromosome 5 open reading frame 38
  ENST ID: ENST00000503940
  CDS Start-End: 38-244
tccaatccggaagtcgcagggaagtggggaggtcaggatggtggcgcccgcggctcgggtcttcctccgggcagtgcgcgcggctctcacttccacggtcccggacctgctctgcctcctggcccgaggctccccgcgtggcctcgcgtctggtcgcctacccctcgcggtccactccgcccagcatggacctggatccggggcgccttggttgcgaattgccaggagggccctgaggacctgaagcctcccagtcacgtcgagaacgggcaggagctcaggttggcgccgccggtgcagtgggcattacaggtgcaagggaaccagttgcaaactgcagtgctgtgcttgaggatggctcctcctgagccggcaggctcccggtaggcgcggtccagccaaagaatttagaacgagtctacgtggacacgcaagtttcagcgagcgggga

SEQ ID NO: 119082 - DNA, 1441 bp, Homo sapiens
  Payload ID: 3336
  Gene Symbol: C5orf38
  Gene Name: chromosome 5 open reading frame 38
  ENST ID: ENST00000515640
  CDS Start-End: 20-427
gggaagtggggaggtcaggatggtggcgcccgcggctcgggtcttcctccgggcagtgcgcgcggctctcacttccacggtcccggacctgctctgcctcctggcccgaggctccccgcgtggcctcgcgtctggtcgcctacccctcgcggtccactccgcccagcatggacctggatccggggcgccttggttgcgaattgccaggagggccctgagatttgtgttgtcaaaacactggggggatgattgttacctgacaaaccgcctctggcaggacctgaagcctcccagtcacgtcgagaacgggcaggagctcaggttggcgccgccggtgcagtgggcattacaggtgcaagggaaccagttgcaaactgcagtgctgtgcttgaggatggctcctcctgagccggcaggctcccggtaggcgcggtccaggcacgttacccctcccgccaggagctcccgagccgagccactcgccccctaccagttatcccacccaccccttcgcccacactgctcccccaccactcttcctacaaaccacacccccatcctgcacacatcctcttcaggccatctcaacacacgcacacgcacacacacccacgaccacctctccctccacccacagacaccccgttcccacaggctgggccccctgcaacgacccagcggggggtttcaaccttgttgcgactccacatgggacatcctaattcagtccaggacagatatttttaatcaattactatagagctgaaaaacagagagagagagaaagcagccgggttgggcaagccgtcgacagtctgcgacatttttgcgcttcctgggagggaattcctccaagaagaggggtaaatgagaggcccacacgctggatggcaaacacaaacactgtcagatcagatggcaacctttagggttcctttacgatcagatcagtttaaatgaaaaaaaaatcgggtgtaatttttatcaccagggagcactggcctggagtatttccatttctaaagagcggttcccgctgtggtttcattagcatttggggctcatcctccctccccctcccttgacccacccccctccccccgccggacctctgccaggggcagaagagaaaacagccagttattatacaaacatcctcagtttggagctggagtgtctgctctggatacagtcgattctgacatcaattaaatatataaccagacacgtgcagtggcggggagggtcccctcacccagggtgcatctccagaaacgccgcctgcccttccccctctttagctcagtgttgggagtttgaagatggcctcttcccgtcctgtgtgtattttccccttagcaattatactcctccactgaaatctatatgttccataccgctgctgcctgttactaataaaaaccgtctaccttgcactatt

SEQ ID NO: 119083 - DNA, 509 bp, Homo sapiens
  Payload ID: 3336
  Gene Symbol: C5orf38
  Gene Name: chromosome 5 open reading frame 38
  ENST ID: ENST00000505778
  CDS Start-End: 38-445
tccaatccggaagtcgcagggaagtggggaggtcaggatggtggcgcccgcggctcgggtcttcctccgggcagtgcgcgcggctctcacttccacggtcccggacctgctctgcctcctggcccgaggctccccgcgtggcctcgcgtctggtcgcctacccctcgcggtccactccgcccagcatggacctggatccggggcgccttggttgcgaattgccaggagggccctgagatttgtgttgtcaaaacactggggggatgattgttacctgacaaaccgcctctggcaggacctgaagcctcccagtcacgtcgagaacgggcaggagctcaggttggcgccgccggtgcagtgggcattacaggtgcaagggaaccagttgcaaactgcagtgctgtgcttgaggatggctcctcctgagccggcaggctcccggtaggcgcggtccagccaaagaatttagaacgagtctacgtggacacgcaagtttcagcgagcgggga

SEQ ID NO: 119084 - DNA, 11199 bp, Homo sapiens
  Payload ID: 3337
  Gene Symbol: C5orf42
  Gene Name: chromosome 5 open reading frame 42
  Uniprot ID: Q9H799
  ENST ID: ENST00000425232
  CDS Start-End: 232-9825
ggttctgagcaggcgccgtggcagcgcccgcgccccctgcccgccctccgccgtcgccaggacgcaggctcgcgtcagggctggcggtagggcccgcagctgtcggcctggcgtcttcaccccgcgcagtcggcctcgcctagccttctcgcgcctgactggccggaccctgcccctggcggagaatcttgggactgttttacttaattggtcattgatagcttaacaaacatggagataagattagaaatcttgacatcaacaggtattaagcagaaaaaaccatggccacgtgtctcctggttgggaaaggaaaaagaagccgtttttcttttggatgataaattcataaatgaaattaatttgctatcaggaaagataaagaagaaaattcctagtctgcagcctttcttgaaggatgttattgtcctaacaacatccagtaatgatgcctggctggctggggtactaactacaggagagcttttcctttggaacaaagatcaagattgtttgaaaactataccaataactgaaaagcctaaggaaatgatcaaagctacagtcgcaagctctttgagactgtacttgtatgtatctggaaatgggaaaagaattgtgctcataacaccttctggatgcatatttctttgggaatatttggaattaaagaatatcttatcttctaaaagcctttcattggcgggtcggtggtcccaggtcatacctgaagaagcagttctcttgccttccaccgaagataaagaagctgtagtgaatgctgtttttataaaaaatgagttatttggagactgctgcctgtgttcatttactttttattctggggaatgcctgaagttaacatttctagcaattcggtggcatgagaatgtatttacatctgtaagatcattgccataccatgttcattgggctcaacaagactgtcatctctgtagtttaattcctaaatgtgaatcagtaaagtcaagaggagctctaatttctgccttttcaagagatggccttaccctggcagtaactcttaatcagaaagaccccaaggcaactcaggtattatttataaacacactgaattttgttactctctgtggtagccttaaaggatgtagtaacaagagtcccgtggttccagctacacttattaggtcctactgggtaggtgatatcagctggacgcatgatagtctttttctggcttgtatgttaaaacgtggctctctggttttattgacctgccaaggtgaattgctaacattaattacatttggttgctctatagaatttggcccagcagaatttattcctcttcatccactaataacgtatagaccacagcagtttacgtttcaagattcaaataattctgttgattcatcagcttctgatagtgaccctatgagacagagattttctataaaagcacactcacggttaccctacctcgttatatctgatggatatatggtcacaacccttcgatttcttgatagcctatctccatcagtacacatgagatcacttctacttgattcaacccagaggcttgagaaaatatatcaaagtgtgatattgtctaagccaaaaggcaaaggactgaacttgcgatcactgaattccctaaggtctagcctgttagaacaccaaggaaatgaaagttcagccgatttcactgtccccaaattcttgcaggcagaagaaacaataaatgaaaatgcagcagattttcaggattttgaagcagaagaaactaacgaaggcagacactttccagacaacttatgtcctttttggaacaaaagagatgatgtgctgtgtagtagtatgaaggaaggaagattggaatttgcatctatgtttgatacgatacatgcaaaggatgatagtgaggagacagatagaaccattacagaactgcattctatccagaaaagtctacttgcagcgtggactataggaatttcaaaaactgtgacagaaaaaaatttaatgttaaattacatagtagtttgtatcactcattttttttacattcttcaatttataaaatgtccttttcctaaacttgatcttgttttaagcaaaagctcaagacataatgcatggatactttgtatctttcaactttttcatcagtgtttatcaatccattattgggatataagatacaaacaagatgtggggcatttgataaagctgacctcaaatactgtaaaacttttgctgactcagcaacaaaagggtcagttattctcagagaaacttttagcttgtttttatttactcaaaatggtagctgacaatttaaatggtgtatacattcttcaacctgaagttatttcagcatcagctgatggaagtaaaataacagctcaagactcattggtggtacctatttttcagatgtttcaagatagtggttttcagaaaaactggtcttggaactcatttttcaagattcatcctcaagtagtaaatcctgtgcaacagccaggacacagattgcttattctctggagaatactgtacaaaaaaactttatggtatcaagcacaattaaatcgaagagttcctgaagctgatagtcagttaactgaaaagatgacacatgaagcatctactgtcaagtccctgttatgtcatttgcaggctaacctacagagtactggagattgcttgaatcaaaccttagaacttaaatctatcaatggggaagaatgttttttattaggatcatatgaaaagtctgttcagctgtggaaaaaagctctacaagaaatcgaagagaaaggaggaagaaggacgtattttcttcagatacgctattatctttctctcttatactgccacctctatagctataatttaaatgatgctcaaggattgtgtgatcagctagcaagagaaatcctgagatggtcccaactacctgtaaaagaaaataaagatttttcaggtgctgcaaagtctcattttgagtgtggaatggtgggcggtgttcatcctgaggcagcagtgagagtcgtccagtccatggctcgtttcatggctgcctatttcaccaatcagcagctttgcattttgccccctcatcatgtgaatgttcttcccccacttcatattaaaacagagcagtcctttcgacttattcctctgcaacactctaaggtggccagtgttgttagagatcagaatctctctaatgtgtggacagttgaatatgcacttgaattactatttattggtggcctggttccagaggctgtgtggttggcatataaacttggagactggaagacgtctgtttcaattggtgtggctttccagctgttctgtaaacgtgatagcaatttcatgaggtccaagaaaaagagtctgaatctaccactccgtatgactccagcacagatttttcaggaaaaactgcagtgtgttttaggtcaaccagcctctttggaagcaaaaaatgaaatgggctcaaaatataaacagtttacagatcccattgaagaggaagatgcaaatctgctatttggttcagtacaagaagtactgaaagcatcagttatggccgatgcagatattctttcggagacatttcaacttctgatagactctgccaaggacttcagtaaaagactgtggggcttagtgccattcggcttgtatcttccagctcctccattgtactgtccccagccagctattcttagtgaagaagatggtgatgatcttcttttaaaagctgaaaaaaataatcgccagaaggtatctggaatccttcagcgtgttctcctgcttttccgggcggctcagtgttcttttcctgtagcacagtggtatatattgcagttgaggtgggcaagaaaagtcatgcagaagattcgaatgaaaggatcccttccttcactgagtccttttcctcagtcattacttaattactgtaaaggaggtatcgcattttttagacctggagcagctggagaccacaagcttgatgaagtttccattagagcaataggttgcttcagagaactttgtgctctgtgttggatgctgcatgtccgtgataagttatcctatagttgcaggcaatatcagaaagcaagagaaaatgtaaaaggagaaaaggaccttgaagtggagtttgattcttgtatgattgagcactgtcttagtgcagtggaatgggcttatagaatgctgcctttctctcggttttttaatatggaagaacttattcaggatataattttgagccttattggagaactgccaccaatcagaaaggtagcagaaattttcgtgaaagcatttccctatcctgaggacgtgagggttcctttaagagacaaatatcactctcttcaccagagactcagacactgtgttgtgaaaggaccccagactgaggaaatgatgtctgttgtcatgcattctatccagaaagtgagggtgaaagctctaaaacgtgtgcagagaaatataggctcttttgaagtgaatatatgggaaccaattgaagaagagaaaccagatgaggctccaggtgttgacagatattccctggggactagtttgagcagaagtacactcacagaactaggagattctgtggttcacagtgatgcagatacgttctctgaagctttgtcggttgaagaaaaaagtaggataaatatctatcaaagaaatgccccaaatcacatggaattaacatcaattcataagccaactgataaaaggaaaatgtgtaatcagaaagaaaatcctacaaagaaagaagatcatgaaaagttatcacaaaatacacttcctgtaataggtgtttgggaatttgaacgtgatgatgatgaatatattaaattccttgatctgtttttgagttacattcttgaaagagacctaccttattccagggatgctgacattccatttctaactagtttttctggaaagcttagagaacatgaacttaattctttactttttgatgtacatacaacattaaaacgacatcagagcaaaactaaaagccagaatgtgtttagagctggttcttgctttgttgttgctcctgagtcctatgaatcagaaaaatcatcctctttaaatgatgaatatggcatgcatttagaaaaccagaaactttcatcatcagtactggttaatcaagggatcaaaccttttttacaatatccttcgaatgaagtcaataagaatgaaggaatgagtggattatttggtttaaaacaaaggtcaatttacaaaatacaagatgacactagagagaaatgtctaatccagagatcatcaaaccacattttttggactcccaagtccattaaaactagaagatgtattttcaaagctattcagtgcaatgatattaaccctcaagaagatcttcctttagcactaaacacttttggcagtataggaagactgctggaatggatgataaggtggtctaatagaaggctactctgtgattctggtataactgagtcatcctctgagtacagtccagtaattcgtgtaaagacctctacagctgccattcttacatcattatggcttttggaacaaccctattttgctacatataaggcaaaaaatgccattattaagatggtagagaatcgtgacactgggtgtcagattggacccaatattgagagggagagcaaatcagatgctggcggttcagttgcagtagcaactccaggtggaactgaggaaagaaatggtcagaataaatcttgtcaaaatatcttgaatagaatgccaactgaagcaaaaaatcctgatataaaagaaatcaatgatgatattatttccatcactcataatactaaaaaagaatttatagatattgatgagaatcttttagaagtagaagcatttacagaagaggaaatggatatgcacatatcagactatgaagaagacattgaagaatctgttggaggtttcagaagtcccagtcttgccatttgcatgatgactttaccacagcagttagaagaagagttcacagaagaggttcagtgtcaaagggaagaaccactggagacaattatggaggaaaaatcgactgaacaaaaaggtatgatcgaagccttttcacatcctgggcataccactcctcaatcaatgcaagtagatacgagttcagaaatttctagtgcacagatttctacatataaagaaaaatcttcctcagttccacttctgatatcaaatggagtcaatgttgcttcacaaccacctgctccaacacctcagaagacccagagaaatgaattcacggctcagttaccagattgttcggagtccgttaggcagatgctgcaagatgaaatgtttaaattagttcagctgcaacagatcaacttcatgagcctaatgcaaatagtaggatcatcctttgctaatctcccagatacacaacaacttgtacagcagtctcagtctgtgcatttaggggaaagccaagaatcaaacctaagaggatgtggtgatgttgaagacagcaacaaaaatcttaaggagagattttttattaaaccacagtcaatgggagagaacgccagagagcctcgcaagaacagcccacactgccatgaaggaactatcccatctggtcaaaatagtactggaaacgtacagaatgttccacatgggagtattcctttatgtcaattaaatggccagccccggaaaaaaggaccaattccatcatctcaaaacttaccatccacttcgttttatccagctcctgctggaaatactcacctctaccttttgtccacaccttctgttgttcagaaggcacctagacttatcccacatgcaaaaacatttagtcctggtgatggctttcctttgcttcaatttaagtctaaacaagaattccagccccttttcttacatacaggaagtattccacaagttcccttcaggcctttgccacaaccaagagaggcttggggattatctgactccttccaacctgctctgccacagagagcagcacaaactactccagcatcccatttgaatgtaagccagtataacactgaagccagaaaaaaagaagttgagcagaagacgtgggcagaaactgtaattacagaaattcctaatcatgtgaacttggatcaatatgttggacaagaaaatttgacacctcaacaggactcttcagtgtttataaaaccagaaaaactatttgatgttaagccagggacccttgagatatctcctcaccattcctttggacttccgttactatacctgccacttaaacctcctaatatgtttccatcaacctcaagagcatctattacagttccctcaacacctatccaacctatagcagaagaaagaaaatacccaagattgtcattacttcattcacatttgtccccagaaaataggtgcaaaaaaacacaacttatcccacttgaaaacctcattgcgtttaaacaaagccaacagaaactaacacataatttatttgaacaaggtgatgctggacaccttcaacttctaaaggtcaaaatagaaccacctgaagtaagacaaggaaaggacagtaaaaaaaggcaaagaagaagagctgagaaagagctgcaagaaaaaagatgtgagaaactgaggagaaaaccaaatgtgacttttcgaccagagaattccataattaataatgatgattcagaaatcattaagaaacccaaggaacaacaagaacattgtggttcccatcctttggatgacttcgacgttccttttgaaatgctacaagatgataatacttcagctggattgcatttcatggcctctgtaaaaaagaaagctataggaagtcaagatgcaagtacaaatacagacccagaacatgagcctttgactgctcctcagctcttggtcccagatgtctatctaaatctgaagctttccagtgaaatgtcagagaaaccttggtcaccctcaatacctcatacagtaacaaacttggaattacctgtgagagaagagccttcaaatgataatgttatcaaacagcaaagcgatcatctagcagttccatcgtctgcagagttacattatatggcagcttcagttactaatgctgttcccccacataattttaagagtcaaggtctgccaaaaccagagttccgattcaaaggacagagcacaaagtcagactctgcagaagattatctattgtggaaacggctgcaaggtgtctctgcagcttgccctgcaccaagctctgcagctcaccaactagagcatctcagtgctaagcttcagaaaattgacgagcagttgctagcaatacagaacattgctgaaaacatagaacaggatttccccaagcctgaaatgctagatctacattgtgataagattggaccagtggatcacattgaattctcttctggccctgaattcaaaaaaacattagcttcaaaaaccattagcatttctgaagaagtgcgttttttgacccatatggatgaagaagatcaaagtgacaaaaaggagacttcagaacctgaattttcaataacagaaaattattctggtcagaaaacctgtgtgtttcctactgccgattcagctgtcagcctttccagttccagtgatcagaatactacttctcctggtatgaatagcagtgatgaattgtgtgagagtgtttcagtacatccgctccagatgactggattgactgatattgcagacattattgatgaccttataattaaagacggagtttccagtgaagaacttggcttaacagaacaagctatgggcacctccagaattcagcattattctggcagacattcacaaagaactgacaaggaaagaagagagattcaagcctggatgaaaagaaaacgaaaagaaagaatggcaaagtacttaaatgagctggcagaaaagagagggcaagaacatgatcctttctgtcccagaagcaatccactttacatgacttcaagggaaataaggctgagacaaaagatgaagcatgaaaaagacagattgctgctctctgaacactatagtcgtcgaatctcacaagcgtacggtctgatgaatgaactgttatctgagtcagtacagctaccaactctaccacagaaaccattgcctaacaaacccagccctactcagtcttccagttgtcaacactgcccttctccaagaggagagaatcaacatggtcacagttttctaataaatcgacctggaaaagtcaaatatatgtccaaaccgagttatatccataagaggaagtcttttgggcaacctcaaggctcaccttggccacatggaactgccactttcaccatacagaaaaaagctggtggagccaaagcagcagtaagaaaggctacgcagtctccagttaccttccaaaaaggctctaatgctccgtgtcatagtctgcagcatacaaaaaaacatggaagtgctgggcttgcacctcaaaccaagcaggtgtgtgtagagtatgaaagagaggagactgtggtgagtccctggacgataccttcagaaatccataagattcttcatgagagtcacaattcccttctacaagacttgtctccaactgaagaggaagagccagagcatccttttggggtgggcggtgtggacagcgtgtctgagagcactggcagcatcctcagcaagctggactggaatgccatcgaagacatggtggccagcgtggaggaccagggcctgtctgtccactgggccctggacctgtaagacctggatatcattgggtttccatgcacaggccagcacctcagtaatgtggttctgaaagattaacaggtttaagggacagaagcaatgaaagaagcaatgtgaattttccatttgctttcatattattacctggattagccattaccagaggaaaaataaacatttctcagtaactttgcctttatggggaaagggttgactattgatgtattatatgtttttgtatttgatgcatcattaggcataatttttaaaatgataagtacctttcaagccaagtttgcataacctactttcaataaaaaccctctatcttgcctcctcctttattaccctctgagttttgagaaacaaccatatacagatgaatctaataggaaaaaaaaaaatcttttcattgagaagaaaatcagtctcacctgagaactcaattatgaaccctattttaaaacacctatgcagggtttagcctaggagtgaaaagaaaaaccaactaccttttaccaaccctgaatctctaaataagcaaagtttcatggaggccaggagatcttctgtcttctgccctgtagcctgaagccttggaggaagaaacaggaatggatgctttgggcaggaaagtaagggaatatgactccggcctctagaaggctcatcttaaatttgtaagaaccatggtacagagacctgattagtttttggtattgtgctccaataatgtcatagttttaagagataatttttatgagaattgactaagaaccagtatccttcaactacttcatcaatgtttggtataatataaaagcacactatcatctgaaaaagctattaaatacccctctttttccaaatatctacctgtgtgaagccaggttttacaacatgtattgcagcaagttgaatgcagaagcaggtatggtaattcagctgccttctatcaagctaaacattaaagagatttgtagaactataaaacaatgctactctccttaccaaattgttttagaaaatagctttataggctaacattattgttaattgtcatttaattgttttgtcatttaaaatattttaaattgttttctgttagtttcttttttgtatattctatgggtattttattgatacatgatagttgtacatttttatggggtgcatgtgatattttgatatgtgcatacaatgtgtagcaatcaaatcagggtaattgggatattcatcacctcaaacatttatcatttatttgtgttggaaacattcaaaccttttcttctagctatttatccattgttggatacttatatcaattctatatcttagctgttgtgaatagagctgcaataaatgtaggagtgcagatatctcttt

SEQ ID NO: 119085 - DNA, 11062 bp, Homo sapiens
  Payload ID: 3337
  Gene Symbol: C5orf42
  Gene Name: chromosome 5 open reading frame 42
  Uniprot ID: Q9H799
  ENST ID: ENST00000508244
  CDS Start-End: 95-9688
gtgaatattatgcatcatttatattttattactattattgtttacagaatcttgggactgttttacttaattggtcattgatagcttaacaaacatggagataagattagaaatcttgacatcaacaggtattaagcagaaaaaaccatggccacgtgtctcctggttgggaaaggaaaaagaagccgtttttcttttggatgataaattcataaatgaaattaatttgctatcaggaaagataaagaagaaaattcctagtctgcagcctttcttgaaggatgttattgtcctaacaacatccagtaatgatgcctggctggctggggtactaactacaggagagcttttcctttggaacaaagatcaagattgtttgaaaactataccaataactgaaaagcctaaggaaatgatcaaagctacagtcgcaagctctttgagactgtacttgtatgtatctggaaatgggaaaagaattgtgctcataacaccttctggatgcatatttctttgggaatatttggaattaaagaatatcttatcttctaaaagcctttcattggcgggtcggtggtcccaggtcatacctgaagaagcagttctcttgccttccaccgaagataaagaagctgtagtgaatgctgtttttataaaaaatgagttatttggagactgctgcctgtgttcatttactttttattctggggaatgcctgaagttaacatttctagcaattcggtggcatgagaatgtatttacatctgtaagatcattgccataccatgttcattgggctcaacaagactgtcatctctgtagtttaattcctaaatgtgaatcagtaaagtcaagaggagctctaatttctgccttttcaagagatggccttaccctggcagtaactcttaatcagaaagaccccaaggcaactcaggtattatttataaacacactgaattttgttactctctgtggtagccttaaaggatgtagtaacaagagtcccgtggttccagctacacttattaggtcctactgggtaggtgatatcagctggacgcatgatagtctttttctggcttgtatgttaaaacgtggctctctggttttattgacctgccaaggtgaattgctaacattaattacatttggttgctctatagaatttggcccagcagaatttattcctcttcatccactaataacgtatagaccacagcagtttacgtttcaagattcaaataattctgttgattcatcagcttctgatagtgaccctatgagacagagattttctataaaagcacactcacggttaccctacctcgttatatctgatggatatatggtcacaacccttcgatttcttgatagcctatctccatcagtacacatgagatcacttctacttgattcaacccagaggcttgagaaaatatatcaaagtgtgatattgtctaagccaaaaggcaaaggactgaacttgcgatcactgaattccctaaggtctagcctgttagaacaccaaggaaatgaaagttcagccgatttcactgtccccaaattcttgcaggcagaagaaacaataaatgaaaatgcagcagattttcaggattttgaagcagaagaaactaacgaaggcagacactttccagacaacttatgtcctttttggaacaaaagagatgatgtgctgtgtagtagtatgaaggaaggaagattggaatttgcatctatgtttgatacgatacatgcaaaggatgatagtgaggagacagatagaaccattacagaactgcattctatccagaaaagtctacttgcagcgtggactataggaatttcaaaaactgtgacagaaaaaaatttaatgttaaattacatagtagtttgtatcactcattttttttacattcttcaatttataaaatgtccttttcctaaacttgatcttgttttaagcaaaagctcaagacataatgcatggatactttgtatctttcaactttttcatcagtgtttatcaatccattattgggatataagatacaaacaagatgtggggcatttgataaagctgacctcaaatactgtaaaacttttgctgactcagcaacaaaagggtcagttattctcagagaaacttttagcttgtttttatttactcaaaatggtagctgacaatttaaatggtgtatacattcttcaacctgaagttatttcagcatcagctgatggaagtaaaataacagctcaagactcattggtggtacctatttttcagatgtttcaagatagtggttttcagaaaaactggtcttggaactcatttttcaagattcatcctcaagtagtaaatcctgtgcaacagccaggacacagattgcttattctctggagaatactgtacaaaaaaactttatggtatcaagcacaattaaatcgaagagttcctgaagctgatagtcagttaactgaaaagatgacacatgaagcatctactgtcaagtccctgttatgtcatttgcaggctaacctacagagtactggagattgcttgaatcaaaccttagaacttaaatctatcaatggggaagaatgttttttattaggatcatatgaaaagtctgttcagctgtggaaaaaagctctacaagaaatcgaagagaaaggaggaagaaggacgtattttcttcagatacgctattatctttctctcttatactgccacctctatagctataatttaaatgatgctcaaggattgtgtgatcagctagcaagagaaatcctgagatggtcccaactacctgtaaaagaaaataaagatttttcaggtgctgcaaagtctcattttgagtgtggaatggtgggcggtgttcatcctgaggcagcagtgagagtcgtccagtccatggctcgtttcatggctgcctatttcaccaatcagcagctttgcattttgccccctcatcatgtgaatgttcttcccccacttcatattaaaacagagcagtcctttcgacttattcctctgcaacactctaaggtggccagtgttgttagagatcagaatctctctaatgtgtggacagttgaatatgcacttgaattactatttattggtggcctggttccagaggctgtgtggttggcatataaacttggagactggaagacgtctgtttcaattggtgtggctttccagctgttctgtaaacgtgatagcaatttcatgaggtccaagaaaaagagtctgaatctaccactccgtatgactccagcacagatttttcaggaaaaactgcagtgtgttttaggtcaaccagcctctttggaagcaaaaaatgaaatgggctcaaaatataaacagtttacagatcccattgaagaggaagatgcaaatctgctatttggttcagtacaagaagtactgaaagcatcagttatggccgatgcagatattctttcggagacatttcaacttctgatagactctgccaaggacttcagtaaaagactgtggggcttagtgccattcggcttgtatcttccagctcctccattgtactgtccccagccagctattcttagtgaagaagatggtgatgatcttcttttaaaagctgaaaaaaataatcgccagaaggtatctggaatccttcagcgtgttctcctgcttttccgggcggctcagtgttcttttcctgtagcacagtggtatatattgcagttgaggtgggcaagaaaagtcatgcagaagattcgaatgaaaggatcccttccttcactgagtccttttcctcagtcattacttaattactgtaaaggaggtatcgcattttttagacctggagcagctggagaccacaagcttgatgaagtttccattagagcaataggttgcttcagagaactttgtgctctgtgttggatgctgcatgtccgtgataagttatcctatagttgcaggcaatatcagaaagcaagagaaaatgtaaaaggagaaaaggaccttgaagtggagtttgattcttgtatgattgagcactgtcttagtgcagtggaatgggcttatagaatgctgcctttctctcggttttttaatatggaagaacttattcaggatataattttgagccttattggagaactgccaccaatcagaaaggtagcagaaattttcgtgaaagcatttccctatcctgaggacgtgagggttcctttaagagacaaatatcactctcttcaccagagactcagacactgtgttgtgaaaggaccccagactgaggaaatgatgtctgttgtcatgcattctatccagaaagtgagggtgaaagctctaaaacgtgtgcagagaaatataggctcttttgaagtgaatatatgggaaccaattgaagaagagaaaccagatgaggctccaggtgttgacagatattccctggggactagtttgagcagaagtacactcacagaactaggagattctgtggttcacagtgatgcagatacgttctctgaagctttgtcggttgaagaaaaaagtaggataaatatctatcaaagaaatgccccaaatcacatggaattaacatcaattcataagccaactgataaaaggaaaatgtgtaatcagaaagaaaatcctacaaagaaagaagatcatgaaaagttatcacaaaatacacttcctgtaataggtgtttgggaatttgaacgtgatgatgatgaatatattaaattccttgatctgtttttgagttacattcttgaaagagacctaccttattccagggatgctgacattccatttctaactagtttttctggaaagcttagagaacatgaacttaattctttactttttgatgtacatacaacattaaaacgacatcagagcaaaactaaaagccagaatgtgtttagagctggttcttgctttgttgttgctcctgagtcctatgaatcagaaaaatcatcctctttaaatgatgaatatggcatgcatttagaaaaccagaaactttcatcatcagtactggttaatcaagggatcaaaccttttttacaatatccttcgaatgaagtcaataagaatgaaggaatgagtggattatttggtttaaaacaaaggtcaatttacaaaatacaagatgacactagagagaaatgtctaatccagagatcatcaaaccacattttttggactcccaagtccattaaaactagaagatgtattttcaaagctattcagtgcaatgatattaaccctcaagaagatcttcctttagcactaaacacttttggcagtataggaagactgctggaatggatgataaggtggtctaatagaaggctactctgtgattctggtataactgagtcatcctctgagtacagtccagtaattcgtgtaaagacctctacagctgccattcttacatcattatggcttttggaacaaccctattttgctacatataaggcaaaaaatgccattattaagatggtagagaatcgtgacactgggtgtcagattggacccaatattgagagggagagcaaatcagatgctggcggttcagttgcagtagcaactccaggtggaactgaggaaagaaatggtcagaataaatcttgtcaaaatatcttgaatagaatgccaactgaagcaaaaaatcctgatataaaagaaatcaatgatgatattatttccatcactcataatactaaaaaagaatttatagatattgatgagaatcttttagaagtagaagcatttacagaagaggaaatggatatgcacatatcagactatgaagaagacattgaagaatctgttggaggtttcagaagtcccagtcttgccatttgcatgatgactttaccacagcagttagaagaagagttcacagaagaggttcagtgtcaaagggaagaaccactggagacaattatggaggaaaaatcgactgaacaaaaaggtatgatcgaagccttttcacatcctgggcataccactcctcaatcaatgcaagtagatacgagttcagaaatttctagtgcacagatttctacatataaagaaaaatcttcctcagttccacttctgatatcaaatggagtcaatgttgcttcacaaccacctgctccaacacctcagaagacccagagaaatgaattcacggctcagttaccagattgttcggagtccgttaggcagatgctgcaagatgaaatgtttaaattagttcagctgcaacagatcaacttcatgagcctaatgcaaatagtaggatcatcctttgctaatctcccagatacacaacaacttgtacagcagtctcagtctgtgcatttaggggaaagccaagaatcaaacctaagaggatgtggtgatgttgaagacagcaacaaaaatcttaaggagagattttttattaaaccacagtcaatgggagagaacgccagagagcctcgcaagaacagcccacactgccatgaaggaactatcccatctggtcaaaatagtactggaaacgtacagaatgttccacatgggagtattcctttatgtcaattaaatggccagccccggaaaaaaggaccaattccatcatctcaaaacttaccatccacttcgttttatccagctcctgctggaaatactcacctctaccttttgtccacaccttctgttgttcagaaggcacctagacttatcccacatgcaaaaacatttagtcctggtgatggctttcctttgcttcaatttaagtctaaacaagaattccagccccttttcttacatacaggaagtattccacaagttcccttcaggcctttgccacaaccaagagaggcttggggattatctgactccttccaacctgctctgccacagagagcagcacaaactactccagcatcccatttgaatgtaagccagtataacactgaagccagaaaaaaagaagttgagcagaagacgtgggcagaaactgtaattacagaaattcctaatcatgtgaacttggatcaatatgttggacaagaaaatttgacacctcaacaggactcttcagtgtttataaaaccagaaaaactatttgatgttaagccagggacccttgagatatctcctcaccattcctttggacttccgttactatacctgccacttaaacctcctaatatgtttccatcaacctcaagagcatctattacagttccctcaacacctatccaacctatagcagaagaaagaaaatacccaagattgtcattacttcattcacatttgtccccagaaaataggtgcaaaaaaacacaacttatcccacttgaaaacctcattgcgtttaaacaaagccaacagaaactaacacataatttatttgaacaaggtgatgctggacaccttcaacttctaaaggtcaaaatagaaccacctgaagtaagacaaggaaaggacagtaaaaaaaggcaaagaagaagagctgagaaagagctgcaagaaaaaagatgtgagaaactgaggagaaaaccaaatgtgacttttcgaccagagaattccataattaataatgatgattcagaaatcattaagaaacccaaggaacaacaagaacattgtggttcccatcctttggatgacttcgacgttccttttgaaatgctacaagatgataatacttcagctggattgcatttcatggcctctgtaaaaaagaaagctataggaagtcaagatgcaagtacaaatacagacccagaacatgagcctttgactgctcctcagctcttggtcccagatgtctatctaaatctgaagctttccagtgaaatgtcagagaaaccttggtcaccctcaatacctcatacagtaacaaacttggaattacctgtgagagaagagccttcaaatgataatgttatcaaacagcaaagcgatcatctagcagttccatcgtctgcagagttacattatatggcagcttcagttactaatgctgttcccccacataattttaagagtcaaggtctgccaaaaccagagttccgattcaaaggacagagcacaaagtcagactctgcagaagattatctattgtggaaacggctgcaaggtgtctctgcagcttgccctgcaccaagctctgcagctcaccaactagagcatctcagtgctaagcttcagaaaattgacgagcagttgctagcaatacagaacattgctgaaaacatagaacaggatttccccaagcctgaaatgctagatctacattgtgataagattggaccagtggatcacattgaattctcttctggccctgaattcaaaaaaacattagcttcaaaaaccattagcatttctgaagaagtgcgttttttgacccatatggatgaagaagatcaaagtgacaaaaaggagacttcagaacctgaattttcaataacagaaaattattctggtcagaaaacctgtgtgtttcctactgccgattcagctgtcagcctttccagttccagtgatcagaatactacttctcctggtatgaatagcagtgatgaattgtgtgagagtgtttcagtacatccgctccagatgactggattgactgatattgcagacattattgatgaccttataattaaagacggagtttccagtgaagaacttggcttaacagaacaagctatgggcacctccagaattcagcattattctggcagacattcacaaagaactgacaaggaaagaagagagattcaagcctggatgaaaagaaaacgaaaagaaagaatggcaaagtacttaaatgagctggcagaaaagagagggcaagaacatgatcctttctgtcccagaagcaatccactttacatgacttcaagggaaataaggctgagacaaaagatgaagcatgaaaaagacagattgctgctctctgaacactatagtcgtcgaatctcacaagcgtacggtctgatgaatgaactgttatctgagtcagtacagctaccaactctaccacagaaaccattgcctaacaaacccagccctactcagtcttccagttgtcaacactgcccttctccaagaggagagaatcaacatggtcacagttttctaataaatcgacctggaaaagtcaaatatatgtccaaaccgagttatatccataagaggaagtcttttgggcaacctcaaggctcaccttggccacatggaactgccactttcaccatacagaaaaaagctggtggagccaaagcagcagtaagaaaggctacgcagtctccagttaccttccaaaaaggctctaatgctccgtgtcatagtctgcagcatacaaaaaaacatggaagtgctgggcttgcacctcaaaccaagcaggtgtgtgtagagtatgaaagagaggagactgtggtgagtccctggacgataccttcagaaatccataagattcttcatgagagtcacaattcccttctacaagacttgtctccaactgaagaggaagagccagagcatccttttggggtgggcggtgtggacagcgtgtctgagagcactggcagcatcctcagcaagctggactggaatgccatcgaagacatggtggccagcgtggaggaccagggcctgtctgtccactgggccctggacctgtaagacctggatatcattgggtttccatgcacaggccagcacctcagtaatgtggttctgaaagattaacaggtttaagggacagaagcaatgaaagaagcaatgtgaattttccatttgctttcatattattacctggattagccattaccagaggaaaaataaacatttctcagtaactttgcctttatggggaaagggttgactattgatgtattatatgtttttgtatttgatgcatcattaggcataatttttaaaatgataagtacctttcaagccaagtttgcataacctactttcaataaaaaccctctatcttgcctcctcctttattaccctctgagttttgagaaacaaccatatacagatgaatctaataggaaaaaaaaaaatcttttcattgagaagaaaatcagtctcacctgagaactcaattatgaaccctattttaaaacacctatgcagggtttagcctaggagtgaaaagaaaaaccaactaccttttaccaaccctgaatctctaaataagcaaagtttcatggaggccaggagatcttctgtcttctgccctgtagcctgaagccttggaggaagaaacaggaatggatgctttgggcaggaaagtaagggaatatgactccggcctctagaaggctcatcttaaatttgtaagaaccatggtacagagacctgattagtttttggtattgtgctccaataatgtcatagttttaagagataatttttatgagaattgactaagaaccagtatccttcaactacttcatcaatgtttggtataatataaaagcacactatcatctgaaaaagctattaaatacccctctttttccaaatatctacctgtgtgaagccaggttttacaacatgtattgcagcaagttgaatgcagaagcaggtatggtaattcagctgccttctatcaagctaaacattaaagagatttgtagaactataaaacaatgctactctccttaccaaattgttttagaaaatagctttataggctaacattattgttaattgtcatttaattgttttgtcatttaaaatattttaaattgttttctgttagtttcttttttgtatattctatgggtattttattgatacatgatagttgtacatttttatggggtgcatgtgatattttgatatgtgcatacaatgtgtagcaatcaaatcagggtaattgggatattcatcacctcaaacatttatcatttatttgtgttggaaacattcaaaccttttcttctagctatttatccattgttggatacttatatcaattctatatcttagctgttgtgaatagagctgcaataaatgtaggagtgcagatatctcttt

SEQ ID NO: 119086 - DNA, 7416 bp, Homo sapiens
  Payload ID: 3337
  Gene Symbol: C5orf42
  Gene Name: chromosome 5 open reading frame 42
  ENST ID: ENST00000514429
  CDS Start-End: 1-6792
cagcagctttgcattttgccccctcatcatgtgaatgttcttcccccacttcatattaaaacagagcagtcctttcgacttattcctctgcaacactctaaggtggccagtgttgttagagatcagaatctctctaatgtgtggacagttgaatatgcacttgaattactatttattggtggcctggttccagaggctgtgtggttggcatataaacttggagactggaagacgtctgtttcaattggtgtggctttccagctgttctgtaaacgtgatagcaatttcatgaggtccaagaaaaagagtctgaatctaccactccgtatgactccagcacagatttttcaggaaaaactgcagtgtgttttaggtcaaccagcctctttggaagcaaaaaatgaaatgggctcaaaatataaacagtttacagatcccattgaagaggaagatgcaaatctgctatttggttcagtacaagaagtactgaaagcatcagttatggccgatgcagatattctttcggagacatttcaacttctgatagactctgccaaggacttcagtaaaagactgtggggcttagtgccattcggcttgtatcttccagctcctccattgtactgtccccagccagctattcttagtgaagaagatggtgatgatcttcttttaaaagctgaaaaaaataatcgccagaaggtatctggaatccttcagcgtgttctcctgcttttccgggcggctcagtgttcttttcctgtagcacagtggtatatattgcagttgaggtgggcaagaaaagtcatgcagaagattcgaatgaaaggatcccttccttcactgagtccttttcctcagtcattacttaattactgtaaaggaggtatcgcattttttagacctggagcagctggagaccacaagcttgatgaagtttccattagagcaataggttgcttcagagaactttgtgctctgtgttggatgctgcatgtccgtgataagttatcctatagttgcaggcaatatcagaaagcaagagaaaatgtaaaaggagaaaaggaccttgaagtggagtttgattcttgtatgattgagcactgtcttagtgcagtggaatgggcttatagaatgctgcctttctctcggttttttaatatggaagaacttattcaggatataattttgagccttattggagaactgccaccaatcagaaaggtagcagaaattttcgtgaaagcatttccctatcctgaggacgtgagggttcctttaagagacaaatatcactctcttcaccagagactcagacactgtgttgtgaaaggaccccagactgaggaaatgatgtctgttgtcatgcattctatccagaaagtgagggtgaaagctctaaaacgtgtgcagagaaatataggctcttttgaagtgaatatatgggaaccaattgaagaagagaaaccagatgaggctccaggtgttgacagatattccctggggactagtttgagcagaagtacactcacagaactaggagattctgtggttcacagtgatgcagatacgttctctgaagctttgtcggttgaagaaaaaagtaggataaatatctatcaaagaaatgccccaaatcacatggaattaacatcaattcataagccaactgataaaaggaaaatgtgtaatcagaaagaaaatcctacaaagaaagaagatcatgaaaagttatcacaaaatacacttcctgtaataggtgtttgggaatttgaacgtgatgatgatgaatatattaaattccttgatctgtttttgagttacattcttgaaagagacctaccttattccagggatgctgacattccatttctaactagtttttctggaaagcttagagaacatgaacttaattctttactttttgatgtacatacaacattaaaacgacatcagagcaaaactaaaagccagaatgtgtttagagctggttcttgctttgttgttgctcctgagtcctatgaatcagaaaaatcatcctctttaaatgatgaatatggcatgcatttagaaaaccagaaactttcatcatcagtactggttaatcaagggatcaaaccttttttacaatatccttcgaatgaagtcaataagaatgaaggaatgagtggattatttggtttaaaacaaaggtcaatttacaaaatacaagatgacactagagagaaatgtctaatccagagatcatcaaaccacattttttggactcccaagtccattaaaactagaagatgtattttcaaagctattcagtgcaatgatattaaccctcaagaagatcttcctttagcactaaacacttttggcagtataggaagactgctggaatggatgataaggtggtctaatagaaggctactctgtgattctggtataactgagtcatcctctgagtacagtccagtaattcgtgtaaagacctctacagctgccattcttacatcattatggcttttggaacaaccctattttgctacatataaggcaaaaaatgccattattaagatggtagagaatcgtgacactgggtgtcagattggacccaatattgagagggagagcaaatcagatgctggcggttcagttgcagtagcaactccaggtggaactgaggaaagaaatggtcagaataaatcttgtcaaaatatcttgaatagaatgccaactgaagcaaaaaatcctgatataaaagaaatcaatgatgatattatttccatcactcataatactaaaaaagaatttatagatattgatgagaatcttttagaagtagaagcatttacagaagaggaaatggatatgcacatatcagactatgaagaagacattgaagaatctgttggaggtttcagaagtcccagtcttgccatttgcatgatgactttaccacagcagttagaagaagagttcacagaagaggttcagtgtcaaagggaagaaccactggagacaattatggaggaaaaatcgactgaacaaaaaggtatgatcgaagccttttcacatcctgggcataccactcctcaatcaatgcaagtagatacgagttcagaaatttctagtgcacagatttctacatataaagaaaaatcttcctcagttccacttctgatatcaaatggagtcaatgttgcttcacaaccacctgctccaacacctcagaagacccagagaaatgaattcacggctcagttaccagattgttcggagtccgttaggcagatgctgcaagatgaaatgtttaaattagttcagctgcaacagatcaacttcatgagcctaatgcaaatagtaggatcatcctttgctaatctcccagatacacaacaacttgtacagcagtctcagtctgtgcatttaggggaaagccaagaatcaaacctaagaggatgtggtgatgttgaagacagcaacaaaaatcttaaggagagattttttattaaaccacagtcaatgggagagaacgccagagagcctcgcaagaacagcccacactgccatgaaggaactatcccatctggtcaaaatagtactggaaacgtacagaatgttccacatgggagtattcctttatgtcaattaaatggccagccccggaaaaaaggaccaattccatcatctcaaaacttaccatccacttcgttttatccagctcctgctggaaatactcacctctaccttttgtccacaccttctgttgttcagaaggcacctagacttatcccacatgcaaaaacatttagtcctggtgatggctttcctttgcttcaatttaagtctaaacaagaattccagccccttttcttacatacaggaagtattccacaagttcccttcaggcctttgccacaaccaagagaggcttggggattatctgactccttccaacctgctctgccacagagagcagcacaaactactccagcatcccatttgaatgtaagccagtataacactgaagccagaaaaaaagaagttgagcagaagacgtgggcagaaactgtaattacagaaattcctaatcatgtgaacttggatcaatatgttggacaagaaaatttgacacctcaacaggactcttcagtgtttataaaaccagaaaaactatttgatgttaagccagggacccttgagatatctcctcaccattcctttggacttccgttactatacctgccacttaaacctcctaatatgtttccatcaacctcaagagcatctattacagttccctcaacacctatccaacctatagcagaagaaagaaaatacccaagattgtcattacttcattcacatttgtccccagaaaataggtgcaaaaaaacacaacttatcccacttgaaaacctcattgcgtttaaacaaagccaacagaaactaacacataatttatttgaacaaggtgatgctggacaccttcaacttctaaaggtcaaaatagaaccacctgaagtaagacaaggaaaggacagtaaaaaaaggcaaagaagaagagctgagaaagagctgcaagaaaaaagatgtgagaaactgaggagaaaaccaaatgtgacttttcgaccagagaattccataattaataatgatgattcagaaatcattaagaaacccaaggaacaacaagaacattgtggttcccatcctttggatgacttcgacgttccttttgaaatgctacaagatgataatacttcagctggattgcatttcatggcctctgtaaaaaagaaagctataggaagtcaagatgcaagtacaaatacagacccagaacatgagcctttgactgctcctcagctcttggtcccagatgtctatctaaatctgaagctttccagtgaaatgtcagagaaaccttggtcaccctcaatacctcatacagtaacaaacttggttggacatacttatataaatgtgattgacattgaagctaatgatcttctacaggaattacctgtgagagaagagccttcaaatgataatgttatcaaacagcaaagcgatcatctagcagttccatcgtctgcagagttacattatatggcagcttcagttactaatgctgttcccccacataattttaagagtcaaggtctgccaaaaccagagttccgattcaaaggacagagcacaaagtcagactctgcagaagattatctattgtggaaacggctgcaaggtgtctctgcagcttgccctgcaccaagctctgcagctcaccaactagagcatctcagtgctaagcttcagaaaattgacgagcagttgctagcaatacagaacattgctgaaaacatagaacaggatttccccaagcctgaaatgctagatctacattgtgataagattggaccagtggatcacattgaattctcttctggccctgaattcaaaaaaacattagcttcaaaaaccattagcatttctgaagaagtgcgttttttgacccatatggatgaagaagatcaaagtgacaaaaaggagacttcagaacctgaattttcaataacagaaaattattctggtcagaaaacctgtgtgtttcctactgccgattcagctgtcagcctttccagttccagtgatcagaatactacttctcctggtatgaatagcagtgatgaattgtgtgagagtgtttcagtacatccgctccagatgactggattgactgatattgcagacattattgatgaccttataattaaagacggagtttccagtgaagaacttggcttaacagaacaagctatgggcacctccagaattcagcattattctggcagacattcacaaagaactgacaaggaaagaagagagattcaagcctggatgaaaagaaaacgaaaagaaagaatggcaaagtacttaaatgagctggcagaaaagagagggcaagaacatgatcctttctgtcccagaagcaatccactttacatgacttcaagggaaataaggctgagacaaaagatgaagcatgaaaaagacagattgctgctctctgaacactatagtcgtcgaatctcacaagcgtacggtctgatgaatgaactgttatctgagtcagtacagctaccaactctaccacagaaaccattgcctaacaaacccagccctactcagtcttccagttgtcaacactgcccttctccaagaggagagaatcaacatggtcacagttttctaataaatcgacctggaaaagtcaaatatatgtccaaaccgagttatatccataagaggaagtcttttgggcaacctcaaggctcaccttggccacatggaactgccactttcaccatacagaaaaaagctggtggagccaaagcagcagtaagaaaggctacgcagtctccagttaccttccaaaaaggctctaatgctccgtgtcatagtctgcagcatacaaaaaaacatggaagtgctgggcttgcacctcaaaccaagcaggtgtgtgtagagtatgaaagagaggagactgtggtgagtccctggacgataccttcagaaatccataagattcttcatgagagtcacaattcccttctacaagacttgtctccaactgaagaggaagagccagagcatccttttggggtgggcggtgtggacagcgtgtctgagagcactggcagcatcctcagcaagctggactggaatgccatcgaagacatggtggccagcgtggaggaccagggcctgtctgtccactgggccctggacctgtaagacctggatatcattgggtttccatgcacaggccagcacctcagtaatgtggttctgaaagattaacaggtttaagggacagaagcaatgaaagaagcaatgtgaattttccatttgctttcatattattacctggattagccattaccagaggaaaaataaacatttctcagtaactttgcctttatggggaaagggttgactattgatgtattatatgtttttgtatttgatgcatcattaggcataatttttaaaatgataagtacctttcaagccaagtttgcataacctactttcaataaaaaccctctatcttgcctcctcctttattaccctctgagttttgagaaacaaccatatacagatgaatctaataggaaaaaaaaaaatcttttcattgagaagaaaatcagtctcacctgagaactcaattatgaaccctattttaaaacacctatgcagggtttagcctaggagtgaaaagaaaaaccaactaccttttaccaaccctgaatctctaaataagcaaagtttcatggaggccaggagatcttctgtcttctgccctgtagcctgaagccttggaggaagaaacaggaatggatgctttgggcaggaaag

SEQ ID NO: 119087 - DNA, 7392 bp, Homo sapiens
  Payload ID: 3337
  Gene Symbol: C5orf42
  Gene Name: chromosome 5 open reading frame 42
  ENST ID: ENST00000509849
  CDS Start-End: 1-5670
cagcagctttgcattttgccccctcatcatgtgaatgttcttcccccacttcatattaaaacagaggctgtgtggttggcatataaacttggagactggaagacgtctgtttcaattggtgtggctttccagctgttctgtaaacgtgatagcaatttcatgaggtccaagaaaaagagtctgaatctaccactccgtatgactccagcacagatttttcaggaaaaactgcagtgtgttttaggtcaaccagcctctttggaagcaaaaaatgaaatgggctcaaaatataaacagtttacagatcccattgaagaggaagatgcaaatctgctatttggttcagtacaagaagtactgaaagcatcagttatggccgatgcagatattctttcggagacatttcaacttctgatagactctgccaaggacttcagtaaaagactgtggggcttagtgccattcggcttgtatcttccagctcctccattgtactgtccccagccagctattcttagtgaagaagatggtgatgatcttcttttaaaagctgaaaaaaataatcgccagaaggtatctggaatccttcagcgtgttctcctgcttttccgggcggctcagtgttcttttcctgtagcacagtggtatatattgcagttgaggtgggcaagaaaagtcatgcagaagattcgaatgaaaggatcccttccttcactgagtccttttcctcagtcattacttaattactgtaaaggaggtatcgcattttttagacctggagcagctggagaccacaagcttgatgaagtttccattagagcaataggttgcttcagagaactttgtgctctgtgttggatgctgcatgtccgtgataagttatcctatagttgcaggcaatatcagaaagcaagagaaaatgtaaaaggagaaaaggaccttgaagtggagtttgattcttgtatgattgagcactgtcttagtgcagtggaatgggcttatagaatgctgcctttctctcggttttttaatatggaagaacttattcaggatataattttgagccttattggagaactgccaccaatcagaaaggtagcagaaattttcgtgaaagcatttccctatcctgaggacgtgagggttcctttaagagacaaatatcactctcttcaccagagactcagacactgtgttgtgaaaggaccccagactgaggaaatgatgtctgttgtcatgcattctatccagaaagtgagggtgaaagctctaaaacgtgtgcagagaaatataggctcttttgaagtgaatatatgggaaccaattgaagaagagaaaccagatgaggctccaggtgttgacagatattccctggggactagtttgagcagaagtacactcacagaactaggagattctgtggttcacagtgatgcagatacgttctctgaagctttgtcggttgaagaaaaaagtaggataaatatctatcaaagaaatgccccaaatcacatggaattaacatcaattcataagccaactgataaaaggaaaatgtgtaatcagaaagaaaatcctacaaagaaagaagatcatgaaaagttatcacaaaatacacttcctgtaataggtgtttgggaatttgaacgtgatgatgatgaatatattaaattccttgatctgtttttgagttacattcttgaaagagacctaccttattccagggatgctgacattccatttctaactagtttttctggaaagcttagagaacatgaacttaattctttactttttgatgtacatacaacattaaaacgacatcagagcaaaactaaaagccagaatgtgtttagagctggttcttgctttgttgttgctcctgagtcctatgaatcagaaaaatcatcctctttaaatgatgaatatggcatgcatttagaaaaccagaaactttcatcatcagtactggttaatcaagggatcaaaccttttttacaatatccttcgaatgaagtcaataagaatgaaggaatgagtggattatttggtttaaaacaaaggtcaatttacaaaatacaagatgacactagagagaaatgtctaatccagagatcatcaaaccacattttttggactcccaagtccattaaaactagaagatgtattttcaaagctattcagtgcaatgatattaaccctcaagaagatcttcctttagcactaaacacttttggcagtataggaagactgctggaatggatgataaggtggtctaatagaaggctactctgtgattctggtataactgagtcatcctctgagtacagtccagtaattcgtgtaaagacctctacagctgccattcttacatcattatggcttttggaacaaccctattttgctacatataaggcaaaaaatgccattattaagatggtagagaatcgtgacactgggtgtcagattggacccaatattgagagggagagcaaatcagatgctggcggttcagttgcagtagcaactccaggtggaactgaggaaagaaatggtcagaataaatcttgtcaaaatatcttgaatagaatgccaactgaagcaaaaaatcctgatataaaagaaatcaatgatgatattatttccatcactcataatactaaaaaagaatttatagatattgatgagaatcttttagaagtagaagcatttacagaagaggaaatggatatgcacatatcagactatgaagacattgaagaatctgttggaggtttcagaagtcccagtcttgccatttgcatgatgactttaccacagcagttagaagaagagttcacagaagaggttcagtgtcaaagggaagaaccactggagacaattatggaggaaaaatcgactgaacaaaaaggtatgatcgaagccttttcacatcctgggcataccactcctcaatcaatgcaagtagatacgagttcagaaatttctagtgcacagatttctacatataaagaaaaatcttcctcagttccacttctgatatcaaatggagtcaatgttgcttcacaaccacctgctccaacacctcagaagacccagagaaatgaattcacggctcagttaccagattgttcggagtccgttaggcagatgctgcaagatgaaatgtttaaattagttcagctgcaacagatcaacttcatgagcctaatgcaaatagtaggatcatcctttgctaatctcccagatacacaacaacttgtacagcagtctcagtctgtgcatttaggggaaagccaagaatcaaacctaagaggatgtggtgatgttgaagacagcaacaaaaatcttaaggagagattttttattaaaccacagtcaatgggagagaacgccagagagcctcgcaagaacagcccacactgccatgaaggaactatcccatctggtcaaaatagtactggaaacgtacagaatgttccacatgggagtattcctttatgtcaattaaatggccagccccggaaaaaaggaccaattccatcatctcaaaacttaccatccacttcgttttatccagctcctgctggaaatactcacctctaccttttgtccacaccttctgttgttcagaaggcacctagacttatcccacatgcaaaaacatttagtcctggtgatggctttcctttgcttcaatttaagtctaaacaagaattccagccccttttcttacatacaggaagtattccacaagttcccttcaggcctttgccacaaccaagagaggcttggggattatctgactccttccaacctgctctgccacagagagcagcacaaactactccagcatcccatttgaatgtaagccagtataacactgaagccagaaaaaaagaagttgagcagaagacgtgggcagaaactgtaattacagaaattcctaatcatgtgaacttggatcaatatgttggacaagaaaatttgacacctcaacaggactcttcagtgtttataaaaccagaaaaactatttgatgttaagccagggacccttgagatatctcctcaccattcctttggacttccgttactatacctgccacttaaacctcctaatatgtttccatcaacctcaagagcatctattacagttccctcaacacctatccaacctatagcagaagaaagaaaatacccaagattgtcattacttcattcacatttgtccccagaaaataggtgcaaaaaaacacaacttatcccacttgaaaacctcattgcgtttaaacaaagccaacagaaactaacacataatttatttgaacaaggtgatgctggacaccttcaacttctaaaggtcaaaatagaaccacctgaagtaagacaaggaaaggacagtaaaaaaaggcaaagaagaagagctgagaaagagctgcaagaaaaaagatgtgagaaactgaggagaaaaccaaatgtgacttttcgaccagagaattccataattaataatgatgattcagaaatcattaagaaacccaaggaacaacaagaacattgtggttcccatcctttggatgacttcgacgttccttttgaaatgctacaagatgataatacttcagctggattgcatttcatggcctctgtaaaaaagaaagctataggaagtcaagatgcaagtacaaatacagacccagaacatgagcctttgactgctcctcagctcttggtcccagatgtctatctaaatctgaagctttccagtgaaatgtcagagaaaccttggtcaccctcaatacctcatacagtaacaaacttggttggacatacttatataaatgtgattgacattgaagctaatgatcttctacaggaattacctgtgagagaagagccttcaaatgataatgttatcaaacagcaaagcgatcatctagcagttccatcgtctgcagagttacattatatggcagcttcagttactaatgctgttcccccacataattttaagagtcaagaagtaactccagcttgtctggatggaaaaagcttgagagcaggcattacagaagtgaaggagcctagtgtcacctcacctacaccatcagacatacagcagaacaaaggtctgccaaaaccagagttccgattcaaaggacagagcacaaagtcagactctgcagaagattatctattgtggaaacggctgcaaggtgtctctgcagcttgccctgcaccaagctctgcagctcaccaactagagcatctcagtgctaagcttcagaaaattgacgagcagttgctagcaatacagaacattgctgaaaacatagaacaggatttccccaagcctgaaatgctagatctacattgtgataagattggaccagtggatcacattgaattctcttctggccctgaattcaaaaaaacattagcttcaaaaaccattagcatttctgaagaagtgcgttttttgacccatatggatgaagaagatcaaagtgacaaaaaggagacttcagaacctgaattttcaataacagaaaattattctggtcagaaaacctgtgtgtttcctactgccgattcagctgtcagcctttccagttccagtgatcagaatactacttctcctgtgtttcagtacatccgctccagatgactggattgactgatattgcagacattattgatgaccttataattaaagacggagtttccagtgaagaacttggcttaacagaacaagctatgggcacctccagcaaatgatgtcttgcttgttaaatttctcagaattcagcattattctggcagacattcacaaagaactgacaaggaaagaagagagattcaagcctggatgaaaagaaaacgaaaagaaagaatggcaaagtacttaaatgagctggcagaaaagagagggcaagaacatgatcctttctgtcccagaagcaatccactttacatgacttcaagggaaataaggctgagacaaaagatgaagcatgaaaaagacagattgctgctctctgaacactatagtcgtcgaatctcacaagcgtacggtctgatgaatgaactgttatctgagtcagtacagctaccaactctaccacagaaaccattgcctaacaaacccagccctactcagtcttccagttgtcaacactgcccttctccaagaggagagaatcaacatggtcacagttttctaataaatcgacctggaaaagtcaaatatatgtccaaaccgagttatatccataagaggaagtcttttgggcaacctcaaggctcaccttggccacatggaactgccactttcaccatacagaaaaaagctggtggagccaaagcagcagtaagaaaggctacgcagtctccagttaccttccaaaaaggctctaatgctccgtgtcatagtctgcagcatacaaaaaaacatggaagtgctgggcttgcacctcaaaccaagcaggtgtgtgtagagtatgaaagagaggagactgtggtgagtccctggacgataccttcagaaatccataagattcttcatgagagtcacaattcccttctacaagacttgtctccaactgaagaggaagagccagagcatccttttggggtgggcggtgtggacagcgtgtctgagagcactggcagcatcctcagcaagctggactggaatgccatcgaagacatggtggccagcgtggaggaccagggcctgtctgtccactgggccctggacctgtaagacctggatatcattgggtttccatgcacaggccagcacctcagtaatgtggttctgaaagattaacaggtttaagggacagaagcaatgaaagaagcaatgtgaattttccatttgctttcatattattacctggattagccattaccagaggaaaaataaacatttctcagtaactttgcctttatggggaaagggttgactattgatgtattatatgtttttgtatttgatgcatcattaggcataatttttaaaatgataagtacctttcaagccaagtttgcataacctactttcaataaaaaccctctatcttgcctcctcctttattaccctctgagttttgagaaacaaccatatacagatgaatctaataggaaaaaaaaaaatcttttcattgagaagaaaatcagtctcacctgagaactcaattatgaaccctattttaaaacacctatgcagggtttagcctaggagtgaaaagaaaaaccaactaccttttaccaaccctgaatctctaaataagcaaagtttcatggaggccaggagatcttctgtcttctgccctgtagcctgaagccttggaggaagaaacaggaatggatgctttgggcaggaaag

SEQ ID NO: 119088 - DNA, 1487 bp, Homo sapiens
  Payload ID: 3337
  Gene Symbol: C5orf42
  Gene Name: chromosome 5 open reading frame 42
  ENST ID: ENST00000511824
  CDS Start-End: 1-1487
aaattcctaatcatgtgaacttggatcaatatgttggacaagaaaatttgacacctcaacaggactcttcagtgtttataaaaccagaaaaactatttgatgttaagccagggacccttgagatatctcctcaccattcctttggacttccgttactatacctgccacttaaacctcctaatatgtttccatcaacctcaagagcatctattacagttccctcaacacctatccaacctatagcagaagaaagaaaatacccaagattgtcattacttcattcacatttgtccccagaaaataggtgcaaaaaaacacaacttatcccacttgaaaacctcattgcgtttaaacaaagccaacagaaactaacacataatttatttgaacaaggtgatgctggacaccttcaacttctaaaggtcaaaatagaaccacctgaagtaagacaaggaaaggacagtaaaaaaaggcaaagaagaagagctgagaaagagctgcaagaaaaaagatgtgagaaactgaggagaaaaccaaatgtgacttttcgaccagagaattccataattaataatgatgattcagaaatcattaagaaacccaaggaacaacaagaacattgtggttcccatcctttggatgacttcgacgttccttttgaaatgctacaagatgataatacttcagctggattgcatttcatggcctctgtaaaaaagaaagctataggaagtcaagatgcaagtacaaatacagacccagaacatgagcctttgactgctcctcagctcttggtcccagatgtctatctaaatctgaagctttccagtgaaatgtcagagaaaccttggtcaccctcaatacctcatacagtaacaaacttggttggacatacttatataaatgtgattgacattgaagctaatgatcttctacaggaattacctgtgagagaagagccttcaaatgataatgttatcaaacagcaaagcgatcatctagcagttccatcgtctgcagagttacattatatggcagcttcagttactaatgctgttcccccacataattttaagagtcaagaatcagccaattcctctatggatttattttctaaacctgcagaagtaactccagcttgtctggatggaaaaagcttgagagcaggcattacagaagtgaaggagcctagtgtcacctcacctacaccatcagacatacagcagaacaaaggtctgccaaaaccagagttccgattcaaaggacagagcacaaagtcagactctgcagaagattatctattgtggaaacggctgcaaggtgtctctgcagcttgccctgcaccaagctctgcagctcaccaactagagcatctcagtgctaagcttcagaaaattgacgagcagttgctagcaatacagaacattgctgaaaacatagaacaggatttccccaagcctgaaatgctagatctacattgtgataag

SEQ ID NO: 119089 - DNA, 1238 bp, Homo sapiens
  Payload ID: 3338
  Gene Symbol: C5orf45
  Gene Name: chromosome 5 open reading frame 45
  Uniprot ID: Q6NTE8
  ENST ID: ENST00000292586
  CDS Start-End: 92-1123
agagggttcggagcgcgtgcgtggggcggggccgcggcgggacaaatgcagagcgcacgcgcttggctgcctggcgactgcacaagcagggatggcgtcgcttcagcgttctcgggtgctacgctgctgcagctgccgcctcttccaggcgcaccaggtaaaaaagagtgtcaagtggacatgcaaagcttgtggagagaagcagtcctttttgcaggcttatggtgaaggctctggtgctgattgtagacgccatgtccaaaagttaaatctactacagggacaagtttcagagctgccactcaggtctctagaagaaactgtcagtgccagtgaagaagaaaacgtgggacaccagcaggctgggaatgtgaagcagcaggaaaaatcgcagccctcagagagtcgctggctgaagtatctagaaaaggactcccaagaactggagctggaaggaacaggagtgtgtttcagcaaacagccttcatccaaaatggaggagccaggcccccgcttcagtcaagacctgcctagaaaaaggaagtggagcaggagcaccgtccagcctccgtgcagccgtggcgtgcaggactcgggtggctctgaggtcgcctggggaccccagaagggacaggctggcctgacatggaaggtgaaacaaggcagcagcccctgcctccaggagaactctgcagactgcagtgccggggagctgaggggtcctgggaaggagctatggagtcccatccagcaggttacagccacatcctctaaatgggcgcaatttgtcctgccacctagaaaaagttcacatgtggacagtgagcagccaaggtctcttcagagggaccccaggccagctggtccagcacaggctaagcaagggacccccagagcacaggcctcaagagaaggcctcagcaggcccactgccgctgtccagcttcctcgggccacacaccccgtcacatctgggtctgagaggccttgcgggaagacctcatgggacgcaaggactccctgggcagagggtgggcccctggtcctggaggcacagaatcctcgacccacacgactatgtgacctctttataactggggaagacttcgatgatgatgtgtgatctgggactggcaggttattaatcgagatacacttgttaggagggacagggttcccctaaggcacttttaaagatactctgtaagaaccattaacaataaacttactgtcaatca

SEQ ID NO: 119090 - DNA, 1004 bp, Homo sapiens
  Payload ID: 3338
  Gene Symbol: C5orf45
  Gene Name: chromosome 5 open reading frame 45
  Uniprot ID: Q6NTE8
  ENST ID: ENST00000376931
  CDS Start-End: 13-879
gcacaagcagggatggcgtcgcttcagcgttctcgggtgctacgctgctgcagctgccgcctcttccaggcgcaccaggtaaaaaagagtgtcaagtggacatgcaaagcttgtggagagaagcagtcctttttgcaggaaaaatcgcagccctcagagagtcgctggctgaagtatctagaaaaggactcccaagaactggagctggaaggaacaggagtgtgtttcagcaaacagccttcatccaaaatggaggagccaggcccccgcttcagtcaagacctgcctagaaaaaggaagtggagcaggagcaccgtccagcctccgtgcagccgtggcgtgcaggactcgggtggctctgaggtcgcctggggaccccagaagggacaggctggcctgacatggaaggtgaaacaaggcagcagcccctgcctccaggagaactctgcagactgcagtgccggggagctgaggggtcctgggaaggagctatggagtcccatccagcaggttacagccacatcctctaaatgggcgcaatttgtcctgccacctagaaaaagttcacatgtggacagtgagcagccaaggtctcttcagagggaccccaggccagctggtccagcacaggctaagcaagggacccccagagcacaggcctcaagagaaggcctcagcaggcccactgccgctgtccagcttcctcgggccacacaccccgtcacatctgggtctgagaggccttgcgggaagacctcatgggacgcaaggactccctgggcagagggtgggcccctggtcctggaggcacagaatcctcgacccacacgactatgtgacctctttataactggggaagacttcgatgatgatgtgtgatctgggactggcaggttattaatcgagatacacttgttaggagggacagggttcccctaaggcacttttaaagatactctgtaagaaccattaacaataaacttactgtcaatcatttctctcta

SEQ ID NO: 119091 - DNA, 902 bp, Homo sapiens
  Payload ID: 3338
  Gene Symbol: C5orf45
  Gene Name: chromosome 5 open reading frame 45
  ENST ID: ENST00000520698
  CDS Start-End: 2-526
gatggcgtcgcttcagcgttctcgggtgctacgctgctgcagctgccgcctcttccaggcgcaccaggtaaaaaagagtgtcaagtggacatgcaaagcttgtggagagaagcagtcctttttgcaggaaaaatcgcagccctcagagagtcgctggctgaagtatctagaaaaggactcccaagaactggagctggaaggaacaggagtgtgtttcagcaaacagccttcatccaaaatggaggagccaggcccccgcttcagtcaagacctgcctagaaaaaggaagtggagcaggagcaccgtccagcctccgtgcagccgtggcgtgcaggactcgggtggctctgaggtcgcctggggaccccagaagggacaggctggcctgacatggaaggtgaaacaaggcagcagcccctgcctccaggagaactctgcagactgcagtgccggggagctgaggggtcctgggaaggagctatggagtcccatccagcaggatggctacaaagagatcttattttaaaagcagctgatggtttggaaatgagagaactacagtggtgaagagaccaggaggcagctctcagtgaaaccaacattgcggatgcccttcgtgagccttctcagtcccagcaggaagcccacaacactggcctccccagcctgcctgctgacaacacctaggcttactttatctaaaatcagagtgtaccaggtctgtagcagaaaataatcaactaaatgtcagggacctatgagtcatttaaaacaaaagagaaagtgaaagccattaggcaagctatgtgctgggctgctaacgtagcccctgcagggaggggtcaggagcgcgctgcagtgagccttgggtctcgcaggcccagccctgctgcaaggagcca

SEQ ID NO: 119092 - DNA, 541 bp, Homo sapiens
  Payload ID: 3338
  Gene Symbol: C5orf45
  Gene Name: chromosome 5 open reading frame 45
  ENST ID: ENST00000522157
  CDS Start-End: 13-294
gcacaagcagggatggcgtcgcttcagcgttctcgggtgctacgctgctgcagctgccgcctcttccaggcgcaccaggtaaaaaagagtgtcaagtggacatgcaaagcttgtggagagaagcagtcctttttgcaggtgagtcctacaaaacagaaagcaagtggggcgcaggcctgcagcgagcccttccagggagtcccagcatgccacagctgggatcatcctctctcaaacagagttccccagacacggagctcctgcttccgagcttcctgttccttcaggaagtgaaatggatggagcagaatctggaaaggcttatggtgaaggctctggtgctgattgtagacgccatgtccaaaagttaaatctactacagggacaagtttcagagctgccactcaggtctctagaagaaactgtcagtgccagtgaagaagaaaacgtgggacaccagcaggctgggaatgtgaagcagcaggaaaaatcgcagccctcagagagtcgctggctgaagtatctagaaaaggactcccaa

SEQ ID NO: 119093 - DNA, 4145 bp, Homo sapiens
  Payload ID: 3338
  Gene Symbol: C5orf45
  Gene Name: chromosome 5 open reading frame 45
  ENST ID: ENST00000518219
  CDS Start-End: 13-591
gcacaagcagggatggcgtcgcttcagcgttctcgggtgctacgctgctgcagctgccgcctcttccaggcgcaccaggtaaaaaagagtgtcaagtggacatgcaaagcttgtggagagaagcagtcctttttgcaggcttatggtgaaggctctggtgctgattgtagacgccatgtccaaaagttaaatctactacagggacaagtttcagagctgccactcaggtctctagaagaaactgtcagtgccagtgaagaagaaaacgtgggacaccagcaggctgggaatgtgaagcagcaggaaaaatcgcagccctcagagagtcgctggctgaagtatctagaaaaggactcccaagaactggagctggaaggaacaggagtgtgtttcagcaaacagccttcatccaaaatggaggagccaggcccccgcttcagtcaagacctgcctagaaaaaggaagtggagcaggagcaccgtccagcctccgtgcagccgtggcgtgcaggactcgggtggctctgaggtcgcctggggaccccagaaggtcagtgacaaacagtttctctctggtcccagtgaccactgagcgtgtgtgtgataattctgtcttttgtcacagttgacgaagtgtgcgattcctacccgcagaaagcccatcttcccacccgggtttcttgtcttttctgtctgaagccaactccttcctcgggtctgtacccccttttccctcccatgcctctcgtctcccatgagggtaactcaggaccaaagagcattgtgacccttggagaaactgaggttggccagcaggtcaacctgacgatgggtcagggccatcgtctcattctgcgtggagcacggggacctttgtccgggcaggagtcgtcagcgggccgccctgaatcctgggagatgcttccctccacactcgcatttgccctgctgtggactcttgtatgtgaggcactcttcacttagggtgttgtcttgttcttttttgttttctgagacagggtctcactctgtctacccaggctggagtgcagtggcacagtcatagcctactgaagcctcaacctcccaggctcaagtgatcctcctgcctcagccgccaagtagctgggaccacagatgcacaccaccacactggctaatctttaaaaaatattttgtagaggccaggcgcagtggctcacacctgtaatctcagcactttgggaggccgaggtgggtggatcacttgaggtcaggagtctgagaccagcctggccaacatggtgaaaccccatctctactaaaaataattagctgggcgtggttgtgcacgcctataatcccagccactcgagaggctgaggcaggagaattgcttgaacctgagaggcataggttgcagtgagctgagattgcatcactgcgctccagcctgggcaacagaaaaaaaaaattttttagagacatggtctcactatgttgcccaggcttgtctcaaactcctgagctcaagcaatcttcccacttcccaaagtgctgggactataggtgtgggccactgcgcctggcccatttgtcttgttcttgaagcttccagtccagcaggccccaccgcatatccagtgctgcagagtgcagggtttgctctgcctgtcagaggagccagggcacagcaagggcactgcagttgggagtccactgggcgtcagtcactgcccccacccccacatcagccaaggtcggtctccgctggccttgcaccacgcacagagcactggctcatgccaagaagcagaattcaaactttgatgttgccgccaactagttttgtgatcctgggtaagtaagtggctttgaatctccaaatcctagaagaatgaccagagagtctgccacgggccagtccctgggctgcatgttgtaatggtatcattgtgtttcatgctccctcaagcctgttgctttgttttaaaggtgaggaactgaggcttgcagtttttgtgcagtcatggcaagttcagtggcaaagccaacgtcaagtttcagggccgcagagcctcttctgtactgcctgggtggcagtgctgcagggacccactctatcgctgctttcacattgcttttccctttgtaagcagcacaacccaactgttgttttttttttttttttgagtaggagtttcactcttgttcccctggctggagtgtaatggcacgatcttggctcactgcaacctccgcctcccaggttcaagcgattctcctgcctcagcctcctgagtagctgggattacaggcacccgccaccacgcctggctaatttttgtatttttagtagagacagggcttccccatgttggccaggctggtcttgaactcctgacctcaagtgatccacccgcctcggcctcccaaagtactgggattacaggcatgagccactgcacccagccttttgtttttgagatggggtgtcactctgtcacctaggctggagtgcaatggtacaatcacacctcatagcagcctccatctcccgggcttaagtgatcctcccgagcagctgggatcacaggcactcaccaccacagttggctaattttttgtagaagagggggtttcaccatgttgcccaaactggtgtcaaactcctgggctcaagcaatctgcctgcctcagcctcccaaagtgctgggattcaggcatgagccactgctcccagcctacaacccaactttcttttttttgagacagagttcgctctgttgcctaggctggagtggaatggcgtgatttcggctcactgcaacctctgcctcccaggttcaagtgattctcctgcctcagcctcccgagtagctgagattacaggcgcgtgccaccacgccaggttaatttttgtatttttagtagtgatagggtttcgccatgttggccaggttgatctcgaactcctggcctcaggtgatctacctgccttggcctcccaaagtgctgggattacaggcgtgagccactgcgcccggccgacacccaactttcagagcatctttggttcctggggtgagagaagccagaccccagcaccagtcctatcccacagggagctcggtgctgccacctctgcagctgcagaacccggcaggctctggagagctgccccccggtgggaggtagcagaatggagccagcgcacccctttcccgatgtctcgaggcccttctgctcaaaattcttttgtaggcaccggtaacctgattctaaggtccccaggagatggatcacctgatgacatgagaatgtcttgtttttggaaagcctggtcatgcaatttagcagaaggtttgcggtgaggtggaaggcatttatttgctttgtcttgctaaccctcaaaatcaaagcctgtcccagcctgacagcttccagcagaaagtgtcagaaccagaggcccagccaaggcccaggcagggcaggcggtcctcctgggccctggcattgttcttacacatggagggcatggccatcttctctttcagggacaggctggcctgacatggaaggtgaaacaaggcagcagcccctgcctccaggagaactctgcagactgcagtgccggggagctgaggggtcctgggaaggagctatggagtcccatccagcaggttacagccacatcctctaaatgggcgcaatttgtcctgccacctagaaaaagttcacatgtggacagtgagcagccaaggtctcttcagagggaccccaggccagctggtccagcacaggctaagcaagggacccccagagcacaggcctcaagagaaggcctcagcaggcccactgccgctgtccagcttcctcgggccacacaccccgtcacatctgggtctgagaggccttgcgggaagacctcatgggacgcaaggactccctgggcagagggtgggcccctggtcctggaggcacagaatcctcgacccacacgactatgtgacctctttataactggggaagacttcgatgatgatgtgtgatctgggactggcaggttattaatcgagatacacttgttaggagggacagggttcccctaaggcacttttaaagatactctgtaagaaccattaacaataaacttactgtcaatca

SEQ ID NO: 119094 - DNA, 535 bp, Homo sapiens
  Payload ID: 3338
  Gene Symbol: C5orf45
  Gene Name: chromosome 5 open reading frame 45
  ENST ID: ENST00000520995
  CDS Start-End: 44-301
cagagcgcacgcgcttggctgcctggcgactgcacaagcagggatggcgtcgcttcagcgttctcgggtgctacgctgctgcagctgccgcctcttccaggcgcaccaggtaaaaaagagtgtcaagtggacatgcaaagcttgtggagagaagcagtcctttttgcagagttccccagacacggagctcctgcttccgagcttcctgttccttcaggaagtgaaatggatggagcagaatctggaaaggcttatggtgaaggctctggtgctgattgtagacgccatgtccaaaagttaaatctactacagggacaagtttcagagctgccactcaggaaaaatcgcagccctcagagagtcgctggctgaagtatctagaaaaggactcccaagaactggagctggaaggaacaggagtgtgtttcagcaaacagccttcatccaaaatggaggagccaggcccccgcttcagtcaagacctgcctagaaaaaggaagtggagcaggagcaccgtccagcctccgtgcagccg

SEQ ID NO: 119095 - DNA, 1096 bp, Homo sapiens
  Payload ID: 3338
  Gene Symbol: C5orf45
  Gene Name: chromosome 5 open reading frame 45
  ENST ID: ENST00000523084
  CDS Start-End: 352-981
cgcacgcgcttggctgcctggcgactgcacaagcagggatggcgtcgcttcagcgttctcgggtgctacgctgctgcagctgccgcctcttccaggcgcaccaggtaaaaaagagtgtcaagtggacatgcaaagcttgtggagagaagcagtcctttttgcaggtctctagaagaaactgtcagtgccagtgaagaagaaaacgtgggacaccagcaggctgggaatgtgaagcagcaggaaaaatcgcagccctcagagagtcgctggctgaagtatctagaaaaggactcccaagaactggagctggaaggaacaggagtgtgtttcagcaaacagccttcatccaaaatggaggagccaggcccccgcttcagtcaagacctgcctagaaaaaggaagtggagcaggagcaccgtccagcctccgtgcagccgtggcgtgcaggactcgggtggctctgaggtcgcctggggaccccagaagggacaggctggcctgacatggaaggtgaaacaaggcagcagcccctgcctccaggagaactctgcagactgcagtgccggggagctgaggggtcctgggaaggagctatggagtcccatccagcaggttacagccacatcctctaaatgggcgcaatttgtcctgccacctagaaaaagttcacatgtggacagtgagcagccaaggtctcttcagagggaccccaggccagctggtccagcacaggctaagcaagggacccccagagcacaggcctcaagagaaggcctcagcaggcccactgccgctgtccagcttcctcgggccacacaccccgtcacatctgggtctgagaggccttgcgggaagacctcatgggacgcaaggactccctgggcagagggtgggcccctggtcctggaggcacagaatcctcgacccacacgactatgtgacctctttataactggggaagacttcgatgatgatgtgtgatctgggactggcaggttattaatcgagatacacttgttaggagggacagggttcccctaaggcacttttaaagatactctgtaagaaccattaacaataaacttactgtcaatca

SEQ ID NO: 119096 - DNA, 503 bp, Homo sapiens
  Payload ID: 3338
  Gene Symbol: C5orf45
  Gene Name: chromosome 5 open reading frame 45
  ENST ID: ENST00000523835
  CDS Start-End: 13-204
gcacaagcagggatggcgtcgcttcagcgttctcgggtgctacgctgctgcagctgccgcctcttccaggcgcaccaggtaaaaaagagtgtcaagtggacatgcaaagcttgtggagagaagcagtcctttttgcagactgttcagtcagattctctgctccaagtccatagaatctcattccaagccaactggaagagctgagtctcaattataaattcctaggagaagcaacctggttggcccaggctgactcggatgcccacctctggtccagtcaactgggattgggtctcagaagagaggggctggcttaccaggcttatggtgaaggctctggtgctgattgtagacgccatgtccaaaagttaaatctactacagggacaagtttcagagctgccactcaggtctctagaagaaactgtcagtgccagtgaagaagaaaacgtgggacaccagcaggctgggaatgtgaagcagcaggaaaaatcgcagccctca

SEQ ID NO: 119097 - DNA, 868 bp, Homo sapiens
  Payload ID: 3338
  Gene Symbol: C5orf45
  Gene Name: chromosome 5 open reading frame 45
  ENST ID: ENST00000521299
  CDS Start-End: 49-297
aaatgcagagcgcacgcgcttggctgcctggcgactgcacaagcagggatggcgtcgcttcagcgttctcgggtgctacgctgctgcagctgccgcctcttccaggcgcaccaggtaaaaaagagtgtcaagtggacatgcaaagcttgtggagagaagcagtcctttttgcaggcttatggtgaaggctctggtgctgattgtagacgccatgtccaaaagttaaatctactacagggacaagtttcagagctgccactcaggaaaaatcgcagccctcagagagtcgctggctgaagtatctagaaaaggactcccaagaactggagctggaaggaacaggagtgtgtttcagcaaacagccttcatccaaaatggaggagccaggcccccgcttcagtcaagacctgcctagaaaaaggaagtggagcaggagcaccgtccagcctccgtgcagccgtggcgtgcaggactcgggtggctctgaggtcgcctggggaccccagaagggacaggctggcctgacatggaaggtgaaacaaggcagcagcccctgcctccaggagaactctgcagactgcagtgccggggagctgaggggtcctgggaaggagctatggagtcccatccagcaggttacagccacatcctctaaatgggcgcaatttgtcctgccacctagaaaaagttcacatgtggacagtgagcagccaaggtctcttcagagggaccccaggccagctggtccagcacaggctaagcaagggacccccagagcacaggcctcaagagaaggcctcagcaggcccactgccgctgtccagcttcctcgggccacacaccccgtcacatctgggtctgagaggcc

SEQ ID NO: 119098 - DNA, 410 bp, Homo sapiens
  Payload ID: 3338
  Gene Symbol: C5orf45
  Gene Name: chromosome 5 open reading frame 45
  ENST ID: ENST00000521333
  CDS Start-End: 22-363
ctggcgactgcacaagcagggatggcgtcgcttcagcgttctcgggtgctacgctgctgcagctgccgcctcttccaggcgcaccaggtaaaaaagagtgtcaagtggacatgcaaagcttgtggagagaagcagtcctttttgcaggcttatggtgaaggctctggtgctgattgtagacgccatgtccaaaagttaaatctactacagggacaagtttcagagctgccactcaggtctctagaagaaactgtcagtgccagtgaagaagaaaacgtgggacaccagcagtgccggggagctgaggggtcctgggaaggagctatggagtcccatccagcaggttacagccacatcctctaaatgggcgcaatttgtcctgccacctagaaaaagttcacatgtggaca

SEQ ID NO: 119099 - DNA, 2879 bp, Homo sapiens
  Payload ID: 3338
  Gene Symbol: C5orf45
  Gene Name: chromosome 5 open reading frame 45
  ENST ID: ENST00000522663
  CDS Start-End: 65-322
ggggccgcggcgggacaaatgcagagcgcacgcgcttggctgcctggcgactgcacaagcagggatggcgtcgcttcagcgttctcgggtgctacgctgctgcagctgccgcctcttccaggcgcaccaggtaaaaaagagtgtcaagtggacatgcaaagcttgtggagagaagcagtcctttttgcagagttccccagacacggagctcctgcttccgagcttcctgttccttcaggaagtgaaatggatggagcagaatctggaaaggcttatggtgaaggctctggtgctgattgtagacgccatgtccaaaagttaaatctactacagggacaagtttcagagctgccactcaggtctctagaagaaactgtcagtgccagtgaagaagaaaacgtgggacaccagcaggctgggaatgtgaagcagcaggaaaaatcgcagccctcagagagtcgctggctgaagtatctagaaaaggactcccaagaactggagctggaaggaacaggagtgtgtttcagcaaacagccttcatccaaaatggaggagccaggcccccgcttcagtcaagacctgcctagaaaaaggaagtggagcaggagcaccgtccagcctccgtgcagccgtggcgtgcaggactcgggtggctctgaggtcgcctggggaccccagaagggacaggctggcctgacatggaaggtgaaacaaggcagcagcccctgcctccaggagaactctgcagactgcagtgccggggagctgaggggtcctgggaaggagctatggagtcccatccagcaggatggctacaaagagatcttattttaaaagcagctgatggtttggaaatgagagaactacagtggtgaagagaccaggaggcagctctcagtgaaaccaacattgcggatgcccttcgtgagccttctcagtcccagcaggaagcccacaacactggcctccccagcctgcctgctgacaacacctaggcttactttatctaaaatcagagtgtaccaggtctgtagcagaaaataatcaactaaatgtcagggacctatgagtcatttaaaacaaaagagaaagtgaaagccattaggcaagctatgtgctgggctgctaacgtagcccctgcagggaggggtcaggagcgcgctgcagtgagccttgggtctcgcaggcccagccctgctgcaaggagccagggcacccaggaaacatcagcacacacacacacagggaccctcccttcatgtcacttgttttgctgccctaaatggcttcttgcaccctaacccctgatcctggaagaaggcagagaaactggcccgtacagagacctgcaattctacgcaagcttaacacaactatgagacagaagaggggcacgcagaagaggtgggcaaaagtggtcacaacggcgggggatgctttgaatactggatggtgtccagagccgctccgatgtcatagttcttggtctgcaggagcctggtgagccagccgccttcatcagagaagcccatggacagcatctgggagagggactcaatcagccgcgggtcagcctctgccgaaacagtaaggaagccatgaggagtggtgctgagccctgtgagtgacccgaaacacataccctgctgccttggccagccaggaccagggtctgccagtgtccgagcctgcccagagctctcgtcctcacaggccacagtggacctgctttccctgtaaagggccaagcagtctttttcacactgctcaactctgccactgcgacaccaggcagccaggtggtgtgtaagcagaaccatcaatggacactgaaataggcatttcacctgtcacatcttttgattttaaaatgtaagaacaggccagttagccaattattacactcctccatgcaagagatgatggggcattgaaatagattgaagatggagagagatgaatggatacaagatacattttggaggtagaatgaacaggacttggaaatgtatgtggagaaggcaaaggagttaaagatgatatctggagcagcacaactcacaattgcaaagatgtggaaccaacctaactgcccatcaagcaatgagtggataaagaaaatgtggtatatatacaccatggaatactactcagccacaaaaaggaacgaaataataccttttgcagcaacttggacggagctggaggccattatcctaagtaaagtaattcaggaatggataccaaatatcatatgttctcacttatgagtagatgctaagctatgatgatgcaaagacataagaatgatatagctttccctctccctctttctccacggtctccctctgatgccgagccaaagctggactgtactgctgccatctcggctcactgcaacctccctgcctgattctcttgcctcagcctgccgagtgcctgcgattgcaggtgcgcgccgccacgactgactggttttcgtgtttttttggtggagacggggtttcgctgtgttggccgggctggtctccagctcctaaccacgagtgatccgccagcctcggcctcccgaggtgccgggattgcagacggagtctggttcactcagtgctcaatggtgcccaggctggagtgcagtggcgtgatctcggctcgctacaacctccacctcccagctgcctgccttagcctcccaaagtgccgagattgcagcctctgcccggccgccaccccgtctgggaagtgaggagcgtctctgcctggccgcccatcgtctggaatgtgaggagcccctctgcctggctgcccagtctggaaagtgaggagcgtctctgcccggccacccatcgtctgagatgtggggagcgcctctgccccgc

SEQ ID NO: 119100 - DNA, 579 bp, Homo sapiens
  Payload ID: 3338
  Gene Symbol: C5orf45
  Gene Name: chromosome 5 open reading frame 45
  ENST ID: ENST00000519213
  CDS Start-End: 49-333
aaatgcagagcgcacgcgcttggctgcctggcgactgcacaagcagggatggcgtcgcttcagcgttctcgggtgctacgctgctgcagctgccgcctcttccaggcgcaccaggtaaaaaagagtgtcaagtggacatgcaaagcttgtggagagaagcagtcctttttgcagagttccccagacacggagctcctgcttccgagcttcctgttccttcaggaagtgaaatggatggagcagaatctggaaagactgttcagtcagattctctgctccaagtccatagaatctcattccaagccaactggaagagctgagtctcaattataaattcctaggagaagcaacctggttggcccaggctgactcggatgcccacctctggtccagtcaactgggattgggtctcagaagagaggggctggcttaccaggcttatggtgaaggctctggtgctgattgtagacgccatgtccaaaagttaaatctactacagggacaagtttcagagctgccactcaggtctctagaagaaactgtcagtgccagtgaagaagaaaacgtgggacaccagca

SEQ ID NO: 119101 - DNA, 1244 bp, Homo sapiens
  Payload ID: 3338
  Gene Symbol: C5orf45
  Gene Name: chromosome 5 open reading frame 45
  ENST ID: ENST00000518235
  CDS Start-End: 11-700
acaagcagggatggcgtcgcttcagcgttctcgggtgctacgctgctgcagctgccgcctcttccaggcgcaccaggtaaaaaagagtgtcaagtggacatgcaaagcttgtggagagaagcagtcctttttgcaggcttatggtgaaggctctggtgctgattgtagacgccatgtccaaaagttaaatctactacagggacaagtttcagagctgccactcaggtctctagaagaaactgtcagtgccagtgaagaagaaaacgtgggacaccagcaggctgggaatgtgaagcagcaggaaaaatcgcagccctcagagagtcgctggctgaagtatctagaaaaggactcccaagaactggagctggaaggaacaggagtgtgtttcagcaaacagccttcatccaaaatggaggagccaggcccccgcttcagtcaagacctgcctagaaaaaggaagtggagcaggagcaccgtccagcctccgtgcagccgtggcgtgcaggactcgggtggctctgaggtcgcctggggaccccagaagggacaggctggcctgacatggaaggtgaaacaaggcagcagcccctgcctccaggagaactctgcagactgcagtgccggggagctgaggggtcctgggaaggagctatggagtcccatccagcaggatggctacaaagagatcttattttaaaagcagctgatggtttggaaatgagagaactacagtggtgaagagaccaggaggcagctctcagtgaaaccaacattgcggatgcccttcgtgagccttctcagtcccagcaggaagcccacaacactggcctccccagcctgcctgctgacaacacctaggcttactttatctaaaatcagagtgtaccaggtctgtagcagaaaataatcaactaaatgtcagggacctatgagtcatttaaaacaaaagagaaagtgaaagccattaggcaagctatgtgctgggctgctaacgtagcccctgcagggaggggtcaggagcgcgctgcagtgagccttgggtctcgcaggcccagccctgctgcaaggagccagggcacccaggaaacatcagcacacacacacacagggaccctcccttcatgtcacttgttttgctgccctaaatggcttcttgcaccctaacccctgatcctggaagaaggcagagaaactggcccgtacagagacctgcaattctacgcaagcttaacacaactatg

SEQ ID NO: 119102 - DNA, 556 bp, Homo sapiens
  Payload ID: 3338
  Gene Symbol: C5orf45
  Gene Name: chromosome 5 open reading frame 45
  ENST ID: ENST00000524068
  CDS Start-End: 14-286
tgcacaagcagggatggcgtcgcttcagcgttctcgggtgctacgctgctgcagctgccgcctcttccaggcgcaccaggtaaaaaagagtgtcaagtggacatgcaaagcttgtggagagaagcagtcctttttgcaggagaagcaacctggttggcccaggctgactcggatgcccacctctggtccagtcaactgggattgggtctcagaagagaggggctggcttaccaggcttatggtgaaggctctggtgctgattgtagacgccatgtccaaaagttaaatctactacagggacaagtttcagagctgccactcaggtctctagaagaaactgtcagtgccagtgaagaagaaaacgtgggacaccagcaggctgggaatgtgaagcagcaggaaaaatcgcagccctcagagagtcgctggctgaagtatctagaaaaggactcccaagaactggagctggaaggaacaggagtgtgtttcagcaaacagccttcatccaaaatggaggagccaggcccccgcttcagtcaagacctgcctagaaaaa

SEQ ID NO: 119103 - DNA, 662 bp, Homo sapiens
  Payload ID: 3338
  Gene Symbol: C5orf45
  Gene Name: chromosome 5 open reading frame 45
  ENST ID: ENST00000519208
  CDS Start-End: 43-291
agagcgcacgcgcttggctgcctggcgactgcacaagcagggatggcgtcgcttcagcgttctcgggtgctacgctgctgcagctgccgcctcttccaggcgcaccaggtaaaaaagagtgtcaagtggacatgcaaagcttgtggagagaagcagtcctttttgcaggcttatggtgaaggctctggtgctgattgtagacgccatgtccaaaagttaaatctactacagggacaagtttcagagctgccactcaggaaaaatcgcagccctcagagagtcgctggctgaagtatctagaaaaggactcccaagaactggagctggaaggaacaggagtgtgtttcagcaaacagccttcatccaaaatggaggagccaggcccccgcttcagtcaagacctgcctagaaaaaggaagtggagcaggagcaccgtccagcctccgtgcagccgtggcgtgcaggactcgggtggctctgaggtcgcctggggaccccagaaggtcagtgacaaacagtttctctctggtcccagtgaccactgagcgtgtgtgtgataattctgtcttttgtcacagttgacgaagtgtgcgattcctacccgcagaaagcccatcttcccacccgggtttcttgtcttttctgtctgaagccaactcctt

SEQ ID NO: 119104 - DNA, 559 bp, Homo sapiens
  Payload ID: 3338
  Gene Symbol: C5orf45
  Gene Name: chromosome 5 open reading frame 45
  ENST ID: ENST00000523737
  CDS Start-End: 49-204
aaatgcagagcgcacgcgcttggctgcctggcgactgcacaagcagggatggcgtcgcttcagcgttctcgggtgctacgctgctgcagctgccgcctcttccaggcgcaccaggtaaaaaagagtgtcaagtggacatgcaaagcttgtggagagaagcagtcctttttgcaggtctctagaagaaactgtcagtgccagtgaagaagaaaacgtgggacaccagcaggctgggaatgtgaagcagcaggaaaaatcgcagccctcagagagtcgctggctgaagtatctagaaaaggactcccaagaactggagctggaaggaacaggagtgtgtttcagcaaacagccttcatccaaaatggaggagccaggcccccgcttcagtcaagacctgcctagaaaaaggaagtggagcaggagcaccgtccagcctccgtgcagccgtggcgtgcaggactcgggtggctctgaggtcgcctggggaccccagaaggtcagtgacaaacagtttctctctggtcccagtgaccactgagcgtgtgtgtgataattctgt

SEQ ID NO: 119105 - DNA, 810 bp, Homo sapiens
  Payload ID: 3338
  Gene Symbol: C5orf45
  Gene Name: chromosome 5 open reading frame 45
  ENST ID: ENST00000610475
  CDS Start-End: 220-696
aaaggactcccaagaactggagctggaaggaacaggagtgtgtttcagcaaacagccttcatccaaaatggaggagccaggcccccgcttcagtcaagacctgcctagaaaaaggaagtggagcaggagcaccgtccagcctccgtgcagccgtggcgtgcaggactcgggtggctctgaggtcgcctggggaccccagaagggacaggctggcctgacatggaaggtgaaacaggcagcagcccctgcctccaggagaactctgcagactgcagtgccggggagctgaggggtcctgggaaggagctatggagtcccatccagcaggttacagccacatcctctaaatgggcgcaatttgtcctgccacctagaaaaagttcacatgtggacagtgagcagccaaggtctcttcagagggaccccaggccagctggtccagcacaggctaagcaagggacccccagagcacaggcctcaagagaaggcctcagcaggcccactgccgctgtccagcttcctcgggccacacaccccgtcacatctgggtctgagaggccttgcgggaagacctcatgggacgcaaggactccctgggcagagggtgggcccctggtcctggaggcacagaatcctcgacccacacgactatgtgacctctttataactggggaagacttcgatgatgatgtgtgatctgggactggcaggttattaatcgagatacacttgttaggagggacagggttcccctaaggcacttttaaagatactctgtaagaaccattaacaataaacttactgtcaatc

SEQ ID NO: 119106 - DNA, 506 bp, Homo sapiens
  Payload ID: 3339
  Gene Symbol: C5orf46
  Gene Name: chromosome 5 open reading frame 46
  Uniprot ID: Q6UWT4
  ENST ID: ENST00000318315
  CDS Start-End: 2-265
aatggctgtctcagtacttcgcctgacagttgtcctgggactgcttgtcttattcctgacctgctatgcagacgacaaaccagacaagccagacgacaagccagacgactcgggcaaagacccaaagccagacttccccaaattcctaagcctcctgggcacagagatcattgagaatgcagtcgagttcatcctccgctccatgtccaggagcacaggatttatggaatttgatgataatgaaggaaaacattcatcaaagtgacatcctcaggacacacccatgtggctcctggacaatccaagagcagccaaatcctgcttttccagtttggctccacaagtcctccaggacagagccctcaaagcaactcccaacgagttctcaggattcaggctctggcttcaaccaaacagaactcattttgaacaccctgactgcatttttgcttttagaaagttagaataaatatggcgctttgggatcacatagttgatggagagga

SEQ ID NO: 119107 - DNA, 573 bp, Homo sapiens
  Payload ID: 3339
  Gene Symbol: C5orf46
  Gene Name: chromosome 5 open reading frame 46
  Uniprot ID: Q6UWT4
  ENST ID: ENST00000515291
  CDS Start-End: 38-256
gaacaatttatctgcacgaataccccgtgctaccagaatggctgtctcagtacttcgcctgacagttgtcctgggactgcttgtcttattcctgacctgctatgcagacgacaaaccagacaagccagacgacaagccagacgactcgggcaaagacccaaagccagacttccccaaattcctaagcctcctgggcacagagatcattgagaatgcagtcgagttcatcctccgctccatgtccaggagcacgtaagcactgagaaaaacgttgctttttgtccaattctctgttgataatgaccacacaatgacctcatggcattaaaatacatgagaaacaaaatttgtggcataagtaaatgtgttatttttcattgaaaaatgttgccctacttaaaatatattttgcatctgaatcaactgccctgagctttttgggggaaaggacattcccatcaagtggttccatacaggatttttttttttttttctttttaatctcaggagcaaatagggaggaggaagaacactagactaaggaacaaaaagccaagttctgatcctaactca

SEQ ID NO: 119108 - DNA, 2522 bp, Homo sapiens
  Payload ID: 3340
  Gene Symbol: C5orf47
  Gene Name: chromosome 5 open reading frame 47
  Uniprot ID: Q569G3
  ENST ID: ENST00000340147
  CDS Start-End: 106-636
ggtctggccctaaccgctcccgcatccctcgcctgcacagtgggcagtctggcgcctgtggcgtcgtgtttgctgagggcccggctgccgttgactgaggctgcgatggcggcggcaggccggggtcgggagcaggactcggcgcgcttcgtctatgtgacgcgcttcggctcgcatcagtgcagtggcgtcctgcaactgggcggccgtggagctcaaggcctttggggtcaggggcctggggcaggctgtcgccaggagaagccgagggaagcaatggcggtggcgggcgttcagggtggcagcgagctgcccctcggttcccagctcagggtccccacgacccctggtgtggaggctgcggcctctgcctcctcccagctgcgggcatcgagagttcagagcggcaccagacagtcggcgcgtgcaggtttaatccagaaggatgcagctaaaaagtatgattttcccataccattgaatgaagcttccaaaataatgaagaaaaagaaaaaggttttagtatggaatagagtatacaaagtcatttcaagaatgcttgaagaaaatgaaaaatatagacacaggctgaaatgccaaaggttatctagtgaaagctcaaattacacaagatgaatcttcttatcttctggaataacctatctttggatgtttcccaaagaagagtatgaagaatctaaagatgaaacattaaatgaatcataattatttgttaattttgatgtgttttattagaattgggactttagtagtcgaacagaaaaattaccttctttataaattaataatatttctttgctacttaataatacctttagttaaatattgttaaccatatgcatgcaagtgttattttcagaattaatgcttattctacatacttttaaattaacctcatacataaaattaaattagcatatcaatgcaattgcatgaattttataattaccagcttttccattttattaatgagtctacaactgctgctttgttcatctcttcttttagatgtaactcttaaattaaacttggattcatttaaattatttttggcttcctctaaacttctcaattattttatggaaaaaaccttagaatttacatagcaacgattattttgggtgttaaaactaagctaatgattatttaagccatcttttcatcctaaggaaaattagtaaatgtatgcatttataatatggatatattataatggactatattataatatggagtattttaggaaaatttttgggcaaagatcagaggagatgccctttaccttgccaggcccctaagtaatacattatttttaagtcaatgaatgagaggattagaattctgaaaatcatttagaagtattgtttaataagtcctttttttctactcaacattaagtagtaatcaacttttacctccgccagtttttctgcttttttgctggtacgatctctctttctaaattgaatcaaagacctaggtggaactggaaacttaggagggaaagacaaaatgaggcttgttcatgatcaaattctgtgtactctagttgcttctttcccttggagtgacaggtacttttatatccaggatgattacagtgatgacatccattcttttttgggggcattgagaaggtgggcttcctaattattttacaaaggtattacaaagtgttaatatacaaaattctcatgaaatagtacaagttgtaaggactgtaaagtaattcatagttttgttttttcctctaatagttgtaacttaattacttcaggagactacgacagtgtagaatttgtggtaacatgatcttctagtgactatttatcaaatccacctgtttctagatgaaggacacattgcctggggaaatggcctcggtttttttgccatgtaggctctcaagtttccctgcattgagggtcacacaacttctttatattatgctgggtaaatttcaggctgctaaatccttgggtgaagcttcaaattttagcttatgcaactgaagtccattgcaaaatgagacatatttacactgtttatactgtaatttatgctgcataaagttttgtagtgaatgtgtatgagagttttaggtttgcttcaatgtatgtttatatttatgtgacttatacaacttgacatagtagtctgttttaatttattaggtatatcaatatttgttagatttaaaataagagtctaatgctggatacaaactcagtttatttcactgttctagaaccatggaggaatgaagactcccactgaaatgaatgttctaaatatttgttctaaatcttttaatttttgtttaataatttctggtgaatatgtgttcaatctgttatgttaaatagaatataataaacataagacttttctttactgatacatcactgaacataagctgcaatactttaacttatttctgttccataatttcagtaggggctaatgacccacccctgctacattaaagacttcagactgca

SEQ ID NO: 119109 - DNA, 2385 bp, Homo sapiens
  Payload ID: 3341
  Gene Symbol: C5orf49
  Gene Name: chromosome 5 open reading frame 49
  Uniprot ID: A4QMS7
  ENST ID: ENST00000399810
  CDS Start-End: 470-913
ctttcatgtgtcttctccagactgtaagcttcctgtggacaaggcctgctccgttcaaggctcaatctccagctcctgacacaccatgcgctaggtgctcagtcactaatggtctcgcgaaggagtgatcagtgagtgaagcaggggctgctgcatgggaaaggtgagcgggctggaaatgggtagtccccgcggcgtctcccagtcgggctcctcccgaggaggaaggaaggagagaccccaggtgtagtcgaggggccgggagggaggaggggagggtcgctccaccctggagcgggaatgctgcagggcagctccgggtcgccaggcggcggtttccaggcaacgaccgaacacagacgcgggctagacgctggcgctgagcaacctgaggcctgcagactccgactgggcccctgggcgggcgggacggaccgcggccaaggcgggggcgctggacggtggcggcatggaggacgacgaggaggagaccaccgcgtccacgctgcggggcaagcccaggccgccgcccgtctcggcgcagtccgccttcagctacatcccgccgcggcgcctggaccccaaagagcacagctactactaccgcccggcgcggacaggaattatttccctctatgattgtatttttaagaggcgcctagattatgatcagaagttgcaccgagatgacagagaacatgcaaaaagcctgggacttcatgttaacgaagaggaacaggagaggccggttggagtgctgacgtcttctgtctatgggaagcgcatcaatcagcccattgagcccctaaaccgggactttggccgtgccaaccatgtgcaggctgacttctacaggaagaacgacatccccagcctcaaggaacccggctttgggcacattgctccatcctgaagcatccccgtggcccacagggcatgtccgataccctgtggcctggcaagtttgcacagcgagaaggtggcatctggagcctcctttccccttctcatgacgcctaggagcttggctatgcctgtgttgcatctctacagtgggacacatgaacacgttagcagcccccctcaggttgctgggttaggagcctgaccaacaacacctttagtacatgtgaagagtctctgatgtgatgattttcagctggaattatttttgatcaaatgaatctggagaccgattcattgtgagcacctgaataaaatgaaaactttgtttccccttggtaactgttgggttggtttctgttcactggctctctacatttgccaggattctttggggaggcagtcacaggagtgaggtgcagttgcttttcccacgagttaggggaactcctgctgcctgaacacaaacaaccctgacatgttcccttctccaagaggagatgtgatgacaattgtcttttggcacaattgaactctagaaactccatttttgtttttccagaggtctgaatcccaaataacagaattttgtgcagtagggaccaggagccctagtaaggatgggtggccctggtggccagcaatgctcactattactgctcagagagagggggccagtcatgggaagaggctagatttcggtgttcaacaaacttgggtaaaattctggttgctgcattttctagatttgtgttctagggcaagtcatatcatctacatgagcagacatttcctcatatttaaagtggaatttccaaacctagaggagttcatgcgggaggcaatgagctgctggagcacaggcataacacaggtacccagtgtgtgccccacccagtgccccgtcatcacagcaatgacttgactttaaacagtcttctttttggaagcagtcgcttgtaacctaagttggaaatacttactttggagataatttgaaacttacccaagtattaaagtatcatcagctacatttttaatgaatggatcccttggaagaaatcatctctcatctaccatgattaaatttcccacagtttagcagtgaatgggcaggtggcctaattaatttcaatactgatcgctccatcactggttttattgttttgaatatggaaaaaggattctctaaaaataaatgacactgaattccggcaatttcaaggctgagtgactcctaagtatttctttatttttttgaaaacagtttttcagtgtaggtgtcttttatttatttcaaacaaatggcagtagtttatttcgaatgcctttgggtgcattataccatatttatagtaacataatagaaaatatataaagtttgggttatagaaatatttataaattattcattattcagacttgatttcaacaaagacaaggcatctgtaagtgactgtaataaatcaaagtcaaactaaa

SEQ ID NO: 119110 - DNA, 1020 bp, Homo sapiens
  Payload ID: 3341
  Gene Symbol: C5orf49
  Gene Name: chromosome 5 open reading frame 49
  ENST ID: ENST00000509627
  CDS Start-End: 131-568
caggcaacgaccgaacacagacgcgggctagacgctggcgctgagcaacctgaggcctgcagactccgactgggcccctgggcgggcgggacggaccgcggccaaggcgggggcgctggacggtggcggcatggaggacgacgaggaggagaccaccgcgtccacgctgcggggcaagcccaggccgccgcccgtctcggcgcagtccgccttcagctacatcccgccgcggcgcctggaccccaaagagcacagctactactaccgcccggcgcggacaggaattatttccctctatgattgtatttttaagaggcgcctagattatgatcagaagttgcaccgagatgacagagaacatgcaaaaagcctgggacttcatgttaacgaagaggagaggccggttggagtgctgacgtcttctgtctatgggaagcgcatcaatcagcccattgagcccctaaaccgggactttggccgtgccaaccatgtgcaggctgacttctacaggaagaacgacatccccagcctcaaggaacccggctttgggcacattgctccatcctgaagcatccccgtggcccacagggcatgtccgataccctgtggcctggcaagtttgcacagcgagaaggtggcatctggagcctcctttccccttctcatgacgcctaggagcttggctatgcctgtgttgcatctctacagtgggacacatgaacacgttagcagcccccctcaggttgctgggttaggagcctgaccaacaacacctttagtacatgtgaagagtctctgatgtgatgattttcagctggaattatttttgatcaaatgaatctggagaccgattcattgtgagcacctgaataaaatgaaaactttgtttccccttggtaactgttgggttggtttctgttcactggctctctacatttgccaggattctttggggaggcagtcacaggagtgaggtgcagttgcttttcccacgagttaggggaactcctgctgcctgaa

SEQ ID NO: 119111 - DNA, 5241 bp, Homo sapiens
  Payload ID: 3342
  Gene Symbol: C5orf51
  Gene Name: chromosome 5 open reading frame 51
  Uniprot ID: A6NDU8
  ENST ID: ENST00000381647
  CDS Start-End: 20-904
gcacccgccgattgtggccatggcggccgcagtctctagtgtggtgagacgagtggaagagctcggggatctggctcaggcccacatacagcaacttagcgaagctgccggtgaagatgatcactttttaattcgggcctctgcagcattagaaaaattgaaactcctgtgtggagaagagaaagaatgttcaaatccatcaaatcttctagaactttacacacaggctattttggacatgacatattttgaggagaacaagctagtagatgaagattttcctgaagactcttcttcacagaaagtaaaagagctgattagttttctttcagaaccagaaattttagtaaaggaaaataatatgcatccaaaacactgcaatttgcttggggatgagctactggaatgtctctcttggagacgaggagccctgctgtatatgtattgtcattctcttaccaaaagaagagagtggctcttaagaaaatccagtttgcttaaaaagtaccttcttgatggaatcagttacttgctacagatgctaaattatcgatgtcctatccagttaaatgaaggagtttctttccaagatctagacacagctaaattactgagtgcaggaatatttagtgacattcatctgctggctatgatgtacagtggagaaatgtgttactggggatcgaagtattgtgctgatcagcaaccagaaaatcatgaagtggatactagtgtgtctggagcgggctgcactacatacaaggaacccttggatttccgagaagtaggagaaaaaatcttgaaaaagtatgtatctgtgtgtgaaggacccctgaaagaacaagaatggaatacaacgaatgcaaaacaaattttaaacttctttcatcatcgctgtaactagtaagttcatctagtccttttcaaatagaaaaacaacaaaacccatgaaatggaaaagagagttccaaaaaagaagacctgttgatactgaatatgagaacattacactgcataaagatatccagcttgggtaccctactaaaacaacatcaccatctttttcattatatattagtaaacctatgaagggatgattctttaatttctaaagtgttgttcaaactcaccttaaaatacagatgttatgtcactaataatgagtagtaacccaatttagctttacaaagattttttctattactttttttttttattgtggtatatgtaacacaagtttaccatttttatcatctttagattatttttaaatctcactaccttgaagtttgccatgcttcagaaattaaagtcaagttacttcactgctttgaatacatactatggatataaatgtaggcaaaatgaaagattatgactaatattcagattccattttcaataaggtaaataatgaaagatctcacaaaggaatcattgtgtttaattattttgccatgtattactaattgtatttaaaatttctacttcccttaggcattttataaaaatttaaaaattatttttctattttgtttaaaagacaatgcatggcttttcaagtgagtaatgaagataaaaaccaagctaggttagtctaccattagttcatatgtttttgtagcacatcttttcataacatactgaaattttaatgttttttgcctttaataataggggtgagtgttaaaggccagagagcctaacttgatatcttgctcatggtctttctgtctacctcaactcctgttgtcatctttggatgatctttctgataccttgctgataccttggacttctgcccagtgactttattacattccagcagcttactcccgtggccgcactttgaatgtcaccaccttgagtttctctttctggtaaaatttcagtaactgataactgccctcttttcagttttttcacttccttattttattgacttttctctcctttatgctcattccacattcttcagttccttcttacccccttttcttgactgctccccttcctcctaaactgtcagcccctttcaggctttcttccctatccaccctcagctttatgggatactatatgaactaatctcaccagttattcttctttccctggtcttttagtctagtcctttggcaagccctcaacctcagattaatcctatttattatctaccttttcggggatgctgagttctttgtgatgggtagtccttcaaagtagaatcactacaagtgtctcacttcagccttagaaaagccctcaatgtaaaccttatgtttgttactagggtggcctctctcccatttcccgctgtggctgagccaaacttcattactttccttaggccctctgcccctcccctagcatatggctctttctcctattgaacagaaaattgagactatgaagaggtcaacttgtatttaccaactttactcattttcccattttagaggaaaagaggttgcctgcttcctatcaaaggcgactctgtgctacatgttggtttcatcttcgctgtctctctcatttccccacaaagtgttgtctcactttctgcctaccttttaggtattgatcttcactatatttttttctctctctctcttttttttttttactttacatattttatacaatgtcattcataactatggcttcttttaccacctgtaataacagactgagtctcaaacctgtaacttgtatcctgacttatctcttgctttctaaaccttgtttctaactgtctatcaaatatcttcattagacatcccacagtaattttaagctcagtgtttccaaacgtcaagtcctcatctgttatataaaatcctttctgctttgtaagttttctctttttgggattttccgcagatcagggcaacacagaatgactaccttcccagccatgtctctgcagtcatcctgtgtaatcatgttctagtccagtgttgctcaaacagttaaaatccaggctgcttttggtaaacatacaaattctgatatagagcctctgtggcaaagggaatttctcagttcctgccccagcccccttgtttatcattacacagctaagatttttatttaacttagcattttagcaagttttcttatgaaaatacctttgtgctttctaagtataaagatttaaattatttttaatacggtttttagaaccacagactatccctctttttagagcatcctgatcaattgcaagtacttccacttcttccctaaatgcgctttgtgtgttttccacctcagtagccttgcacacatcattacttctgcatccttctttgtgaccaagtgaatacctacctacctcttaggactcagcttcagtgattctgttttcataggctttttaaagcccttttcagtcaaattagatgctcctttgttctggtcctttactcttcccctcccatgttgtcgcactgatcacactgctttgtaattattttctttattgttggtaaactccatattttaaaaatttacctgtatacatagtgcttaatgcatggtaggcccttagtaatgtttttgaattaatgaggcatgattctaaatgccaaactttgcacaaaaagttgttgctattggattccaaactgctatgccctctataccagtggctgacaaggcatatagggatatatgccatcctgagaggagtaaagtgtttagattctgaacctgagaaaagagaactttctcttaagaagttggaaacttcattttaccttcgtgaccctggtagaccacttggtctcactggttggtacaattatgagggtagtactgggtgctttttatacaactttccatcccccacacagttggagaataatttgtagaccatggcagttaaaatgctttttactctggtgtattatagaataatgaacacatttttatatatgttaaagcctgctaaatcattcacttagaatgaagtaacctcaaggtaccaaataccccacataaggaaagtactacactaaattcactcaactattgtatgcctaccatatgccagattttatcctagaccctgaggatatagctttttaaaaccccctcctgtttcagagcttatattctagtggaggaagttagacaagcattttaagtaataaatgtatagagagtgtcaagtgatgagtaccatgaagaagaataaatgagggtaaggggctagtgtgatagggagaggggtgggatgccatcatatttaggggtggttgggaactgtctactgctttagcatttgtgtcttcaaatttctctcctttggttatataccttgcgtattccgcacattgataaagtttctttcttacagaagttctgatattgaattaaggaatgggtcactacttaagactttatcatttcagctacacataaaaggtttctctcccctatggattttgctaatggttgagtgatacctaaaggccttgttgcattttttacacttggggtttctcttcggtttgaattctctcatggttaccaaaactctgttaaaggacttttcacagtcgttaaatgtgtatggctctttcccaatatgaatttttttgatgttaactaggcttttagacttagttaaagacctgtgtgctctgctgcatttatagggttttgggctgctgagaataattgatgctgattaaggtgcaaatcatgactaaagacttttctttcttcttttgcatatagtagagtgaggtgagggtcgtggctaaaaccccacaataactttacattcctagctttacagtcttgctgtgaattctctggtgttcattaaagtgtgagctgtgttaaaaggcattcttagattcattttaaccacatttttaaaaactcacagttggttaacatgatggtttcagattgcttgcctcttttctctttctaccttacagggctccttttctagcttaaataagggtactccatctgccacagaatccaggattctatagttttttagtttcacttccctatgttctttttttttttttaatttttaacaatgagatgataccatgttacagcggtattacattaagatacatttaatatagccacaattaaagtatgtattatgtatttatgctggtgttctttcatgttatttcttctagtgaaaatttccaagtaaactgttattgagcatatacatttttaaaaaaataaaaccatacaccccta

SEQ ID NO: 119112 - DNA, 1391 bp, Homo sapiens
  Payload ID: 3342
  Gene Symbol: C5orf51
  Gene Name: chromosome 5 open reading frame 51
  ENST ID: ENST00000612065
  CDS Start-End: 1-459
atggcggccgcagtctctagtgtggtgagacgagtggaagagctcggggatctggctcaggcccacatacagcaacttagcgaagctgccggtgaagatgatcactttttaattcgggcctctgcagcattagaaaaattgaaactcctgtgtggagaagagaaagaatgttcaaatccatcaaatcttctagaactttacacacaggctattttggacatgacatattttgaggagaacaagctagtagatgaagattttcctgaagactcttcttcacagaaagtaaaagagctgattagttttctttcagaaccagaaattttagtaaaggaaaataatatgcatccaaaacactgcaatttgcttggggatgagctactggaatgtctctcccatttcccgctgtggctgagccaaacttcattactttccttaggccctctgcccctcccctagcatatggctctttctcctattgaacagaaaattgagactatgaagaggtcaacttgtatttaccaactttactcattttcccattttagaggaaaagaggttgcctgcttcctatcaaaggcgactctgtgctacatgttggtttcatcttcgctgtctctctcatttccccacaaagtgttgtctcactttctgcctaccttttaggtattgatcttcactatatttttttctctctctctcttttttttttttactttacatattttatacaatgtcattcataactatggcttcttttaccacctgtaataacagactgagtctcaaacctgtaacttgtatcctgacttatctcttgctttctaaaccttgtttctaactgtctatcaaatatcttcattagacatcccacagtaattttaagctcagtgtttccaaacgtcaagtcctcatctgttatataaaatcctttctgctttgtaagttttctctttttgggattttccgcagatcagggcaacacagaatgactaccttcccagccatgtctctgcagtcatcctgtgtaatcatgttctagtccagtgttgctcaaacagttaaaatccaggctgcttttggtaaacatacaaattctgatatagagcctctgtggcaaagggaatttctcagttcctgccccagcccccttgtttatcattacacagctaagatttttatttaacttagcattttagcaagttttcttatgaaaatacctttgtgctttctaagtataaagatttaaattatttttaatacggtttttagaaccacagactatccctctttttagagcatcctgatcaattgcaagtacttccacttcttccctaaatgcgctttgtgtgttttccacctcagtagccttgcacacatcattacttctg

SEQ ID NO: 119113 - DNA, 686 bp, Homo sapiens
  Payload ID: 3343
  Gene Symbol: C5orf52
  Gene Name: chromosome 5 open reading frame 52
  Uniprot ID: A6NGY3
  ENST ID: ENST00000409999
  CDS Start-End: 63-542
cacctaggtgggctggcaaccagccaccagtttccaactctttctccaacagggaagccgcaatgacacagccgactaggccctcggtcacctgtgaccagggatcctccacgatcggcgggaccgccgcccaggcgaccaccagttccagcgccacctcgggttcgaactaccagcgcgatagactcggccgccgcccagaaatcggcgtagggggtcagccgcagatctgctttccgcggccgaggtccgcgcagcagccggtgctgttcagcttaatgaattccagtgaagcagcgatgaaaaaaactttacccaagagccatttatctcgggtgattattcatgataaccgcatcacacaacgaatctatgagatggaggtgagcgctttagagaagaccaagaaaaagatcagccactactatgaacacctgaaaaaaaagttcatgacagagcagctcagaaagctcgggcgatggagagaggaatccgtgaacagcaaccggtacttaaccttcgggataccaccaccagtttaaactccagtctcccaagaaaggccaaccaccctagttctggcaaagggatctgccccagggtcacgatgacaccagtgtgacccgaggagaactagtaactacaacctacacaactgtagaacaataaacagaaaccagcagaca

SEQ ID NO: 119114 - DNA, 4767 bp, Homo sapiens
  Payload ID: 3344
  Gene Symbol: C5orf56
  Gene Name: chromosome 5 open reading frame 56
  Uniprot ID: Q8N8D9
  ENST ID: ENST00000337752
  CDS Start-End: 132-512
agaatgcagcggccgccagcctggagcgcgggccctggggccgcaacccgcgccgggcgaggtggcagcacaccctgggccccccactccccgccgcaagtcctgaggatggccagcagagaaacaagaaaatggactccctggctgctggagagttgaatgccagccaccagccatgggtgccagagtttgtagcctattggaggaaaacacaccaagggaatcttcaaactcttcttctccactggctcctgctgtgctcctgtctccatcacctgtataatgcttcctgccatcctgccttccccgtggagtacagccatgctgtctgctgcttacagccaagattctggaaagaaatgtctcctttttcctcgtcatcaaccactcatttattcagcaagtgtttcttttacacttgcctgtgctgggcatggcagcaatgcagcagtgaacaaaaccatcagccctgctctcatgcagcttataatcaagtagagagacagacataaatgattaatagatgctcctgtaatggtggttgtgaggtgtgctgccacagcccagccacacacgccagttcccttctctgcacatgtacatgtctgctcatccttcccacctgaactcatgtgccacctcacttatgccccttcccaatgccgcacccacacaacagggtgtccctctgtgcccacagcagcccttgggtataactgttccccacagaggctgaaccccaagggcagagtccaggccacactcaccacggagacccctgcctggcacagagcccagcccagcagagatgctcagaagatgaatgaaagtccctgctgagattgatccaatctgtttgtgaacatctctggggtccaagaattcacggctttctttttctttagagagccttttgtttctttttgccattatatactatatttgggttagggcacaacaatgtgaatatacttaatactgaactctacacttgaaaatggttaagatggtaaagttttaagttatatgtattttgccacaattttttaaaatgcagagcataggtacaaagaaggaaaaaaagggggcaaggtccattttattgagaaataaagaacaaagggttcaattcagagaggattggattttaaaacgtaatttagattagggaaatgcaaatgaaaaccataataagtaagataccacttcacatctgttaggatggctattttaaaacaacaaaaacaacctgaaaataagtgttggcaaggatgtgaagaaatagatacccttgtgcattgctattgggaacgtaaaatcatgcagcctttgttgaaaacaatgtggtggttcctcaaaaacttagttatcatatgatcccgcagttccacttctaggaatatacccaaaagaattgaaagcagggactcaaagtgatatttgtacaccagtgtttgtagcagtattattcacaatagccaaaaggtggaaacaacccagatgtccatgacaagaggagtggataaacaaaatatggtgaatatgtacaatggaacataattcagctttaaaaaggaatgaaattctggtacatgttataacatagatgaaccttaaaaacattatgctaagtgaaataagccagacacagaaggaaaaataccagatgatcccacttatatgaggtacctagaatagtgaaattcatagagacagaaagtagaaggatggttgccaggggctggaaggaggaagaacagggagatactgcttagtggatgcagagtttatgttgagggtgatgaaaaagttctggagatggatggtggtgatggctgcacaacagtgagaatgtacttcatactatggaactctgcacttaaaaatggttaaaatggatgtagacattttatgtctattttgccataacaagaaagtaatttgggtgtattttagagattttagaaaatactgtaagcacaagaggaaaaaaattaaaatcattcgcaatcaccaggtagagacaacgactgttgaaagatcagtgtgtatcttttcattctcgttctctctctcaaaaaagtgtgtgtgtgtgtgtgtgtgtgtcttcagatgtcacactggactttcaggaaaggttcccctctctgctgcttccctgctggagccatggagagcaagtctatccctgttccataggtcaatcctttgaatgatttctcatggctgagttcactcccctgcacctccagggttgcacttctctgaaaatactcatttattttatgtgtctactaaaaacatggcacccacgacccaataatatgttggaaggggttggagagagaaacgcgagtacctctcacaccttctcacacactacacatcttagcgatggccgagtgagcatgttggctctctggactcctcagtctgttggtctgggctgcgccaggctcaggctccctgcctcccccccaaccttgatccccttgcttcttgaacctgatgctgggcctcacattctccgttgattctagctcttaaatcctgcttctccagcttgtcaggaggctgtgccctcacaccccaaagagcagatctgccctctccactgagagggaaggagtgaaggtcccacagcctctgacccctgctgggcccaagagaggaacagctgcttgctttatttctcgtgggagaagtgtgtctcctctttgtctcaggcacccctctgccctgtacagcagcaagtcagcaggaatgagctgagccgcccaagtagtggctccctccactatgggggctctgtggtcctgggggctgtcctgcctccactgccataggcctggccccagagcatgctgcagtggtcacaacctgtggaggtgcccccagacccccatatttgggcccaactacagcctccttccccagctttgccacctggcttgggagccagggcaccaccagcttcactggcagggagagatgaagaaagaggccatagccacgcaagtgactgaagttcatgttcgtgcacaccaattagagagggacagcacgttcatttacctccaaatccagccacagacacatcgcccttttctcttggctctgaggcctccacagaagggttttttaaggttgcagccaggacctttatagcctagtcctgagaagattatctttttattgcaactttgattaatgattgatcaaaaactgatactagaaacactgaagaacaaatttgctgtagacattaggaaaggtctacatctggcaggcctggagacctgcccaccctctccccccacggtcaaaccagggcaaaggtacattggaagacccaacccctacacactcttacacgtgcactcgcacacacacactgaggggaaagaaatatttaattgtccttaaatcctcttggattaggctataaattgcaaataaatggagcaacagacagagcaaaagcacataaggtcctttaatagaatttctctatcttattctgtttctatgaatgcctgttacaaattagcagcttaaagggaaacctggagtgtgggaaagagcgacccttgtgtgaagtccacagccggggtttcctacagacctcaggtcccagagaacatctaagatgcctccaacaccagatggaggagggcaggagatgctgcacagagaagcagcacttcccgagcatctgtggcaggaagtgacttggagaggatgaggccgtgcctcaggtgtgctctagctgttctgatggtctctgaggccacgactgccatggtgaggtccacagcctgcatcagaatcaccaaagggcccaaacgtacggcctcagagcctggagagccaggaatcggcattgcaacaactccctgctcagtgggttctaccagtccagtacctgccctctgagggtgcccagggagcagggtgcttgctggctggaacactttttcctgcccctcagctcctctgtgatgccctgaggcacgggcactggaaagctggcagagctgcttctaaattgaaactggaaaatgaaactggaaatcacagtttcattttccagtttcactcgctccccctactgttggggtttcttttccacaaggagagtcccccagggagaaagaagcaggagtgggagtgggggagcatgttgggggaaggcagtgagggtgtcctgtctgcagcagggcatggaggggccccagcgctgcacttgcttcctttaagcctggcctgcttgctgtcagccccgggggtggtttcctctctaggaaaagctaatgtcatgcttatgctgaaaaactcttttcagaggtactttaggaggggcctggctctcgattaatctgggccatttcataccggctgtgctcacccaggcacaaacactgaaagcaacagctggcaaagccatcgcttggtagcagcttggaagacaccaccaaagaagctctcatggaagcggcagatttcctgaagcgactggaatgcggggaaggagggcagtcggggagagccgagaaccagcccccctgccaactccaccccattcctctcctcacctgaaatgtctcatccttagaacagctgccctaaccccctaatcccacacactcctttgtaggttaagacccctgaagttgcaccctctcgtaggagctatgtttttcagagatccatgtgattatttgcctaatgtctgcctccctcagggaagtaaagtctgtgacgcgt

SEQ ID NO: 119115 - DNA, 621 bp, Homo sapiens
  Payload ID: 3344
  Gene Symbol: C5orf56
  Gene Name: chromosome 5 open reading frame 56
  ENST ID: ENST00000378947
  CDS Start-End: 124-366
gcggccgccagcctggagcgcgggccctggggccgcaacccgcgccgggcgaggtggcagcacaccctgggccccccactccccgccgcaagtcctgaggatggccagcagagaaacaagaaaatggactccctggctgctggagagttgaatgccagccaccagccatgggtgccagagtttgtagcctattggaggaaaacacaccaagcctacgccactctgtgccctttagccaaggaagcccagctgaggccccgcagcgtccctgcccagcagagctacaggaggcccgaggccccttcctgttcactcttgctctatagacgccacgctgcaaagcagatgtgcagggacaccacctgaagacccagcctgcagctcagccctacacactgtggatggtggagatcccagagggccaagagaagcttattgagacttctctgcactgcccctcccacagcaggaggttcatggcccatgcatttctgggagggttgacagggcccaggttgtggaatacctgtctgtgagccccatgtcctgtcttgtcccagctgcctgtagtttgacagagtatgctagaggtcagccattgctagggaggctgccactaac

SEQ ID NO: 119116 - DNA, 942 bp, Homo sapiens
  Payload ID: 3344
  Gene Symbol: C5orf56
  Gene Name: chromosome 5 open reading frame 56
  Uniprot ID: Q8N8D9
  ENST ID: ENST00000378953
  CDS Start-End: 477-830
gcgccgcgggcgcctttccacttacggcgggcctgcccagcctcccgcccagcccgggcccgggtcccgccgaggcaggtgtgcgtggcggactagctctcgggcactcggctggcccagctccaccccgaacgccaccgggccaggccacgcgcagacccgagcccggggcccccgcctctggctgccggcccgcgcccgccgcgcgccccgcgttcactgcgcgctcggccccggtcccgcctcccggagggtttcgctttcgctttcctgccgatgtcgttgaggaaaatgaaagcggtcgtggccaggactggcgcagctgccgtttcaggcgaggggcgcagaatgcagcggccgccagcctggagcgcgggccctggggccgcaacccgcgccgggcgaggtggcagcacaccctgggccccccactccccgccgcaagtcctgaggatggccagcagagaaacaagaaaatggactccctggctgctggagagttgaatgccagccaccagccatgggtgccagagtttgtagcctattggaggaaaacacaccaagatcacctctgcagcctgcacagccgggcctttggactcctggatgctagagtgacctgggcgctgaggagggcccccgagccagtaccaggaaaggatagactcctgcttgcagcattcccagcagaggcatcgcctgtggacaccgcgtctgtgtctgtatatggcagagctcccagatatatgcacaagggagtgaaaaaatgtgtttgcaccccagtctctaaaaattcaacagcctggttacttctgggtggtatatcgtaggtggctttaatacgtgttatttgctcatctgtatttcttactctttgcacaattaaaccatgttccttttacttatgtacatttttaataaaagaaagttgttaatgactca

SEQ ID NO: 119117 - DNA, 1080 bp, Homo sapiens
  Payload ID: 3344
  Gene Symbol: C5orf56
  Gene Name: chromosome 5 open reading frame 56
  ENST ID: ENST00000407797
  CDS Start-End: 124-237
gcggccgccagcctggagcgcgggccctggggccgcaacccgcgccgggcgaggtggcagcacaccctgggccccccactccccgccgcaagtcctgaggatggccagcagagaaacaagaaaatggactccctggctgctggagagttgaatgccagccaccagccatgggtgccagagtttgtagcctattggaggaaaacacaccaagccccgaacagcacagtgaatggatagggcagcagatgagctctgccccacgccggccctgtttcagaacagcactccagagtgccgcactgcttgctgaaccacagctgttactgcagattgaggagcctcagagggaacagaagataaagatcattatggaatttaggattgcaggacattctttgacatttcataacagccaggggagatcaactgtggtcaggggacaggggcaggaagaaaccatggccaaggcctgtctggcaggacttgaaggggcagagggacccttgcaaatgaccctgcctggaacccacccccagttggcccctgtatagcactgatccagctggggcttttatcccaggataccctcttcagggatgcctgtatttgttgattatctgccatatgcctggtcactgcagaatacaaggaagaaaatagccttcagcagaagctgagacaggagcctagaggatggacagtaaggagtcgaaggctcaggatgaggctttcctgactttctcccctagaggactgatgttctctactggtacagaccttgttttattcatccttatgtccctaacctggaatgggcccagggtgacagttataataagtgtttgtcaagtgagcaagtgtgtggagtgtgcattgtagagagtaaggtctctacaggatcctgctggagaggcagcccactgggctcaccacttctccagaggagggactggtcccttgccagacagccctgccagctggagcaggcttcctcaggggtgcctggagctgttgaccatggctgttgccctctggcccctcttgggaagagcaacctgtcaggtgttaaagacggtcttc

SEQ ID NO: 119118 - DNA, 486 bp, Homo sapiens
  Payload ID: 3344
  Gene Symbol: C5orf56
  Gene Name: chromosome 5 open reading frame 56
  Uniprot ID: Q8N8D9
  ENST ID: ENST00000621237
  CDS Start-End: 30-410
ctgaggatggccagcagagaaacaagaaaatggactccctggctgctggagagttgaatgccagccaccagccatgggtgccagagtttgtagcctattggaggaaaacacaccaagggaatcttcaaactcttcttctccactggctcctgctgtgctcctgtctccatcacctgtataatgcttcctgccatcctgccttccccgtggagtacagccatgctgtctgctgcttacagccaagattctggaaagaaatgtctcctttttcctcgtcatcaaccactcatttattcagcaagtgtttcttttacacttgcctgtgctgggcatggcagcaatgcagcagtgaacaaaaccatcagccctgctctcatgcagcttataatcaagtagagagacagacataaatgattaatagatgctcctgtaatggtggttgtgaggtgtgctgccacagcccagccacacacgccagttcccttc

SEQ ID NO: 119119 - DNA, 966 bp, Homo sapiens
  Payload ID: 3345
  Gene Symbol: C5orf63
  Gene Name: chromosome 5 open reading frame 63
  Uniprot ID: A6NC05
  ENST ID: ENST00000296662
  CDS Start-End: 152-499
ggcgcagggcggaagcagaggcgttggcggcgtgaggctcaggactgtacatcagaggaagccaaaagccagctggaatacttcctgaatacagttttaatcttgtttgcaattatttcgaaggggagaaatcatctggatcagaattaagatgctctggtttcaaggaaatagcatgcaacttgccagatcctcctttggactcttcttgagaaattgctctgcctctaagacaactctgcctgtgttgaccttattcacaaaggacccatgccccctttgtgatgaagccaaggaagtactcaagccttatgaaaacaggttcattttacaggaggtgaacatcacacttccagaaaactctgtctggtatgaaaggtataaatttgatattcctgtctttcacttgaatggccagtttctgatgatgcatcgagtaaacacctcaaaacttgaaaaacagctcctgaaacttgagcagcaaagtactggaggctgactgatgccctcatgattttccaccctctcttcccataaagcatcttcctaaggaaatgaccatggcctgatactcattttgtcacttgtacagagccctaaggatgttctgaattcagtggtgccaaataaatgttgacattccccttttggttgatggaagtatcagtgtgggaactgtttgcttaatggcattttataaaataagaagagcatattagcagggagggagatgatggagggagggagaagtccatttgtcttatttatcctttttgtattaatagagaagcacttcacagtcactgggcaatgccatttataggaagaaggttctgcattcctgctgctgccccggagggcttaactttttaatgaaagaataaatgctcttccactcagtagataaagtgaaatgtgaattgttaataactgtgcacggtcaataaagcgatgttttaaggaata

SEQ ID NO: 119120 - DNA, 5680 bp, Homo sapiens
  Payload ID: 3345
  Gene Symbol: C5orf63
  Gene Name: chromosome 5 open reading frame 63
  Uniprot ID: A6NC05
  ENST ID: ENST00000535381
  CDS Start-End: 152-568
ggcgcagggcggaagcagaggcgttggcggcgtgaggctcaggactgtacatcagaggaagccaaaagccagctggaatacttcctgaatacagttttaatcttgtttgcaattatttcgaaggggagaaatcatctggatcagaattaagatgctctggtttcaaggaaatagcatgcaacttgccagatcctcctttggactcttcttgagaaattgctctgcctctaagacaactctgcctgtgttgaccttattcacaaaggacccatgccccctttgtgatgaagccaaggaagtactcaagccttatgaaaacaggcaaccctacaaggatcagaagctgccaggaacaaggagaagacgctccccttcctcaccttcccacccccacatggcttctcagtcggggaaaagatacaacttaactttaaaccaagtcttaagttttgattatgacatgggattagatgcaccaaaaacaatttcaagtgactgtggggcattctattgcctgagaatgttcaagagtcctgatatgacctgttgtttttatcctaaacagtgaaaaattcatccaccaaatatataggaatagagggagacagaaagatgctttctgaaggtatcccatatttagagtattggttacatatacctaatgttggttttaacctatagctcttcaataaacttactcatcaattcttatttcagagaggaatatggtcatgtgactaggaatcctgcagatcttcagcaaacccatgggtcccaacagctggcaaaatgaaaggtagatacctacaaacatggcatctaaaaggtggtttgattatcccactgtcaagtatcagtgttatgtcacctattactgtgattttcatgtgatgtttgtagcagcaattacttttcctttctgaaattatgtttgcaaagatcaatttgtttttatataaagattaactttgatataagaagctcatcattcacctccaaaggaaaaggtgatacaagcttcctttttttcccccttcaagctaatgccttatgaaggagtggaatagtttgggacttcatattgctgctctagaatagtgcctctttcttccacatgtctcttcataacattatgagcttactggaacacatagctctttggccagtttattgcacgaaacaagggtatactcagactggggttttttaaataatgcagcaatctcatggacatctgacagtaggaatcacaatacagccaggcttcagaagtacaattaaagaaccacccaaaactgaaacatcacccttctcacagtgccttggcttattttcttccttgttctctcctggctcacagctcccctgcttacacacactatctgcttcctcatagctgcagcctgcttatgcccatcattactgctaacctttctgttcagcaatacagcaccctgagcctctcaggcttctctattctgaaatcctaaaaggaattttactcagcttatattttacaaccaggcacccatgacctaagttggctgaccaaatctatagaaggagccacctttaggacagaagcctatccctgggccaactggctatggaagcggtatgcaaatcacagtcactgcccactggcagaggccagaagcaggacaggcaatgaccagcaactctggcacgcctccaaaaagcttaagaatgtgacattctaccatactcaagagaagtcaggagggacacattggtaagttcacttatatcctactccataggagtaataaggacatgaaccaaagcaatgggagtcagacagaaagagatatcaggagatatttaggagtgaggttgacaaaacttcatgactgactggatgggtcggtagtgatgtggagaggggagtagagagaaagcatggattctgggataactcccagttttcttgcttacactactgggtgaattctgatactttttattccctgaggcagagaatgtaagaggaaggaaaagttagttttgggctgtgcttggtggatgggaaaggtaagacatggtgaattctccatgcttgtgggatatcaaggtaaagataaaagttagaagtgcaaaacaaaggtctggggttaaggtatacatttgagagcccactgagtatggttggaaatgtggccacctggcatataaggagaaaagcaagctattcccaaaccatggagaatactaatcttgacccatgagaatagaggaagttgctagtgaaggaaaatgagagagtggtggtggaactaggaatgggagaagctcatccaatttacattacgtgatgccttttgtgatttgatagtggcaggtattattccaagcactggggataaaacaacaaacaagatagccaggattcctactctcagagtcttgcattttaagggagagacagacaataaagatatcgtatcagaggaaaataatcatgaaagtcagggaggagcttttcccagagtaactgacagtatcaaatagcaagagagttaggatgaggactgaacagaagacatcagatttgaaaattagaaaatcagtgctgctataggaagaatagtccccaaagatacccaggtcctaattcctggaacctgtcacttatatgcataaaggactttgcagatttaagttaaggatcttgagatgggaaaattatattgcattatctaagcaggtcctaatgtaatcacaggtgtctctataagagggagtcagaaggagatttgactagggtaaagagagtaggaaattcgacaatggaagcaaaaggttggagtgatacaagaaagcagccatgagccaaggaatgtgaatggcctccagaagctaagaaaagaaaaagaaaacagattatcccctatagcctcccgaaggagcaagccctgctgacacgtttactttagttctgtgaaactgatttctgacttctggcctatagaactatgagagaataaatttgtgttgttttaagccaagtttgtgataatttggtacagcagcaatagaaaatgaatacaaatgtttccttgaccttattgagaacaacttttgtggagagggaagaggtaaactaaaagaaaattgtggtgggatgataactgaaagatacagaaaagacagcaaagtatccattttttaggaagtttttatatatctcatttgacccactaagaaacgacatccagaaaggagctaaagaccagaggtaattgattagctcagcacccaaaaatggcaggcagtgttggggcagtactagaatgaggtagccggccgggcacggtggctcatgcctgtaatgccagctctcagggaggcaagaggtgggagtatagcttgagcccaggagttcgagacctgcctgggcaatatagcaagaccccgttctccagaaaaaggaaaaaaaaaaaaaaaaaagcatagaatgaggtagccataacattctacctggcttttggctgaattgtggggaggagagttcagaggcctcaaaagtgaccctgacactggagagtaaaccatagtaacccattatagtccacagatatgcgcaccagacccatgactcttgttcaccatagagacaggatactttgatgctgtgacccaaaatcctgcacctggaacagatttggtacctctctattgacacagaaattcatgttgagcatggagacataatcaagagagaatggcctcattcgatcggtcttcagcttaggcactgacattttgcattttacctcctctctcaggttcaaagatgactaccaaagctaaacctctgaattctaaagtctacaaggacataaagcttcagggaaaggggaaatattaatattaatattaatgtcatacaaaagaggagaagcagcacataggagtgccagctaatagactagtagtaataagaagaatccaaccataggcctatattgagagtcatgggcatcccttctttatgctgaaatggtatatttgaacggaattcctgatggaaaactttctatccttagaaatactgtaggccaaatattaattggaacttttgttaatgatttgagaacaccaaaaagtttagatgatacaagttaaaggcaaattgagcccatggcctcattgtgctacttagaataccctgtgacccagctctcctcagaaaccctgatggctttgttgcagcattgcattgcacagaagacctcagtggtggtcctgagtcctcacaacaaggtcaacccgtggcctggccactaaggcaacagagagggaaataaattttagaaaacgcttcccttaaaaatgagttaaaatgtacatttgcatcatgagactaggttaactgtcacctgagaaagtcctatattcagaaagacttaatcctggaccaggtaaatgaggcatttgctgtatgttctttgttatgaatttaatgctacaaagagaaaatgggcattgatgcataatctgggtaaaaaagagatgtcagaagttgggaaagaactgccagaagagctatgttttaggatttcactccaccttaccctgtgttttcttgtaaagatattctcaaaattaggccaatttcactcttttaaggtcagaggagattaagatatttagaaatcagattgtgggattgattcccattgtgattgctgacttttagtatcagccttttgttctgcatggattctctcatcttgcaaactagcaagactcctgaatttggcaatgatcctgctctgtgaagcattctcaagttagggttcttatcaatgtcagatttcactaagccagtaataaaggaaaggttgagagagcaaaggatgtcactgagttgacacctaacagcacaaaacaacttgtcagctggcaggacaagccagcatgttcagggtggtcacagcctttgagttggaaagatagtcttttaaacattcttacctcaccaaataactttaatagataaaatttagttactccctcccacttttgttctattcatttaaagcagtgttttttaaaaatttatgtatatgtgactacatgaaaaatacattactgtgtttcttgatgttttatgacctgtacacaaagtgagaccagcagatgccttcaagagaaataaaggacactgctgtcattctaactaaattgtccagaggaggaaagaagagtacaaaaatgattatgaatacttaagaagaggcatgactttgtcattggtgtggagcctataattatgtgcaattccctacttaagactttttagttatgctgaacattgaaaaaaaactaaacagcggagaggagaaaagaaaaggggaaatttaaacatttaatggaacacattcattaaatggagacatcgcttcaccataagggggcagttaagggtttggtagtcctactcacttgctattgtcaaatcatttgttttatcatggatttgagatccttataagtcttcattattattttgaattcaagaatgattccttctgctcacaaaacatgatcacttttcattgatttttttttttaatattctgactggttttgcatatctggaaaagataaatcttcaaaatttggaaataaatatttttcctccctgccaaatcca

SEQ ID NO: 119121 - DNA, 2977 bp, Homo sapiens
  Payload ID: 3345
  Gene Symbol: C5orf63
  Gene Name: chromosome 5 open reading frame 63
  ENST ID: ENST00000508527
  CDS Start-End: 140-307
aagcagaggcgttggcggcgtgaggctcaggactgtacatcagaggaagccaaaagccagctggaatacttcctgaatacagttttaatcttgtttgcaattatttcgaaggggagaaatcatctggatcagaattaagatgctctggtttcaaggaaatagcatgcaacttgccagatcctcctttggactcttcttgagaaattgctctgcctctaagacaactctgcctgtgttgaccttattcacaaaggagtttctcagcacaaggtctctctttgcctgctgccatccatgtaagatgtgacttgctcctccttgccttccgccatcattatgaggcctccccagccatgtggaactgacccatgccccctttgtgatgaagccaaggaagtactcaagccttatgaaaacaggcaaccctacaaggatcagaagctgccaggaacaaggagaagacgctccccttcctcaccttcccacccccacatggcttctcagtcggggaaaagatacaacttaactttaaaccaagtcttaagttttgattatgacatgggattagatgcaccaaaaacaatttcaagtgactgtggggcattctattgcctgagaatgttcaagagtcctgatatgacctgttgtttttatcctaaacagtgaaaaattcatccaccaaatatataggaatagagggagacagaaagatgctttctgaaggtatcccatatttagagtattggttacatatacctaatgttggttttaacctatagctcttcaataaacttactcatcaattcttatttcagagaggaatatggtcatgtgactaggaatcctgcagatcttcagcaaacccatgggtcccaacagctggcaaaatgaaaggtagatacctacaaacatggcatctaaaaggtggtttgattatcccactgtcaagtatcagtgttatgtcacctattactgtgattttcatgtgatgtttgtagcagcaattacttttcctttctgaaattatgtttgcaaagatcaatttgtttttatataaagattaactttgatataagaagctcatcattcacctccaaaggaaaaggtgatacaagcttcctttttttcccccttcaagctaatgccttatgaaggagtggaatagtttgggacttcatattgctgctctagaatagtgcctctttcttccacatgtctcttcataacattatgagcttactggaacacatagctctttggccagtttattgcacgaaacaagggtatactcagactggggttttttaaataatgcagcaatctcatggacatctgacagtaggaatcacaatacagccaggcttcagaagtacaattaaagaaccacccaaaactgaaacatcacccttctcacagtgccttggcttattttcttccttgttctctcctggctcacagctcccctgcttacacacactatctgcttcctcatagctgcagcctgcttatgcccatcattactgctaacctttctgttcagcaatacagcaccctgagcctctcaggcttctctattctgaaatcctaaaaggaattttactcagcttatattttacaaccaggcacccatgacctaagttggctgaccaaatctatagaaggagccacctttaggacagaagcctatccctgggccaactggctatggaagcggtatgcaaatcacagtcactgcccactggcagaggccagaagcaggacaggcaatgaccagcaactctggcacgcctccaaaaagcttaagaatgtgacattctaccatactcaagagaagtcaggagggacacattggtaagttcacttatatcctactccataggagtaataaggacatgaaccaaagcaatgggagtcagacagaaagagatatcaggagatatttaggagtgaggttgacaaaacttcatgactgactggatgggtcggtagtgatgtggagaggggagtagagagaaagcatggattctgggataactcccagttttcttgcttacactactgggtgaattctgatactttttattccctgaggcagagaatgtaagaggaaggaaaagttagttttgggctgtgcttggtggatgggaaaggtaagacatggtgaattctccatgcttgtgggatatcaaggtaaagataaaagttagaagtgcaaaacaaaggtctggggttaaggtatacatttgagagcccactgagtatggttggaaatgtggccacctggcatataaggagaaaagcaagctattcccaaaccatggagaatactaatcttgacccatgagaatagaggaagttgctagtgaaggaaaatgagagagtggtggtggaactaggaatgggagaagctcatccaatttacattacgtgatgccttttgtgatttgatagtggcaggtattattccaagcactggggataaaacaacaaacaagatagccaggattcctactctcagagtcttgcattttaagggagagacagacaataaagatatcgtatcagaggaaaataatcatgaaagtcagggaggagcttttcccagagtaactgacagtatcaaatagcaagagagttaggatgaggactgaacagaagacatcagatttgaaaattagaaaatcagtgctgctataggaagaatagtccccaaagatacccaggtcctaattcctggaacctgtcacttatatgcataaaggactttgcagatttaagttaaggatcttgagatgggaaaattatattgcattatctaagcaggtcctaatgtaatcacaggtgtctctataagagggagtcagaaggagatttgactagggtaaagagagtaggaaattcgacaatggaagcaaaaggttggagtgatacaagaaagcagccatgagccaaggaatgtgaatggcctccagaagct

SEQ ID NO: 119122 - DNA, 553 bp, Homo sapiens
  Payload ID: 3345
  Gene Symbol: C5orf63
  Gene Name: chromosome 5 open reading frame 63
  ENST ID: ENST00000509733
  CDS Start-End: 152-331
ggcgcagggcggaagcagaggcgttggcggcgtgaggctcaggactgtacatcagaggaagccaaaagccagctggaatacttcctgaatacagttttaatcttgtttgcaattatttcgaaggggagaaatcatctggatcagaattaagatgctctggtttcaaggaaatagcatgcaacttgccagatcctcctttggactcttcttgagaaattgctctgcctctaagacaactctgcctgtgttgaccttattcacaaaggacccatgccccctttgtgatgaagccaaggaagtactcaagccttatgaaaacagggtaatataatacagtgtggcttttatgtatatggattgcatattagatgtggtataaagtatctgcctggatccttcctttaggaaaagagattaaatgatttttcttttaaattttctttctgttcttcagagagagagtttagtgcttattaccataaaactcattacacctaagtgttttcctctgagcagtactggttttcttactctggctcttactgagtcaaag

SEQ ID NO: 119123 - DNA, 333 bp, Homo sapiens
  Payload ID: 3345
  Gene Symbol: C5orf63
  Gene Name: chromosome 5 open reading frame 63
  ENST ID: ENST00000606042
  CDS Start-End: 1-174
aagacaactctgcctgtgttgaccttattcacaaaggacccatgccccctttgtgatgaagccaaggaagtactcaagccttatgaaaacaggtttctgatgatgcatcgagtaaacacctcaaaacttgaaaaacagctcctgaaacttgagcagcaaagtactggaggctgactgatgccctcatgattttccaccctctcttcccataaagcatcttcctaaggaaatgaccatggcctgatactcattttgtcacttgtacagagccctaaggatgttctgaattcagtggtgccaaataaatgttgacattccccttttggttgatgg

SEQ ID NO: 119124 - DNA, 607 bp, Homo sapiens
  Payload ID: 3345
  Gene Symbol: C5orf63
  Gene Name: chromosome 5 open reading frame 63
  Uniprot ID: A6NC05
  ENST ID: ENST00000606937
  CDS Start-End: 48-464
gtttgcaattatttcgaaggggagaaatcatctggatcagaattaagatgctctggtttcaaggaaatagcatgcaacttgccagatcctcctttggactcttcttgagaaattgctctgcctctaagacaactctgcctgtgttgaccttattcacaaaggacccatgccccctttgtgatgaagccaaggaagtactcaagccttatgaaaacaggcaaccctacaaggatcagaagctgccaggaacaaggagaagacgctccccttcctcaccttcccacccccacatggcttctcagtcggggaaaagatacaacttaactttaaaccaagtcttaagttttgattatgacatgggattagatgcaccaaaaacaatttcaagtgactgtggggcattctattgcctgagaatgttcaagagtcctgatatgacctgttgtttttatcctaaacagtgaaaaattcatccaccaaatatataggaatagagggagacagaaagatgctttctgaaggtatcccatatttagagtattggttacatatacctaatgttggttttaacctatagctcttcaataaacttactcatcaattctta

SEQ ID NO: 119125 - DNA, 478 bp, Homo sapiens
  Payload ID: 3345
  Gene Symbol: C5orf63
  Gene Name: chromosome 5 open reading frame 63
  ENST ID: ENST00000607731
  CDS Start-End: 127-396
ggcggcgtgaggctcaggactgtacatcagaggaagccaaaagccagctggaatacttcctgaatacagttttaatcttgtttgcaattatttcgaaggggagaaatcatctggatcagaattaagatgctctggtttcaaggaaatagcatgcaacttgccagatcctcctttggactcttcttgagaaattgctctgcctctaagacaactctgcctgtgttgaccttattcacaaaggacccatgccccctttgtgatgaagccaaggaagtactcaagccttatgaaaacaggagaagcacttcacagtcactgggcaatgccatttataggaagaaggttctgcattcctgctgctgccccggagggcttaactttttaatgaaagaataaatgctcttccactcagtagataaagtgaaatgtgaattgttaataactgtgcacggtcaataaagcgatgttttaaggaata

SEQ ID NO: 119126 - DNA, 765 bp, Homo sapiens
  Payload ID: 3346
  Gene Symbol: C5orf67
  Gene Name: chromosome 5 open reading frame 67
  Uniprot ID: F2Z3F1
  ENST ID: ENST00000438651
  CDS Start-End: 227-610
caacagccaaatgaacaacttcacctgagcccttacctccaaggaagtgccacaggggaacccaaaggcccttaatcattaaaaaaaactttagagatgctggctgagccatcagtgagaacatggatgcatacacagaacctacatcttgtcatctctgctcttcgaggaatggagctggagaggcagagaagcaatgaagccgaattctgagtagtatactctgatgaagaggatattttacaagcatagaaaaaggagggctccagtcttcaaagaaccagagcatgggtaccaaagcctcccagagctagttctggtcccagctcagccacttgtctgtttgggtgactatagaactccagatccaggtgggctctttccatggagcctgagacttatgatgccaggtgcctggacaaagcttccaggtgatggtggcagtgtcccagagaagggaaagcatggcattctgggagcacagggccaggagcacccgggtttgaatgtcagctccccgttttccagcccttggacgtgttacctgtctggacatcagcctcagaataataatagccctgagcttcaggttaaggaaatcctcttatgagatagagctcagctcctcctgtagaagctgaaattccagacactggacttcccagtctcccttgccactagatatggacacgtgatcaagattccaccaatcagatggtctttgaatctgctagtgacaaaaagaaaggaacatgccaaatccat

SEQ ID NO: 119127 - DNA, 354 bp, Homo sapiens
  Payload ID: 3346
  Gene Symbol: C5orf67
  Gene Name: chromosome 5 open reading frame 67
  ENST ID: ENST00000611197
  CDS Start-End: 1-354
aggagggctccagtcttcaaagaaccagagcatgggtaccaaagcctcccagagctagttctggtcccagctcagccacttgtctgtttgggtgactatagaactccagatccaggtgggctctttccatggagcctgagacttatgatgccaggtgcctggacaaagcttccaggtgatggtggcagtgtcccagagaagggaaagcatggcattctgggagcacagggccaggagcacccgggtttgaatgtcagctccccgttttccagcccttggacgtgttacctgtctggacatcagcctcagaataataatagccctgagcttcaggttaaggaaatcctcttatga

SEQ ID NO: 119128 - DNA, 1093 bp, Homo sapiens
  Payload ID: 3347
  Gene Symbol: C6orf1
  Gene Name: chromosome 6 open reading frame 1
  ENST ID: ENST00000335352
  CDS Start-End: 555-974
tgatcacgcgcctgacggcttttccggggcccgggagccaaccgagggcgttcctgtcggggctgcagcggcgggaggtaaggcatggccaggccggctgggctgcagagcgccggcacgggtccacgcctcgggtgacgggcttccaggatgttcgggcgcggggcggcccatccgcatcccccaacacccccacctccggcctgagcctcccagcgccgtgggaaccacctcctgtccgctgttgctggcccgcatcctagcagcggcctgacgccctccccaccctggcatgcccccttgacctgggacgatgagcatacgactggggagcccagtggaggcgccctcccgaagcgccactgcccatgctgaccacccagccctccggctgctgatgtcatgagtaacaccactgtgcccaatgccccccaggccaacagcgactccatggtgggctatgtgttggggcccttcttcctcatcaccctggtcggggtggtggtggctgtgggtggaccggctgcgccatcacctgctccccatgtacagctatgacccagctgaggaactgcatgaggctgagcaggagctgctctctgacatgggagaccccaaggtggtacatggctggcagagtggctaccagcacaagcggatgccactgctggatgtcaagacgtgacctgacccccttgccccacccttcagagcctggggtcctggactgcctggggccctgccatctgcttcccctgctgtcacctggctccccctgctgggtgctgggtctccatttctccctccacccaccctcagcagcatctgcttcccatgccctcaccatcacctcactgcccccaggccttctgccctttgtgggtgttgagctcaccgcccacccacaggcactcatgggaagaggctttccttctgggatgggggcggctggtagacacctttgctttctctagccctcctgggctgggcttgggcacaaatccccaggcaggctttggagttgtttccatggtgatggggccagatgtatagtattcagtatatattttgtaaataaaatgttttgtggcta

SEQ ID NO: 119129 - DNA, 792 bp, Homo sapiens
  Payload ID: 3347
  Gene Symbol: C6orf1
  Gene Name: chromosome 6 open reading frame 1
  Uniprot ID: Q86T20
  ENST ID: ENST00000394990
  CDS Start-End: 194-673
cggcttttccggggcccgggagccaaccgagggcgttcctgtcggggctgcagcggcgggagggagcccagtggaggcgccctcccgaagcgccactgcccatgctgaccacccagccctccggctgctgatgtcatgagtaacaccactgtgcccaatgccccccaggccaacagcgactccatggtaatgtatgtacagaagaaaaagcgggtggaccggctgcgccatcacctgctccccatgtacagctatgacccagctgaggaactgcatgaggctgagcaggagctgctctctgacatgggagaccccaaggtggtacatggctggcagagtggctaccagcacaagcggatgccactgctggatgtcaagacgtgacctgacccccttgccccacccttcagagcctggggtcctggactgcctggggccctgccatctgcttcccctgctgtcacctggctccccctgctgggtgctgggtctccatttctccctccacccaccctcagcagcatctgcttcccatgccctcaccatcacctcactgcccccaggccttctgccctttgtgggtgttgagctcaccgcccacccacaggcactcatgggaagaggctttccttctgggatgggggcggctggtagacacctttgctttctctagccctcctgggctgggcttgggcacaaatccccaggcaggctttggagttgtttccatggtgatggggccagatgtatagtattcagtatatattttgtaaataaaatgttttgtggcta

SEQ ID NO: 119130 - DNA, 806 bp, Homo sapiens
  Payload ID: 3347
  Gene Symbol: C6orf1
  Gene Name: chromosome 6 open reading frame 1
  ENST ID: ENST00000413013
  CDS Start-End: 268-687
agccaaccgagggcgttcctgtcggggctgcagcggcgggagggagcccagtggaggcgccctcccgaagcgccactgcccatgctgaccacccagccctccggctgctgatgtcatgagtaacaccactgtgcccaatgccccccaggccaacagcgactccatggtgggctatgtgttggggcccttcttcctcatcaccctggtcggggtggtggtggctgtgggtggaccggctgcgccatcacctgctccccatgtacagctatgacccagctgaggaactgcatgaggctgagcaggagctgctctctgacatgggagaccccaaggtggtacatggctggcagagtggctaccagcacaagcggatgccactgctggatgtcaagacgtgacctgacccccttgccccacccttcagagcctggggtcctggactgcctggggccctgccatctgcttcccctgctgtcacctggctccccctgctgggtgctgggtctccatttctccctccacccaccctcagcagcatctgcttcccatgccctcaccatcacctcactgcccccaggccttctgccctttgtgggtgttgagctcaccgcccacccacaggcactcatgggaagaggctttccttctgggatgggggcggctggtagacacctttgctttctctagccctcctgggctgggcttgggcacaaatccccaggcaggctttggagttgtttccatggtgatggggccagatgtatagtattcagtatatattttgtaaataaaatgttttgtggcta

SEQ ID NO: 119131 - DNA, 1297 bp, Homo sapiens
  Payload ID: 3347
  Gene Symbol: C6orf1
  Gene Name: chromosome 6 open reading frame 1
  Uniprot ID: Q86T20
  ENST ID: ENST00000476320
  CDS Start-End: 684-1163
cacagacggaggccgagtgggcccggagcagggtcttgccgcgaagggcctgggctcaacgttagagcgtggcgcgaccctattctggctgcaacgagaggggtgaatgaagtgggcgccggggacctcccagaatcggagctccagacgcgggcgggccaggggccgccggaaaactgcgcgcgccccgccctaccccgtccggccccgcgtcgcgttctcctcccccactgcgcagccctcggctgccccctgccgccgccgggcggaccctgcaagccccgctgtccccgccttcgcaccgcccacccccgcctccggattggcggctccagaaatctccaggccaccggctttccgctaccggattggctgcgtccgggtgctgaggcccggcccatttccccgggtcctttgatcacgcgcctgacggcttttccggggcccgggagccaaccgagggcgttcctgtcggggctgcagcggcgggagggagcccagtggaggcgccctcccgaagcgccactgcccatgctgaccacccagccctccggctgctgatgtcatgagtaacaccactgtgcccaatgccccccaggccaacagcgactccatggtgggctatgtgttggggcccttcttcctcatcaccctggtcggggtggtggtggctgtggtaatgtatgtacagaagaaaaagcgggtggaccggctgcgccatcacctgctccccatgtacagctatgacccagctgaggaactgcatgaggctgagcaggagctgctctctgacatgggagaccccaaggtggtacatggctggcagagtggctaccagcacaagcggatgccactgctggatgtcaagacgtgacctgacccccttgccccacccttcagagcctggggtcctggactgcctggggccctgccatctgcttcccctgctgtcacctggctccccctgctgggtgctgggtctccatttctccctccacccaccctcagcagcatctgcttcccatgccctcaccatcacctcactgcccccaggccttctgccctttgtgggtgttgagctcaccgcccacccacaggcactcatgggaagaggctttccttctgggatgggggcggctggtagacacctttgctttctctagccctcctgggctgggcttgggcacaaatccccaggcaggctttggagttgtttccatggtgatggggccagatgtatagtattcagtatatattttgtaaataaaatgttttgtggctaggggttttgatttca

SEQ ID NO: 119132 - DNA, 1053 bp, Homo sapiens
  Payload ID: 3347
  Gene Symbol: C6orf1
  Gene Name: chromosome 6 open reading frame 1
  Uniprot ID: Q86T20
  ENST ID: ENST00000481533
  CDS Start-End: 455-934
agcggcgggaggtaaggcatggccaggccggctgggctgcagagcgccggcacgggtccacgcctcgggtgacgggcttccaggatgttcgggcgcggggcggcccatccgcatcccccaacacccccacctccggcctgagcctcccagcgccgtgggaaccacctcctgtccgctgttgctggcccgcatcctagcagcggcctgacgccctccccaccctggcatgcccccttgacctgggacgatgagcatacgactggggagcccagtggaggcgccctcccgaagcgccactgcccatgctgaccacccagccctccggctgctgatgtcatgagtaacaccactgtgcccaatgccccccaggccaacagcgactccatggtgggctatgtgttggggcccttcttcctcatcaccctggtcggggtggtggtggctgtggtaatgtatgtacagaagaaaaagcgggtggaccggctgcgccatcacctgctccccatgtacagctatgacccagctgaggaactgcatgaggctgagcaggagctgctctctgacatgggagaccccaaggtggtacatggctggcagagtggctaccagcacaagcggatgccactgctggatgtcaagacgtgacctgacccccttgccccacccttcagagcctggggtcctggactgcctggggccctgccatctgcttcccctgctgtcacctggctccccctgctgggtgctgggtctccatttctccctccacccaccctcagcagcatctgcttcccatgccctcaccatcacctcactgcccccaggccttctgccctttgtgggtgttgagctcaccgcccacccacaggcactcatgggaagaggctttccttctgggatgggggcggctggtagacacctttgctttctctagccctcctgggctgggcttgggcacaaatccccaggcaggctttggagttgtttccatggtgatggggccagatgtatagtattcagtatatattttgtaaataaaatgttttgtggcta

SEQ ID NO: 119133 - DNA, 903 bp, Homo sapiens
  Payload ID: 3347
  Gene Symbol: C6orf1
  Gene Name: chromosome 6 open reading frame 1
  Uniprot ID: Q86T20
  ENST ID: ENST00000468145
  CDS Start-End: 395-874
agcggcgggaggtaaggcatggccaggccggctgggctgcagagcgccggcacgggtccacgcctcgggtgacgggcttccaggatgttcgggcgcggggcggcccatccgcatcccccaacacccccacctccggcctgagcctcccagcgccgtgggaaccacctcctgtccgctgttgctggcccgcatcctagcagcggcctgacgccctccccaccctggcatgcccccttgacctgggacgatgagcatacgactggggagcccagtggaggcgccctcccgaagcgccactgcccatgctgaccacccagccctccggctgctgatgtcatgagtaacaccactgtgcccaatgccccccaggccaacagcgactccatggtaatgtatgtacagaagaaaaagcgggtggaccggctgcgccatcacctgctccccatgtacagctatgacccagctgaggaactgcatgaggctgagcaggagctgctctctgacatgggagaccccaaggtggtacatggctggcagagtggctaccagcacaagcggatgccactgctggatgtcaagacgtgacctgacccccttgccccacccttcagagcctggggtcctggactgcctggggccctgccatctgcttcccctgctgtcacctggctccccctgctgggtgctgggtctccatttctccctccacccaccctcagcagcatctgcttcccatgccctcaccatcacctcactgcccccaggccttctgccctttgtgggtgttgagctcaccgcccacccacaggcactcatgggaagaggctttccttctgggatgggggcggctggtagacacctttgctttctctagccctcctgggctgggcttgggcacaaatc

SEQ ID NO: 119134 - DNA, 2125 bp, Homo sapiens
  Payload ID: 3348
  Gene Symbol: C6orf10
  Gene Name: chromosome 6 open reading frame 10
  ENST ID: ENST00000375007
  CDS Start-End: 174-1859
ctgctccacacaatttctcagtgatcctctgcatctctgcctacaagggcctccctgacacccaagttcatattgctcagaaacagtgaacttgagtttttcgttttaccttgatctctctctgacaaagaaatccagatgatgcgagacctgatgaagacaatacatggaaaatgacagtcttggaaataactttggctgtcatcctgactctactgggacttgccatcctggctattttgttaacaagatgggcacgatgtaagcaaagtgaaatgtatatctccagatacagttcagaacaaagtgctagacttctggactatgaggatggtagaggatcccgacatgcatattcaacacaaagtggtaatttatgttttcagagatccaaaagagattacacaccatcaaccaactctctagtgtctatggcatctaagttctccctgggacaaacagaactcattcttcttttgatgtgttttattttagcactgtctcgatcaagtattggtagtataaaatgtttacaaacaactgaagaacctccttccagaactgcaggagccatgatgcaattcacagcccctattcccggagctacaggacctatcaagctctctcaaaaaaccattgtgcaaactccaggacctattgtacaatatcctggatccaatgctggtccaccttcagcaccccgcggtccacccatggcacccataataatttcacagagaaccgcaagaatacctcaagttcacactatggacagttctggaaaaatcacactgactcctgtggttatattaacaggttacatggatgaagaacttgcaaaaaaatcttgttccaaaatccagattctaaaatgtggaggcactgcaaggtctcagaatagccgagaagaaaacaaggaagcactaaagaatgacatcatatttacgaattctgtagaatccttgaaatcagcacacataaaggagccagaaagagaaggaaaaggcactgatttagagaaagacaaaataggaatggaggtcaaggtagacagtgacgctggaataccaaaaagacaggaaacccaactaaaaatcagtgagatgagtataccacaaggacagggagcccaaataaagaaaagtgtgtcagatgtaccaagaggacaggagtcccaagtaaagaagagtgagtcaggtgtcccaaaaggacaagaagcccaagtaacgaagagtgggttggttgtactgaaaggacaggaagcccaggtagagaagagtgagatgggtgtgccaagaagacaggaatcccaagtaaagaagagtcagtctggtgtctcaaagggacaggaagcccaggtaaagaagagggagtcagttgtactgaaaggacaggaagcccaggtagagaagagtgagttgaaggtaccaaaaggacaagaaggccaagtagagaagactgaggcagatgtgccaaaggaacaagaggtccaagaaaagaagagtgaggcaggtgtactgaaaggaccagaatcccaagtaaagaacactgaggtgagtgtaccagaaacactggaatcccaagtaaagaagagtgagtcaggtgtactaaaaggacaggaagcccaagaaaagaaggagagttttgaggataaaggaaataatgataaagaaaaggagagagatgcagagaaagatccaaataaaaaagaaaaaggtgacaaaaacacaaaaggtgacaaaggaaaggacaaagttaaaggaaagagagaatcagaaatcaatggtgaaaaatcaaaaggctcgaaaagggcgaaggcaaatacaggaaggaagtacaacaaaaaagtggaagagtaaggataaattttttaaaggcccataagacaagtgattattatgattcccatactccagatacaaaccatatcccagccattgcctaaacagattacaattataaaatccctttcatcttcatatcacagtttctgctcttcagaagtttcaccctttttaatctctcagccacaaacctcagtttccaaatatttgttttataagttaagacgtatatgattccgtcaagaaagactggatactttctgaagtaaaacattttaatt

SEQ ID NO: 119135 - DNA, 2173 bp, Homo sapiens
  Payload ID: 3348
  Gene Symbol: C6orf10
  Gene Name: chromosome 6 open reading frame 10
  Uniprot ID: Q5SRN2
  ENST ID: ENST00000375015
  CDS Start-End: 202-1890
tcccatcatttgcttaggtctgatcaatctgctccacacaatttctcagtgatcctctgcatctctgcctacaagggcctccctgacacccaagttcatattgctcagaaacagtgaacttgagtttttcgttttaccttgatctctctctgacaaagaaatccagatgatgcgagacctgatgaagacaatacatggaaaatgacagtcttggaaataactttggctgtcatcctgactctactgggacttgccatcctggctattttgttaacaagatgggcacgatgtaagcaaagtgaaatgtatatctccagatacagttcagaacaaagtgctagacttctggactatgaggatggtagaggatcccgacatgcatattcaacacaaagtgacacttcatatgataaccgagagagatccaaaagagattacacaccatcaaccaactctctagcactgtctcgatcaagtattgctttacctcaaggatccatgagtagtataaaatgtttacaaacaactgaagaacctccttccagaactgcaggagccatgatgcaattcacagcccctattcccggagctacaggacctatcaagctctctcaaaaaaccattgtgcaaactccaggacctattgtacaatatcctggatccaatgtcagatcgcatcctcacacaatcactggtccaccttcagcaccccgcggtccacccatggcacccataataatttcacagagaaccgcaagtcagctggcagcacctataagaatacctcaagttcacactatggacagttctggaaaaatcacactgactcctgtggttatattaacaggttacatggatgaagaacttgcaaaaaaatcttgttccaaaatccagattctaaaatgtggaggcactgcaaggtctcagaatagccgagaagaaaacaaggaagcactaaagaatgacatcatatttacgaattctgtagaatccttgaaatcagcacacataaaggagccagaaagagaaggaaaaggcactgatttagagaaagacaaaataggaatggaggtcaaggtagacagtgacgctggaataccaaaaagacaggaaacccaactaaaaatcagtgagatgagtataccacaaggacagggagcccaaataaagaaaagtgtgtcagatgtaccaagaggacaggagtcccaagtaaagaagagtgagtcaggtgtcccaaaaggacaagaagcccaagtaacgaagagtgggttggttgtactgaaaggacaggaagcccaggtagagaagagtgagatgggtgtgccaagaagacaggaatcccaagtaaagaagagtcagtctggtgtctcaaagggacaggaagcccaggtaaagaagagggagtcagttgtactgaaaggacaggaagcccaggtagagaagagtgagttgaaggtaccaaaaggacaagaaggccaagtagagaagactgaggcagatgtgccaaaggaacaagaggtccaagaaaagaagagtgaggcaggtgtactgaaaggaccagaatcccaagtaaagaacactgaggtgagtgtaccagaaacactggaatcccaagtaaagaagagtgagtcaggtgtactaaaaggacaggaagcccaagaaaagaaggagagttttgaggataaaggaaataatgataaagaaaaggagagagatgcagagaaagatccaaataaaaaagaaaaaggtgacaaaaacacaaaaggtgacaaaggaaaggacaaagttaaaggaaagagagaatcagaaatcaatggtgaaaaatcaaaaggctcgaaaagggcgaaggcaaatacaggaaggaagtacaacaaaaaagtggaagagtaaggataaattttttaaaggcccataagacaagtgattattatgattcccatactccagatacaaaccatatcccagccattgcctaaacagattacaattataaaatccctttcatcttcatatcacagtttctgctcttcagaagtttcaccctttttaatctctcagccacaaacctcagtttccaaatatttgttttataagttaagacgtatatgattccgtcaagaaagactggatactttctgaagtaaaacattttaattaaagaaatatatagtaa

SEQ ID NO: 119136 - DNA, 2148 bp, Homo sapiens
  Payload ID: 3348
  Gene Symbol: C6orf10
  Gene Name: chromosome 6 open reading frame 10
  Uniprot ID: Q5SRN2
  ENST ID: ENST00000383130
  CDS Start-End: 174-1865
ctgctccacacaatttctcagtgatcctctgcatctctgcctacaagggcctccctgacacccaagttcatattgctcagaaacagtgaacttgagtttttcgttttatcttgatctctctctgacaaagaaatccagatgatgcgagacctgatgaagacaatacatggaaaatgacagtcttggaaataactttggctgtcatcctgactctactgggacttgccatcctggctattttgttaacaagatgggcacgatgtaagcaaagtgaaatgtatatctccagatacagttcagaacaaagtgctagacttctggactatgaggatggtagaggatcccgacatgcatattcaacacaaagtgacacttcatatgataaccgagagagatccaaaagagattacacaccatcaaccaactctctagtgtctatggcatctaagttctccctgggacaaacagaactcattcttcttttgatgtgttttattttagcactgtctcgatcaagtattggtagtataaaatgtttacaaacaactgaagaacctccttccagaactgcaggagccatgatgcaattcacagcccctattcccggagctacaggacctatcaagctctctcaaaaaaccattgtgcaaactccaggacctattgtacaatatcctggatccaatgctggtccaccttcagcaccccgcggtccacccatggcacccataataatttcacagagaaccgcaagaatacctcaagttcacactatggacagttctggaaaaatcacactgactcctgtggttatattaacaggttacatggatgaagaacttgcaaaaaaatcttgttccaaaatccagattctaaaatgtggaggcactgcaaggtctcagaatagccgagaagaaaacaaggaagcactaaagaatgacatcatatttacgaattctgtagaatccttgaaatcagcacacataaaggagccagaaagagaaggaaaaggcactgatttagagaaagacaaaataggaatggaggtcaaggtagacagtgacgctggaataccaaaaagacaggaaacccaactaaaaatcagtgagatgagtataccacaaggacagggagcccaaataaagaaaagtgtgtcagatgtaccaagaggacaggagtcccaagtaaagaagagtgagtcaggtgtcccaaaaggacaagaagcccaagtaacgaagagtgggttggttgtactgaaaggacaggaagcccaggtagagaagagtgagatgggtgtgccaagaagacaggaatcccaagtaaagaagagtcagtctggtgtctcaaagggacaggaagcccaggtaaagaagagggagtcagttgtactgaaaggacaggaagcccaggtagagaagagtgagttgaaggtaccaaaaggacaagaaggccaagtagagaagactgaggcagatgtgccaaaggaacaagaggtccaagaaaagaagagtgaggcaggtgtactgaaaggaccagaatcccaagtaaagaacactgaggtgagtgtaccagaaacactggaatcccaagtaaagaagagtgagtcaggtgtactaaaaggacaggaagcccaagaaaagaaggagagttttgaggataaaggaaataatgataaagaaaaggagagagatgcagagaaagatccaaataaaaaagaaaaaggtgacaaaaacacaaaaggtgacaaaggaaaggacaaagttaaaggaaagagagaatcagaaatcaatggtgaaaaatcaaaaggctcgaaaagggcgaaggcaaatacaggaaggaagtacaacaaaaaagtggaagagtaaggataaattttttaaaggcccataagacaagtgattattatgattcccatactccagatacaaaccatatcccagccattgcctaaacagattacaattataaaatccctttcatcttcatatcacagtttctgctcttcagaagtttcaccctttttaatctctcagccacaaacctcagtttccaaatatttgttttataagttaagacgtatatgattccgtcaagaaagactggatactttctgaagtaaaacattttaattaaagaaatatatagtaa

SEQ ID NO: 119137 - DNA, 2173 bp, Homo sapiens
  Payload ID: 3348
  Gene Symbol: C6orf10
  Gene Name: chromosome 6 open reading frame 10
  ENST ID: ENST00000383262
  CDS Start-End: 202-1890
tcccatcatttgcttaggtctgatcaatctgctccacacaatttctcagtgatcctctgcatctctgcctacaagggcctccctgacacccaagttcatattgctcagaaacagtgaacttgagtttttcgttttaccttgatctctctctgacaaagaaatccagatgatgcgagacctgatgaagacaatacatggaaaatgacagtcttggaaataactttggctgtcatcctgactctactgggacttgccatcctggctattttgttaacaagatgggcacgacgtaagcaaagtgaaatgtatatctccagatacagttcagaacaaagtgctagacttctggactatgaggatggtagaggatcccgacatgcatattcaacacaaagtgacacttcatatgataaccgagagagatccaaaagagattacacaccatcaaccaactctctagcactgtctcgatcaagtattgctttacctcaaggatccatgagtagtataaaatgtttacaaacaactgaagaacctccttccagaactgcaggagccatgatgcaattcacagcccctattcccggagctacaggacctatcaagctctctcaaaaaaccattgtgcaaactctaggacctattgtacaatatcctggatccaatgtcagatcgcatcctcacacaatcactggtccaccttcagcaccccgcggtccacccatggcacccataataatttcacagagaaccgcaagtcagctggcagcacctataagaatacctcaagttcacactatggacagttctggaaaaatcacactgactcctgtggttatattaacaggttacatggatgaagaacttgcaaaaaaatcttgttccaaaatccagattctaaaatgtggaggcactgcaaggtctcagaatagccgagaagaaaacaaggaagcactaaagaatgacatcatatttacgaattctgtagaatccttgaaatcagcacacataaaggagccagaaagagaaggaaaaggcactgatttagagaaagacaaaataggaatggaggtcaaggtagacagtgacgctggaataccaaaaagacaggaaacccaactaaaaatcagtgagatgagtataccacaaggacagggagcccaaataaagaaaagtgtgtcagatgtaccaagaggacaggagtcccaagtaaagaagagtgagtcaggtgtcccaaaaggacaagaagcccaagtaacgaagagtgggttggttgtactgaaaggacaggaagcccaggtagagaagagtgagatgggtgtgccaagaagacaggaatcccaagtaaagaagagtcagtctggtgtctcaaagggacaggaagcccaggtaaagaagagggagtcagttgtactgaaaggacaggaagcccaggtagagaagagtgagttgaaggtaccaaaaggacaagaaggccaagtagagaagactgaggcagatgtgccaaaggaacaagaggtccaagaaaagaagagtgaggcaggtgtactgaaaggaccagaatcccaagtaaagaacactgaggtgagtgtaccagaaacactggaatcccaagtaaagaagagtgagtcaggtgtactaaaaggacaggaagcccaagaaaagaaggagagttttgaggataaaggaaataatgataaagaaaaggagagagatgcagagaaagatccaaataaaaaagaaaaaggtgacaaaaacacaaaaggtgacaaaggaaaggacaaagttaaaggaaagagagaatcagaaatcaatggtgaaaaatcaaaaggctcgaaaagggcgaaggcaaatacaggaaggaagtacaacaaaaaagtggaagagtaaggataaattttttaaaggcccataagacaagtgattattatgattcccatactccagatacaaaccatatcccagccattgcctaaacagattacaattataaaatccctttcatcttcatatcacagtttctgctcttcagaagtttcaccctttttaatctctcagccacaaacctcagtttccaaatatttgttttataagttaagacgtatatgattccgtcaagaaagactggatactttctgaagtaaaacattttaattaaagaaatatatagtaa

SEQ ID NO: 119138 - DNA, 2148 bp, Homo sapiens
  Payload ID: 3348
  Gene Symbol: C6orf10
  Gene Name: chromosome 6 open reading frame 10
  Uniprot ID: Q5SRN2
  ENST ID: ENST00000399749
  CDS Start-End: 174-1865
ctgctccacacaatttctcagtgatcctctgcatctctgcctacaagggcctccctgacacccaagttcatattgctcagaaacagtgaacttgagtttttcgttttaccttgatctctctctgacaaagaaatccagatgatgcgagacctgatgaagacaatacatggaaaatgacagtcttggaaataactttggctgtcatcctgactctactgggacttgccatcctggctattttgttaacaagatgggcacgacgtaagcaaagtgaaatgtatatctccagatacagttcagaacaaagtgctagacttctggactatgaggatggtagaggatcccgacatgcatattcaacacaaagtgacacttcatatgataaccgagagagatccaaaagagattacacaccatcaaccaactctctagtgtctatggcatctaagttctccctgggacaaacagaactcattcttcttttgatgtgttttattttagcactgtctcgatcaagtattggtagtataaaatgtttacaaacaactgaagaacctccttccagaactgcaggagccatgatgcaattcacagcccctattcccggagctacaggacctatcaagctctctcaaaaaaccattgtgcaaactctaggacctattgtacaatatcctggatccaatgctggtccaccttcagcaccccgcggtccacccatggcacccataataatttcacagagaaccgcaagaatacctcaagttcacactatggacagttctggaaaaatcacactgactcctgtggttatattaacaggttacatggatgaagaacttgcaaaaaaatcttgttccaaaatccagattctaaaatgtggaggcactgcaaggtctcagaatagccgagaagaaaacaaggaagcactaaagaatgacatcatatttacgaattctgtagaatccttgaaatcagcacacataaaggagccagaaagagaaggaaaaggcactgatttagagaaagacaaaataggaatggaggtcaaggtagacagtgacgctggaataccaaaaagacaggaaacccaactaaaaatcagtgagatgagtataccacaaggacagggagcccaaataaagaaaagtgtgtcagatgtaccaagaggacaggagtcccaagtaaagaagagtgagtcaggtgtcccaaaaggacaagaagcccaagtaacgaagagtgggttggttgtactgaaaggacaggaagcccaggtagagaagagtgagatgggtgtgccaagaagacaggaatcccaagtaaagaagagtcagtctggtgtctcaaagggacaggaagcccaggtaaagaagagggagtcagttgtactgaaaggacaggaagcccaggtagagaagagtgagttgaaggtaccaaaaggacaagaaggccaagtagagaagactgaggcagatgtgccaaaggaacaagaggtccaagaaaagaagagtgaggcaggtgtactgaaaggaccagaatcccaagtaaagaacactgaggtgagtgtaccagaaacactggaatcccaagtaaagaagagtgagtcaggtgtactaaaaggacaggaagcccaagaaaagaaggagagttttgaggataaaggaaataatgataaagaaaaggagagagatgcagagaaagatccaaataaaaaagaaaaaggtgacaaaaacacaaaaggtgacaaaggaaaggacaaagttaaaggaaagagagaatcagaaatcaatggtgaaaaatcaaaaggctcgaaaagggcgaaggcaaatacaggaaggaagtacaacaaaaaagtggaagagtaaggataaattttttaaaggcccataagacaagtgattattatgattcccatactccagatacaaaccatatcccagccattgcctaaacagattacaattataaaatccctttcatcttcatatcacagtttctgctcttcagaagtttcaccctttttaatctctcagccacaaacctcagtttccaaatatttgttttataagttaagacgtatatgattccgtcaagaaagactggatactttctgaagtaaaacattttaattaaagaaatatatagtaa

SEQ ID NO: 119139 - DNA, 753 bp, Homo sapiens
  Payload ID: 3348
  Gene Symbol: C6orf10
  Gene Name: chromosome 6 open reading frame 10
  ENST ID: ENST00000425722
  CDS Start-End: 174-753
ctgctccacacaatttctcagtgatcctctgcatctctgcctacaagggcctccctgacacccaagttcatattgctcagaaacagtgaacttgagtttttcgttttaccttgatctctctctgacaaagaaatccagatgatgcgagacctgatgaagacaatacatggaaaatgacagtcttggaaataactttggctgtcatcctgactctactgggacttgccatcctggctattttgttaacaagatgggcacgacgtaagcaaagtgaaatgcatatctccagatacagttcagaacaaagtgctagacttctggactatgaggatggtagaggatcccgacatgcatattcaacacaaagtgacacttcatgtgataaccgagagagatccaaaagagattacacaccatcaaccaactctctagtgtctatggcatctaagttctccctgggacaaacagaactcattcttcttttgatgtgttttattttagcactgtctcgatcaagtattggtagtataaaatgtttacaaacaactgaagaacttccttccagaactgcaggagccatgatgcaattcacagcccctattcccggagctacaggacctatcaagctctctcaaaaaaccattgtgcaaactccaggacctattgtacaatatcctggacccaatgctggtccaccttcagcaccccgcggtccacccatggcacccataataatttcacagagaaccgcaa

SEQ ID NO: 119140 - DNA, 2173 bp, Homo sapiens
  Payload ID: 3348
  Gene Symbol: C6orf10
  Gene Name: chromosome 6 open reading frame 10
  ENST ID: ENST00000424621
  CDS Start-End: 202-1890
tcccatcatttgcttaggtctgatcaatctgctccacacaatttctcagtgatcctctgcatctctgcctacaagggcctccctgacacccaagttcatattgctcagaaacagtgaacttgagtttttcgttttaccttgatctctctctgacaaagaaatccagatgatgcgagacctgatgaagacaatacatggaaaatgacagtcttggaaataactttggctgtcatcctgactctactgggacttgccatcctggctattttgttaacaagatgggcacgacgtaagcaaagtgaaatgtatatctccagatacagttcagaacaaagtgctagacttctggactatgaggatggtagaggatcccgacatgcatattcaacacaaagtgacacttcatatgataaccgagagagatccaaaagagattacacaccatcaaccaactctctagcactgtctcgatcaagtattgctttacctcaaggatccatgagtagtataaaatgtttacaaacaactgaagaacctccttccagaactgcaggagccatgatgcaattcacagcccctattcccggagctacaggacctatcaagctctctcaaaaaaccattgtgcaaactctaggacctattgtacaatatcctggatccaatgtcagatcgcatcctcacacaatcactggtccaccttcagcaccccgcggtccacccatggcacccataataatttcacagagaaccgcaagtcagctggcagcacctataagaatacctcaagttcacactatggacagttctggaaaaatcacactgactcctgtggttatattaacaggttacatggatgaagaacttgcaaaaaaatcttgttccaaaatccagattctaaaatgtggaggcactgcaaggtctcagaatagccgagaagaaaacaaggaagcactaaagaatgacatcatatttacgaattctgtagaatccttgaaatcagcacacataaaggagccagaaagagaaggaaaaggcactgatttagagaaagacaaaataggaatggaggtcaaggtagacagtgacgctggaataccaaaaagacaggaaacccaactaaaaatcagtgagatgagtgtaccacaaggacagggagcccaaataaagaaaagtgtgtcagatgtaccaagaggacaggagtcccaagtaaagaagagtgagtcaggtgtcccaaaaggacaagaagcccaagtaacgaagagtgggttggttgtactgaaaggacaggaagcccaggtagagaagagtgagatgggtgtgccaagaagacaggaatcccaagtaaagaagagtcagtctggtgtctcaaagggacaggaagcccaggtaaagaagagggagtcagttgtactgaaaggacaggaagcccaggtagagaagagtgagttgaaggtaccaaaaggacaagaaggccaagtagagaagactgaggcagatgtgccaaaggaacaagaggtccaagaaaagaagagtgaggcaggtgtactgaaaggaccagaatcccaagtaaagaacactgaggtgagtgtaccagaaacactggaatcccaagtaaagaagagtgagtcaggtgtactaaaaggacaggaagcccaagaaaagaaggagagttttgaggataaaggaaataatgataaagaaaaggagagagatgcagagaaagatccaaataaaaaagaaaaaggtgacaaaaacacaaaaggtgacaaaggaaaggacaaagttaaaggaaagagagaatcagaaatcaatggtgaaaaatcaaaaggctcgaaaagggcgaaggcaaatacaggaaggaagtacaacaaaaaagtggaagagtaaggataaattttttaaaggcccataagacaagtgattattatgattcccatactccagatacaaaccatatcccagccattgcctaaacagattacaattataaaatccctttcatcttcatatcacagtttctgctcttcagaagtttcaccctttttaatctctcagccacaaacctcagtttccaaatatttgttttataagttaagacgtatatgattccgtcaagaaagactggatactttctgaagtaaaacattttaattaaagaaatatatagtaa

SEQ ID NO: 119141 - DNA, 778 bp, Homo sapiens
  Payload ID: 3348
  Gene Symbol: C6orf10
  Gene Name: chromosome 6 open reading frame 10
  ENST ID: ENST00000422186
  CDS Start-End: 202-778
tcccatcatttgcttaggtctgatcaatctgctccacgcaatttctcagtgatcctctgcatctctgcctacaagggcctccctgacacccaagttcatattgctcagaaacagtgaacttgagtttttcgttttatcttgatctctctctgacaaagaaatccagatgatgcgagacctgatgaagacaatacatggaaaatgacagtcttggaaataactttggctgtcatcctgactctactgggacttgccatcctggctattttgttaacaagatgggcacgacgtaagcaaagtgaaatgcatatctccagatacagttcagaacaaagtgctagacttctggactatgaggatggtagaggatcccgacatgcatattcaacacaaagtgacacttcatgtgataaccgagagagatccaaaagagattacacaccatcaaccaactctctagcactgtctcgatcaagtattgctttacctcaaggatccatgagtagtataaaatgtttacaaacaactgaagaacttccttccagaactgcaggagccatgatgcaattcacagcccctattcccggagctacaggacctatcaagctctctcaaaaaaccattgtgcaaactccaggacctattgtacaatatcctggacccaatgtcagatcgcatcctcacacaatcactggtccaccttcagcaccccgcggtccacccatggcacccataataatttcacagagaaccgcaagtcagctggcagcacctataa

SEQ ID NO: 119142 - DNA, 2148 bp, Homo sapiens
  Payload ID: 3348
  Gene Symbol: C6orf10
  Gene Name: chromosome 6 open reading frame 10
  ENST ID: ENST00000438312
  CDS Start-End: 174-1865
ctgctccacacaatttctcagtgatcctctgcatctctgcctacaagggcctccctgacacccaagttcatattgctcagaaacagtgaacttgagtttttcgttttaccttgatctctctctgacaaagaaatccagatgatgcgagacctgatgaagacaatacatggaaaatgacagtcttggaaataactttggctgtcatcctgactctactgggacttgccatcctggctattttgttaacaagatgggcacgacgtaagcaaagtgaaatgtatatctccagatacagttcagaacaaagtgctagacttctggactatgaggatggtagaggatcccgacatgcatattcaacacaaagtgacacttcatatgataaccgagagagatccaaaagagattacacaccatcaaccaactctctagtgtctatggcatctaagttctccctgggacaaacagaactcattcttcttttgatgtgttttattttagcactgtctcgatcaagtattggtagtataaaatgtttacaaacaactgaagaacctccttccagaactgcaggagccatgatgcaattcacagcccctattcccggagctacaggacctatcaagctctctcaaaaaaccattgtgcaaactctaggacctattgtacaatatcctggatccaatgctggtccaccttcagcaccccgcggtccacccatggcacccataataatttcacagagaaccgcaagaatacctcaagttcacactatggacagttctggaaaaatcacactgactcctgtggttatattaacaggttacatggatgaagaacttgcaaaaaaatcttgttccaaaatccagattctaaaatgtggaggcactgcaaggtctcagaatagccgagaagaaaacaaggaagcactaaagaatgacatcatatttacgaattctgtagaatccttgaaatcagcacacataaaggagccagaaagagaaggaaaaggcactgatttagagaaagacaaaataggaatggaggtcaaggtagacagtgacgctggaataccaaaaagacaggaaacccaactaaaaatcagtgagatgagtgtaccacaaggacagggagcccaaataaagaaaagtgtgtcagatgtaccaagaggacaggagtcccaagtaaagaagagtgagtcaggtgtcccaaaaggacaagaagcccaagtaacgaagagtgggttggttgtactgaaaggacaggaagcccaggtagagaagagtgagatgggtgtgccaagaagacaggaatcccaagtaaagaagagtcagtctggtgtctcaaagggacaggaagcccaggtaaagaagagggagtcagttgtactgaaaggacaggaagcccaggtagagaagagtgagttgaaggtaccaaaaggacaagaaggccaagtagagaagactgaggcagatgtgccaaaggaacaagaggtccaagaaaagaagagtgaggcaggtgtactgaaaggaccagaatcccaagtaaagaacactgaggtgagtgtaccagaaacactggaatcccaagtaaagaagagtgagtcaggtgtactaaaaggacaggaagcccaagaaaagaaggagagttttgaggataaaggaaataatgataaagaaaaggagagagatgcagagaaagatccaaataaaaaagaaaaaggtgacaaaaacacaaaaggtgacaaaggaaaggacaaagttaaaggaaagagagaatcagaaatcaatggtgaaaaatcaaaaggctcgaaaagggcgaaggcaaatacaggaaggaagtacaacaaaaaagtggaagagtaaggataaattttttaaaggcccataagacaagtgattattatgattcccatactccagatacaaaccatatcccagccattgcctaaacagattacaattataaaatccctttcatcttcatatcacagtttctgctcttcagaagtttcaccctttttaatctctcagccacaaacctcagtttccaaatatttgttttataagttaagacgtatatgattccgtcaagaaagactggatactttctgaagtaaaacattttaattaaagaaatatatagtaa

SEQ ID NO: 119143 - DNA, 2148 bp, Homo sapiens
  Payload ID: 3348
  Gene Symbol: C6orf10
  Gene Name: chromosome 6 open reading frame 10
  ENST ID: ENST00000449847
  CDS Start-End: 174-1865
ctgctccacgcaatttctcagtgatcctctgcatctctgcctacaagggcctccctgacacccaagttcatattgctcagaaacagtgaacttgagtttttcgttttatcttgatctctctctgacaaagaaatccagatgatgcgagacctgatgaagacaatacatggaaaatgacagtcttggaaataactttggctgtcatcctgactctactgggacttgccatcctggctattttgttaacaagatgggcacgacgtaagcaaagtgaaatgtatatctccagatacagttcagaacaaagtgctagacttctggactatgaggatggtagaggatcccgacatgcatattcaacacaaagtgacacttcatatgataaccgagagagatccaaaagagattacacaccatcaaccaactctctagtgtctatggcatctaagttctccctgggacaaacagaactcattcttcttttgatgtgttttattttagcactgtctcgatcaagtattggtagtataaaatgtttacaaacaactgaagaacctccttccagaactgcaggagccatgatgcaattcacagcccctattcccggagctacaggacctttcaagctctctcaaaaaaccattgtgcaaactctaggacctattgtacaatatcctggatccaatgctggtccaccttcagcaccccgcggtccacccatggcacccataataatttcacagagaaccgcaagaatacctcaagttcacactatggacagttctggaaaaatcacactgactcctgtggttatattaacaggttacatggatgaagaacttgcaaaaaaatcttgttccaaaatccagattctaaaatgtggaggcactgcaaggtctcagaatagccgagaagaaaacaaggaagcactaaagaatgacatcatatttacgaattctgtagaatccttgaaatcagcacacataaaggagccagaaagagaaggaaaaggcactgatttagagaaagacaaaataggaatggaggtcaaggtagacagtgacgctggaataccaaaaagacaggaaacccaactaaaaatcagtgagatgagtgtaccacaaggacagggagcccaaataaagaaaagtgtgtcagatgtaccaagaggacaggagtcccaagtaaagaagagtgagtcaggtgtcccaaaaggacaagaagcccaagtaacgaagagtgggttggttgtactgaaaggacaggaagcccaggtagagaagagtgagatgggtgtgccaagaagacaggaatcccaagtaaagaagagtcagtctggtgtctcaaagggacaggaagcccaggtaaagcagagggagtcagttgtactgaaaggacaggaagcccaggtagagaagagtgagttgaaggtaccaaaaggacaagaaggccaagtagagaagactgaggcagatgtgccaaaggaacaagaggtccaagaaaagaagagtgaggcaggtgtactgaaaggaccagaatcccaagtaaagaacactgaggtgagtgtaccagaaacactggaatcccaagtaaagaagagtgagtcaggtgtactaaaaggacaggaagcccaagaaaagaaggagagttttgaggataaaggaaataatgataaagaaaaggagagagatgcagagaaagatccaaataaaaaagaaaaaggtgacaaaaacacaaaaggtgacaaaggaaaggacaaagttaaaggaaagagagaatcagaaatcaatggtgaaaaatcaaaaggctcgaaaagggcgaaggcaaatacaggaaggaagtacaacaaaaaagtggaagagtaaggataaattttttaaaggcccataagacaagtgattattatgattcccatactccagatacaaaccatatcccagccattgcctaaacagattacaattataaaatccctttcatcttcatatcacagtttctgctcttcagaagtttcaccctttttaatctctcagccacaaacctcagtttccaaatatttgttttataagttaagacgtatatgattccgtcaagaaagactggatactttctgaagtaaaacattttaattaaagaaatatatagtaa

SEQ ID NO: 119144 - DNA, 2148 bp, Homo sapiens
  Payload ID: 3348
  Gene Symbol: C6orf10
  Gene Name: chromosome 6 open reading frame 10
  Uniprot ID: Q5SRN2
  ENST ID: ENST00000457429
  CDS Start-End: 174-1865
ctgctccacacaatttctcagtgatcctctgcatctctgcctacaagggcctccctgacacccaagttcatattgctcagaaacagtgaacttgagtttttcgttttatcttgatctctctctgacaaagaaatccagatgatgcgagacctgatgaagacaatacatggaaaatgacagtcttggaaataactttggctgtcatcctgactctactgggacttgccatcctggctattttgttaacaagatgggcacgacgtaagcaaagtgaaatgcatatctccagatacagttcagaacaaagtgctagacttctggactatgaggatggtagaggatcccgacatgcatattcaacacaaagtgacacttcatgtgataaccgagagagatccaaaagagattacacaccatcaaccaactctctagtgtctatggcatctaagttctccctgggacaaacagaactcattcttcttttgatgtgttttattttagcactgtctcgatcaagtattggtagtataaaatgtttacaaacaactgaagaacttccttccagaactgcaggagccatgatgcaattcacagcccctattcccggagctacaggacctatcaagctctctcaaaaaaccattgtgcaaactccaggacctattgtacaatatcctggacccaatgctggtccaccttcagcaccccgcggtccacccatggcacccataataatttcacagagaaccgcaagaatacctcaagttcacactatggacagttctggaaaaatcacactgactcctgtggttatattaacaggttacatggatgaagaacttgcaaaaaaaccttgttccaaaatccagattctaaaatgtggaggcactgcaaggtctcagaatagccgagaagaaaacaaggaagcactaaagaatgacatcatatttacgaattctgtagaatccttgaaatcagcacacataaaggagccagaaagagaaggaaaaggcactgatttagagaaagacaaaataggaatggaggtcaaggtagacagtgacgctggaataccaaaaagacaggaaacccaactaaaaatcagtgagatgagtataccacaaggacagggagcccaaataaagaaaagtgtgtcagatgtaccaagaggacaggagtcccaagtaaagaagagtgagtcaggtgtcccaaaaggacaagaagcccaagtaacgaagagtgggttggttgtactgaaaggacaggaagcccaggtagagaagagtgagatgggtgtgccaagaagacaggaatcccaagtaaagaagagtcagtctggtgtctcaaagggacaggaagcccaggtaaagaagagggagtcagttgtactgaaaggacaggaagcccaggtagagaagagtgagttgaaggtaccaaaaggacaagaaggccaagtagagaagactgaggcagatgtgccaaaggaacaagaggtccaagaaaagaagagtgaggcaggtgtactgaaaggaccagaatcccaagtaaagaacactgaggtgagtgtaccagaaacactggaatcccaagtaaagaagagtgagtcaggtgtactaaaaggacaggaagcccaagaaaagaaggagagttttgaggataaaggaaataatgataaagaaaaggagagagatgcagagaaagatccaaataaaaaagaaaaaggtgacaaaaacacaaaaggtgacaaaggaaaggacaaagttaaaggaaagagagaatcagaaatcaatggtgaaaaatcaaaaggctcgaaaagggcgaaggcaaatacaggaaggaagtacaacaaaaaagtggaagagtaaggataaattttttaaaggcccataagacaagtgattattatgattcccatactccagatacaaaccatatcccagccattgcctaaacagattacaattataaaatccctttcatcttcatatcacagtttctgctcttcagaagtttcaccctttttaatctctcagccacaaacctcagtttccaaatatttgtttcataagttaagacgtatatgattccgtcaagaaagactggatactttctgaagtaaaacattttaattaaagaaatatatagtaa

SEQ ID NO: 119145 - DNA, 753 bp, Homo sapiens
  Payload ID: 3348
  Gene Symbol: C6orf10
  Gene Name: chromosome 6 open reading frame 10
  ENST ID: ENST00000413045
  CDS Start-End: 174-753
ctgctccacgcaatttctcagtgatcctctgcatctctgcctacaagggcctccctgacacccaagttcatattgctcagaaacagtgaacttgagtttttcgttttatcttgatctctctctgacaaagaaatccagatgatgcgagacctgatgaagacaatacatggaaaatgacagtcttggaaataactttggctgtcatcctgactctactgggacttgccatcctggctattttgttaacaagatgggcacgacgtaagcaaagtgaaatgcatatctccagatacagttcagaacaaagtgctagacttctggactatgaggatggtagaggatcccgacatgcatattcaacacaaagtgacacttcatgtgataaccgagagagatccaaaagagattacacaccatcaaccaactctctagtgtctatggcatctaagttctccctgggacaaacagaactcattcttcttttgatgtgttttattttagcactgtctcgatcaagtattggtagtataaaatgtttacaaacaactgaagaacttccttccagaactgcaggagccatgatgcaattcacagcccctattcccggagctacaggacctatcaagctctctcaaaaaaccattgtgcaaactccaggacctattgtacaatatcctggacccaatgctggtccaccttcagcaccccgcggtccacccatggcacccataataatttcacagagaaccgcaa

SEQ ID NO: 119146 - DNA, 2173 bp, Homo sapiens
  Payload ID: 3348
  Gene Symbol: C6orf10
  Gene Name: chromosome 6 open reading frame 10
  Uniprot ID: Q5SRN2
  ENST ID: ENST00000448986
  CDS Start-End: 202-1890
tcccatcatttgcttaggtctgatcaatctgctccacacaatttctcagtgatcctctgcatctctgcctacaagggcctccctgacacccaagttcatattgctcagaaacagtgaacttgagtttttcgttttatcttgatctctctctgacaaagaaatccagatgatgcgagacctgatgaagacaatacatggaaaatgacagtcttggaaataactttggctgtcatcctgactctactgggacttgccatcctggctattttgttaacaagatgggcacgatgtaagcaaagtgaaatgtatatctccagatacagttcagaacaaagtgctagacttctggactatgaggatggtagaggatcccgacatgcatattcaacacaaagtgacacttcatatgataaccgagagagatccaaaagagattacacaccatcaaccaactctctagcactgtctcgatcaagtattgctttacctcaaggatccatgagtagtataaaatgtttacaaacaactgaagaacctccttccagaactgcaggagccatgatgcaattcacagcccctattcccggagctacaggacctatcaagctctctcaaaaaaccattgtgcaaactccaggacctattgtacaatatcctggatccaatgtcagatcgcatcctcacacaatcactggtccaccttcagcaccccgcggtccacccatggcacccataataatttcacagagaaccgcaagtcagctggcagcacctataagaatacctcaagttcacactatggacagttctggaaaaatcacactgactcctgtggttatattaacaggttacatggatgaagaacttgcaaaaaaatcttgttccaaaatccagattctaaaatgtggaggcactgcaaggtctcagaatagccgagaagaaaacaaggaagcactaaagaatgacatcatatttacgaattctgtagaatccttgaaatcagcacacataaaggagccagaaagagaaggaaaaggcactgatttagagaaagacaaaataggaatggaggtcaaggtagacagtgacgctggaataccaaaaagacaggaaacccaactaaaaatcagtgagatgagtataccacaaggacagggagcccaaataaagaaaagtgtgtcagatgtaccaagaggacaggagtcccaagtaaagaagagtgagtcaggtgtcccaaaaggacaagaagcccaagtaacgaagagtgggttggttgtactgaaaggacaggaagcccaggtagagaagagtgagatgggtgtgccaagaagacaggaatcccaagtaaagaagagtcagtctggtgtctcaaagggacaggaagcccaggtaaagaagagggagtcagttgtactgaaaggacaggaagcccaggtagagaagagtgagttgaaggtaccaaaaggacaagaaggccaagtagagaagactgaggcagatgtgccaaaggaacaagaggtccaagaaaagaagagtgaggcaggtgtactgaaaggaccagaatcccaagtaaagaacactgaggtgagtgtaccagaaacactggaatcccaagtaaagaagagtgagtcaggtgtactaaaaggacaggaagcccaagaaaagaaggagagttttgaggataaaggaaataatgataaagaaaaggagagagatgcagagaaagatccaaataaaaaagaaaaaggtgacaaaaacacaaaaggtgacaaaggaaaggacaaagttaaaggaaagagagaatcagaaatcaatggtgaaaaatcaaaaggctcgaaaagggcgaaggcaaatacaggaaggaagtacaacaaaaaagtggaagagtaaggataaattttttaaaggcccataagacaagtgattattatgattcccatactccagatacaaaccatatcccagccattgcctaaacagattacaattataaaatccctttcatcttcatatcacagtttctgctcttcagaagtttcaccctttttaatctctcagccacaaacctcagtttccaaatatttgttttataagttaagacgtatatgattccgtcaagaaagactggatactttctgaagtaaaacattttaattaaagaaatatatagtaa

SEQ ID NO: 119147 - DNA, 1696 bp, Homo sapiens
  Payload ID: 3348
  Gene Symbol: C6orf10
  Gene Name: chromosome 6 open reading frame 10
  ENST ID: ENST00000442822
  CDS Start-End: 194-1600
tttgcttaggtctgatcaatctgctccacacaatttctcagtgatcctctgcatctctgcctacaagggcctccctgacacccaagttcatattgctcagaaacagtgaacttgagtttttcgttttaccttgatctctctctgacaaagaaatccagatgatgcgagacctgatgaagacaatacatggaaaatgacagtcttggaaataactttggctgtcatcctgactctactgggacttgccatcctggctattttgttaacaagatgggcacgatgtaagcaaagtgaaatgtatatctccagatacagttcagaacaaagtgctagacttctggactatgaggatggtagaggatcccgacatgcatattcaacacaaagtgagagatccaaaagagattacacaccatcaaccaactctctagcactgtctcgatcaagtattgctttacctcaaggatccatgagtagtataaaatgtttacaaacaactgaagaacctccttccagaactgcaggagccatgatgcaattcacagcccctattcccggagctacaggacctatcaagctctctcaaaaaaccattgtgcaaactccaggacctattgtacaatatcctggatccaatgctggtccaccttcagcaccccgcggtccacccatggcacccataataatttcacagagaaccgcaagtcagctggcagcacctataataatttcgcagagaactgcaagaatacctcaagttcacactatggacagttctggaaaaatcacactgactcctgtggttatattaacaggttacatggatgaagaacttgcaaaaaaatcttgttccaaaatccagattctaaaatgtggaggcactgcaaggtctcagaatagccgagaagaaaacaaggaagcactaaagaatgacatcatatttacgaattctgtagaatccttgaaatcagcacacataaaggagccagaaagagaaggaaaaggcactgatttagagaaagacaaaataggaatggaggtcaaggtagacagtgacgctggaataccaaaaagacaggaaacccaactaaaaatcagtgagatgagtataccacaaggacagggagcccaaataaagaaaagtgtgtcagatgtaccaagaggacaggagtcccaagtaaagaagagtgagtcaggtgtcccaaaaggacaagaagcccaagtaacgaagagtgggttggttgtactgaaaggacaggaagcccaggtagagaagagtgagatgggtgtgccaagaagacaggaatcccaagtaaagaagagtcagtctggtgtctcaaagggacaggaagcccaggtaaagaagagggagtcagttgtactgaaaggacaggaagcccaggtagagaagagtgagttgaaggtaccaaaaggacaagaaggccaagtagagaagactgaggcagatgtgccaaaggaacaagaggtccaagaaaagaagagtgaggcaggtgtactgaaaggaccagaatcccaagtaaagaacactgagtgtttcaggaataaagacactcttatctatcatcatccagaagcttgagcacttgccaagaccgggaagtcaaacctgagatgccacactacagattatacacgttgtaagctaggtctcaataaattttctattcaaatcttt

SEQ ID NO: 119148 - DNA, 778 bp, Homo sapiens
  Payload ID: 3348
  Gene Symbol: C6orf10
  Gene Name: chromosome 6 open reading frame 10
  ENST ID: ENST00000423858
  CDS Start-End: 202-778
tcccatcatttgcttaggtctgatcaatctgctccacacaatttctcagtgatcctctgcatctctgcctacaagggcctccctgacacccaagttcatattgctcagaaacagtgaacttgagtttttcgttttaccttgatctctctctgacaaagaaatccagatgatgcgagacctgatgaagacaatacatggaaaatgacagtcttggaaataactttggctgtcatcctgactctactgggacttgccatcctggctattttgttaacaagatgggcacgacgtaagcaaagtgaaatgcatatctccagatacagttcagaacaaagtgctagacttctggactatgaggatggtagaggatcccgacatgcatattcaacacaaagtgacacttcatgtgataaccgagagagatccaaaagagattacacaccatcaaccaactctctagcactgtctcgatcaagtattgctttacctcaaggatccatgagtagtataaaatgtttacaaacaactgaagaacttccttccagaactgcaggagccatgatgcaattcacagcccctattcccggagctacaggacctatcaagctctctcaaaaaaccattgtgcaaactccaggacctattgtacaatatcctggacccaatgtcagatcgcatcctcacacaatcactggtccaccttcagcaccccgcggtccacccatggcacccataataatttcacagagaaccgcaagtcagctggcagcacctataa

SEQ ID NO: 119149 - DNA, 2173 bp, Homo sapiens
  Payload ID: 3348
  Gene Symbol: C6orf10
  Gene Name: chromosome 6 open reading frame 10
  ENST ID: ENST00000451857
  CDS Start-End: 202-1890
tcccatcatttgcttaggtctgatcaatctgctccacacaatttctcagtgatcctctgcatctctgcctacaagggcctccctgacacccaagttcatattgctcagaaacagtgaacttgagtttttcgttttatcttgatctctctctgacaaagaaatccagatgatgcgagacctgatgaagacaatacatggaaaatgacagtcttggaaataactttggctgtcatcctgactctactgggacttgccatcctggctattttgttaacaagatgggcacgacgtaagcaaagtgaaatgcatatctccagatacagttcagaacaaagtgctagacttctggactatgaggatggtagaggatcccgacatgcatattcaacacaaagtgacacttcatgtgataaccgagagagatccaaaagagattacacaccatcaaccaactctctagcactgtctcgatcaagtattgctttacctcaaggatccatgagtagtataaaatgtttacaaacaactgaagaacttccttccagaactgcaggagccatgatgcaattcacagcccctattcccggagctacaggacctatcaagctctctcaaaaaaccattgtgcaaactccaggacctattgtacaatatcctggacccaatgtcagatcgcatcctcacacaatcactggtccaccttcagcaccccgcggtccacccatggcacccataataatttcacagagaaccgcaagtcagctggcagcacctataagaatacctcaagttcacactatggacagttctggaaaaatcacactgactcctgtggttatattaacaggttacatggatgaagaacttgcaaaaaaaccttgttccaaaatccagattctaaaatgtggaggcactgcaaggtctcagaatagccgagaagaaaacaaggaagcactaaagaatgacatcatatttacgaattctgtagaatccttgaaatcagcacacataaaggagccagaaagagaaggaaaaggcactgatttagagaaagacaaaataggaatggaggtcaaggtagacagtgacgctggaataccaaaaagacaggaaacccaactaaaaatcagtgagatgagtataccacaaggacagggagcccaaataaagaaaagtgtgtcagatgtaccaagaggacaggagtcccaagtaaagaagagtgagtcaggtgtcccaaaaggacaagaagcccaagtaacgaagagtgggttggttgtactgaaaggacaggaagcccaggtagagaagagtgagatgggtgtgccaagaagacaggaatcccaagtaaagaagagtcagtctggtgtctcaaagggacaggaagcccaggtaaagaagagggagtcagttgtactgaaaggacaggaagcccaggtagagaagagtgagttgaaggtaccaaaaggacaagaaggccaagtagagaagactgaggcagatgtgccaaaggaacaagaggtccaagaaaagaagagtgaggcaggtgtactgaaaggaccagaatcccaagtaaagaacactgaggtgagtgtaccagaaacactggaatcccaagtaaagaagagtgagtcaggtgtactaaaaggacaggaagcccaagaaaagaaggagagttttgaggataaaggaaataatgataaagaaaaggagagagatgcagagaaagatccaaataaaaaagaaaaaggtgacaaaaacacaaaaggtgacaaaggaaaggacaaagttaaaggaaagagagaatcagaaatcaatggtgaaaaatcaaaaggctcgaaaagggcgaaggcaaatacaggaaggaagtacaacaaaaaagtggaagagtaaggataaattttttaaaggcccataagacaagtgattattatgattcccatactccagatacaaaccatatcccagccattgcctaaacagattacaattataaaatccctttcatcttcatatcacagtttctgctcttcagaagtttcaccctttttaatctctcagccacaaacctcagtttccaaatatttgtttcataagttaagacgtatatgattccgtcaagaaagactggatactttctgaagtaaaacattttaattaaagaaatatatagtaa

SEQ ID NO: 119150 - DNA, 2148 bp, Homo sapiens
  Payload ID: 3348
  Gene Symbol: C6orf10
  Gene Name: chromosome 6 open reading frame 10
  Uniprot ID: Q5SRN2
  ENST ID: ENST00000447241
  CDS Start-End: 174-1865
ctgctccacacaatttctcagtgatcctctgcatctctgcctacaagggcctccctgacacccaagttcatattgctcagaaacagtgaacttgagtttttcgttttaccttgatctctctctgacaaagaaatccagatgatgcgagacctgatgaagacaatacatggaaaatgacagtcttggaaataactttggctgtcatcctgactctactgggacttgccatcctggctattttgttaacaagatgggcacgatgtaagcaaagtgaaatgtatatctccagatacagttcagaacaaagtgctagacttctggactatgaggatggtagaggatcccgacatgcatattcaacacaaagtgacacttcatatgataaccgagagagatccaaaagagattacacaccatcaaccaactctctagtgtctatggcatctaagttctccctgggacaaacagaactcattcttcttttgatgtgttttattttagcactgtctcgatcaagtattggtagtataaaatgtttacaaacaactgaagaacctccttccagaactgcaggagccatgatgcaattcacagcccctattcccggagctacaggacctatcaagctctctcaaaaaaccattgtgcaaactccaggacctattgtacaatatcctggatccaatgctggtccaccttcagcaccccgcggtccacccatggcacccataataatttcacagagaaccgcaagaatacctcaagttcacactatggacagttctggaaaaatcacactgactcctgtggttatattaacaggttacatggatgaagaacttgcaaaaaaatcttgttccaaaatccagattctaaaatgtggaggcactgcaaggtctcagaatagccgagaagaaaacaaggaagcactaaagaatgacatcatatttacgaattctgtagaatccttgaaatcagcacacataaaggagccagaaagagaaggaaaaggcactgatttagagaaagacaaaataggaatggaggtcaaggtagacagtgacgctggaataccaaaaagacaggaaacccaactaaaaatcagtgagatgagtataccacaaggacagggagcccaaataaagaaaagtgtgtcagatgtaccaagaggacaggagtcccaagtaaagaagagtgagtcaggtgtcccaaaaggacaagaagcccaagtaacgaagagtgggttggttgtactgaaaggacaggaagcccaggtagagaagagtgagatgggtgtgccaagaagacaggaatcccaagtaaagaagagtcagtctggtgtctcaaagggacaggaagcccaggtaaagaagagggagtcagttgtactgaaaggacaggaagcccaggtagagaagagtgagttgaaggtaccaaaaggacaagaaggccaagtagagaagactgaggcagatgtgccaaaggaacaagaggtccaagaaaagaagagtgaggcaggtgtactgaaaggaccagaatcccaagtaaagaacactgaggtgagtgtaccagaaacactggaatcccaagtaaagaagagtgagtcaggtgtactaaaaggacaggaagcccaagaaaagaaggagagttttgaggataaaggaaataatgataaagaaaaggagagagatgcagagaaagatccaaataaaaaagaaaaaggtgacaaaaacacaaaaggtgacaaaggaaaggacaaagttaaaggaaagagagaatcagaaatcaatggtgaaaaatcaaaaggctcgaaaagggcgaaggcaaatacaggaaggaagtacaacaaaaaagtggaagagtaaggataaattttttaaaggcccataagacaagtgattattatgattcccatactccagatacaaaccatatcccagccattgcctaaacagattacaattataaaatccctttcatcttcatatcacagtttctgctcttcagaagtttcaccctttttaatctctcagccacaaacctcagtttccaaatatttgttttataagttaagacgtatatgattccgtcaagaaagactggatactttctgaagtaaaacattttaattaaagaaatatatagtaa

SEQ ID NO: 119151 - DNA, 2173 bp, Homo sapiens
  Payload ID: 3348
  Gene Symbol: C6orf10
  Gene Name: chromosome 6 open reading frame 10
  ENST ID: ENST00000427082
  CDS Start-End: 202-1890
tcccatcatttgcttaggtctgatcaatctgctccacgcaatttctcagtgatcctctgcatctctgcctacaagggcctccctgacacccaagttcatattgctcagaaacagtgaacttgagtttttcgttttatcttgatctctctctgacaaagaaatccagatgatgcgagacctgatgaagacaatacatggaaaatgacagtcttggaaataactttggctgtcatcctgactctactgggacttgccatcctggctattttgttaacaagatgggcacgacgtaagcaaagtgaaatgtatatctccagatacagttcagaacaaagtgctagacttctggactatgaggatggtagaggatcccgacatgcatattcaacacaaagtgacacttcatatgataaccgagagagatccaaaagagattacacaccatcaaccaactctctagcactgtctcgatcaagtattgctttacctcaaggatccatgagtagtataaaatgtttacaaacaactgaagaacctccttccagaactgcaggagccatgatgcaattcacagcccctattcccggagctacaggacctttcaagctctctcaaaaaaccattgtgcaaactctaggacctattgtacaatatcctggatccaatgtcagatcgcatcctcacacaatcactggtccaccttcagcaccccgcggtccacccatggcacccataataatttcacagagaaccgcaagtcagctggcagcacctataagaatacctcaagttcacactatggacagttctggaaaaatcacactgactcctgtggttatattaacaggttacatggatgaagaacttgcaaaaaaatcttgttccaaaatccagattctaaaatgtggaggcactgcaaggtctcagaatagccgagaagaaaacaaggaagcactaaagaatgacatcatatttacgaattctgtagaatccttgaaatcagcacacataaaggagccagaaagagaaggaaaaggcactgatttagagaaagacaaaataggaatggaggtcaaggtagacagtgacgctggaataccaaaaagacaggaaacccaactaaaaatcagtgagatgagtgtaccacaaggacagggagcccaaataaagaaaagtgtgtcagatgtaccaagaggacaggagtcccaagtaaagaagagtgagtcaggtgtcccaaaaggacaagaagcccaagtaacgaagagtgggttggttgtactgaaaggacaggaagcccaggtagagaagagtgagatgggtgtgccaagaagacaggaatcccaagtaaagaagagtcagtctggtgtctcaaagggacaggaagcccaggtaaagcagagggagtcagttgtactgaaaggacaggaagcccaggtagagaagagtgagttgaaggtaccaaaaggacaagaaggccaagtagagaagactgaggcagatgtgccaaaggaacaagaggtccaagaaaagaagagtgaggcaggtgtactgaaaggaccagaatcccaagtaaagaacactgaggtgagtgtaccagaaacactggaatcccaagtaaagaagagtgagtcaggtgtactaaaaggacaggaagcccaagaaaagaaggagagttttgaggataaaggaaataatgataaagaaaaggagagagatgcagagaaagatccaaataaaaaagaaaaaggtgacaaaaacacaaaaggtgacaaaggaaaggacaaagttaaaggaaagagagaatcagaaatcaatggtgaaaaatcaaaaggctcgaaaagggcgaaggcaaatacaggaaggaagtacaacaaaaaagtggaagagtaaggataaattttttaaaggcccataagacaagtgattattatgattcccatactccagatacaaaccatatcccagccattgcctaaacagattacaattataaaatccctttcatcttcatatcacagtttctgctcttcagaagtttcaccctttttaatctctcagccacaaacctcagtttccaaatatttgttttataagttaagacgtatatgattccgtcaagaaagactggatactttctgaagtaaaacattttaattaaagaaatatatagtaa

SEQ ID NO: 119152 - DNA, 2170 bp, Homo sapiens
  Payload ID: 3348
  Gene Symbol: C6orf10
  Gene Name: chromosome 6 open reading frame 10
  Uniprot ID: Q5SRN2
  ENST ID: ENST00000533191
  CDS Start-End: 202-1887
tcccatcatttgcttaggtctgatcaatctgctccacacaatttctcagtgatcctctgcatctctgcctacaagggcctccctgacacccaagttcatattgctcagaaacagtgaacttgagtttttcgttttaccttgatctctctctgacaaagaaatccagatgatgcgagacctgatgaagacaatacatggaaaatgacagtcttggaaataactttggctgtcatcctgactctactgggacttgccatcctggctattttgttaacaagatgggcacgatgtaagcaaagtgaaatgtatatctccagatacagttcagaacaaagtgctagacttctggactatgaggatggtagaggatcccgacatgcatattcaacacaaagtgacacttcatatgataaccgagagagatccaaaagagattacacaccatcaaccaactctctagcactgtctcgatcaagtattgctttacctcaaggatccatgagtagtataaaatgtttacaaacaactgaagaacctccttccagaactgcaggagccatgatgcaattcacagcccctattcccggagctacaggacctatcaagctctctcaaaaaaccattgtgcaaactccaggacctattgtacaatatcctggatccaatgctggtccaccttcagcaccccgcggtccacccatggcacccataataatttcacagagaaccgcaagtcagctggcagcacctataataatttcgcagagaactgcaagaatacctcaagttcacactatggacagttctggaaaaatcacactgactcctgtggttatattaacaggttacatggatgaagaacttgcaaaaaaatcttgttccaaaatccagattctaaaatgtggaggcactgcaaggtctcagaatagccgagaagaaaacaaggaagcactaaagaatgacatcatatttacgaattctgtagaatccttgaaatcagcacacataaaggagccagaaagagaaggaaaaggcactgatttagagaaagacaaaataggaatggaggtcaaggtagacagtgacgctggaataccaaaaagacaggaaacccaactaaaaatcagtgagatgagtataccacaaggacagggagcccaaataaagaaaagtgtgtcagatgtaccaagaggacaggagtcccaagtaaagaagagtgagtcaggtgtcccaaaaggacaagaagcccaagtaacgaagagtgggttggttgtactgaaaggacaggaagcccaggtagagaagagtgagatgggtgtgccaagaagacaggaatcccaagtaaagaagagtcagtctggtgtctcaaagggacaggaagcccaggtaaagaagagggagtcagttgtactgaaaggacaggaagcccaggtagagaagagtgagttgaaggtaccaaaaggacaagaaggccaagtagagaagactgaggcagatgtgccaaaggaacaagaggtccaagaaaagaagagtgaggcaggtgtactgaaaggaccagaatcccaagtaaagaacactgaggtgagtgtaccagaaacactggaatcccaagtaaagaagagtgagtcaggtgtactaaaaggacaggaagcccaagaaaagaaggagagttttgaggataaaggaaataatgataaagaaaaggagagagatgcagagaaagatccaaataaaaaagaaaaaggtgacaaaaacacaaaaggtgacaaaggaaaggacaaagttaaaggaaagagagaatcagaaatcaatggtgaaaaatcaaaaggctcgaaaagggcgaaggcaaatacaggaaggaagtacaacaaaaaagtggaagagtaaggataaattttttaaaggcccataagacaagtgattattatgattcccatactccagatacaaaccatatcccagccattgcctaaacagattacaattataaaatccctttcatcttcatatcacagtttctgctcttcagaagtttcaccctttttaatctctcagccacaaacctcagtttccaaatatttgttttataagttaagacgtatatgattccgtcaagaaagactggatactttctgaagtaaaacattttaattaaagaaatatatagtaa

SEQ ID NO: 119153 - DNA, 549 bp, Homo sapiens
  Payload ID: 3348
  Gene Symbol: C6orf10
  Gene Name: chromosome 6 open reading frame 10
  ENST ID: ENST00000534588
  CDS Start-End: 174-549
ctgctccacacaatttctcagtgatcctctgcatctctgcctacaagggcctccctgacacccaagttcatattgctcagaaacagtgaacttgagtttttcgttttaccttgatctctctctgacaaagaaatccagatgatgcgagacctgatgaagacaatacatggaaaatgacagtcttggaaataactttggctgtcatcctgactctactgggacttgccatcctggctattttgttaacaagatgggcacgatgtaagcaaagtgaaatgtatatctccagatacagttcagaacaaagtgctagacttctggactatgaggatggtagaggatcccgacatgcatattcaacacaaagtgacacttcatatgataaccgagagagatccaaaagagattacacaccatcaaccaactctctagtgtctatggcatctaagttctccctgggacaaacagaactcattcttcttttgatgtgttttattttagcactgtctcgatcaagtattgctttacctcaaggatccatgatgcaat

SEQ ID NO: 119154 - DNA, 563 bp, Homo sapiens
  Payload ID: 3348
  Gene Symbol: C6orf10
  Gene Name: chromosome 6 open reading frame 10
  ENST ID: ENST00000532023
  CDS Start-End: 167-563
acacaatttctcagtgatcctctgcatctctgcctacaagggcctccctgacacccaagttcatattgctcagaaacagtgaacttgagtttttcgttttaccttgatctctctctgacaaagaaatccagatgatgcgagacctgatgaagacaatacatggaaaatgacagtcttggaaataactttggctgtcatcctgactctactgggacttgccatcctggctattttgttaacaagatgggcacgatgtaagcaaagtgaaatgtatatctccagatacagttcagaacaaagtgctagacttctggactatgaggatggtagagatttttcttctcagagatctaaaagaggaagaggatcccgacatgcatattcaacacaaagtgagagatccaaaagagattacacaccatcaaccaactctctagcactgtctcgatcaagtattgctttacctcaaggatccatgagtagtataaaatgtttacaaacaactgaagaacctccttccagaactgcaggagccatgatgcaattcacagcccctattcccg

SEQ ID NO: 119155 - DNA, 2076 bp, Homo sapiens
  Payload ID: 3348
  Gene Symbol: C6orf10
  Gene Name: chromosome 6 open reading frame 10
  ENST ID: ENST00000527965
  CDS Start-End: 167-1810
acacaatttctcagtgatcctctgcatctctgcctacaagggcctccctgacacccaagttcatattgctcagaaacagtgaacttgagtttttcgttttaccttgatctctctctgacaaagaaatccagatgatgcgagacctgatgaagacaatacatggaaaatgacagtcttggaaataactttggctgtcatcctgactctactgggacttgccatcctggctattttgttaacaagatgggcacgatgtaagcaaagtgaaatgtatatctccagatacagttcagaacaaagtgctagacttctggactatgaggatggtagaggatcccgacatgcatattcaacacaaagtgagagatccaaaagagattacacaccatcaaccaactctctagcactgtctcgatcaagtattgctttacctcaaggatccatgagtagtataaaatgtttacaaacaactgaagaacctccttccagaactgcaggagccatgatgcaattcacagcccctattcccggagctacaggacctatcaagctctctcaaaaaaccattgtgcaaactccaggacctattgtacaatatcctggatccaatgctggtccaccttcagcaccccgcggtccacccatggcacccataataatttcacagagaaccgcaagtcagctggcagcacctataagaatacctcaagttcacactatggacagttctggaaaaatcacactgactcctgtggttatattaacaggttacatggatgaagaacttgcaaaaaaatcttgttccaaaatccagattctaaaatgtggaggcactgcaaggtctcagaatagccgagaagaaaacaaggaagcactaaagaatgacatcatatttacgaattctgtagaatccttgaaatcagcacacataaaggagccagaaagagaaggaaaaggcactgatttagagaaagacaaaataggaatggaggtcaaggtagacagtgacgctggaataccaaaaagacaggaaacccaactaaaaatcagtgagatgagtataccacaaggacagggagcccaaataaagaaaagtgtgtcagatgtaccaagaggacaggagtcccaagtaaagaagagtgagtcaggtgtcccaaaaggacaagaagcccaagtaacgaagagtgggttggttgtactgaaaggacaggaagcccaggtagagaagagtgagatgggtgtgccaagaagacaggaatcccaagtaaagaagagtcagtctggtgtctcaaagggacaggaagcccaggtaaagaagagggagtcagttgtactgaaaggacaggaagcccaggtagagaagagtgagttgaaggtaccaaaaggacaagaaggccaagtagagaagactgaggcagatgtgccaaaggaacaagaggtccaagaaaagaagagtgaggcaggtgtactgaaaggaccagaatcccaagtaaagaacactgaggtgagtgtaccagaaacactggaatcccaagtaaagaagagtgagtcaggtgtactaaaaggacaggaagcccaagaaaagaaggagagttttgaggataaaggaaataatgataaagaaaaggagagagatgcagagaaagatccaaataaaaaagaaaaaggtgacaaaaacacaaaaggtgacaaaggaaaggacaaagttaaaggaaagagagaatcagaaatcaatggtgaaaaatcaaaaggctcgaaaagggcgaaggcaaatacaggaaggaagtacaacaaaaaagtggaagagtaaggataaattttttaaaggcccataagacaagtgattattatgattcccatactccagatacaaaccatatcccagccattgcctaaacagattacaattataaaatccctttcatcttcatatcacagtttctgctcttcagaagtttcaccctttttaatctctcagccacaaacctcagtttccaaatatttgttttataagttaagacgtatatgattccgtcaagaaagactggatactttctgaagtaaaacattttaatt

SEQ ID NO: 119156 - DNA, 2173 bp, Homo sapiens
  Payload ID: 3348
  Gene Symbol: C6orf10
  Gene Name: chromosome 6 open reading frame 10
  Uniprot ID: Q5SRN2
  ENST ID: ENST00000548927
  CDS Start-End: 207-1892
cacactcccatcatttgcttaggtctgatcaatctgctccacacaatttctcagtgatcctctgcatctctgcctacaagggcctccctgacacccaagttcatattgctcagaaacagtgaacttgagtttttcgttttatcttgatctctctctgacaaagaaatccagatgatgcgagacctgatgaagacaatacatggaaaatgacagtcttggaaataactttggctgtcatcctgactctactgggacttgccatcctggctattttgttaacaagatgggcacgatgtaagcaaagtgaaatgtatatctccagatacagttcagaacaaagtgctagacttctggactatgaggatggtagaggatcccgacatgcatattcaacacaaagtgacacttcatatgataaccgagagagatccaaaagagattacacaccatcaaccaactctctagcactgtctcgatcaagtattgctttacctcaaggatccatgagtagtataaaatgtttacaaacaactgaagaacctccttccagaactgcaggagccatgatgcaattcacagcccctattcccggagctacaggacctatcaagctctctcaaaaaaccattgtgcaaactccaggacctattgtacaatatcctggatccaatgctggtccaccttcagcaccccgcggtccacccatggcacccataataatttcacagagaaccgcaagtcagctggcagcacctataataatttcgcagagaactgcaagaatacctcaagttcacactatggacagttctggaaaaatcacactgactcctgtggttatattaacaggttacatggatgaagaacttgcaaaaaaatcttgttccaaaatccagattctaaaatgtggaggcactgcaaggtctcagaatagccgagaagaaaacaaggaagcactaaagaatgacatcatatttacgaattctgtagaatccttgaaatcagcacacataaaggagccagaaagagaaggaaaaggcactgatttagagaaagacaaaataggaatggaggtcaaggtagacagtgacgctggaataccaaaaagacaggaaacccaactaaaaatcagtgagatgagtataccacaaggacagggagcccaaataaagaaaagtgtgtcagatgtaccaagaggacaggagtcccaagtaaagaagagtgagtcaggtgtcccaaaaggacaagaagcccaagtaacgaagagtgggttggttgtactgaaaggacaggaagcccaggtagagaagagtgagatgggtgtgccaagaagacaggaatcccaagtaaagaagagtcagtctggtgtctcaaagggacaggaagcccaggtaaagaagagggagtcagttgtactgaaaggacaggaagcccaggtagagaagagtgagttgaaggtaccaaaaggacaagaaggccaagtagagaagactgaggcagatgtgccaaaggaacaagaggtccaagaaaagaagagtgaggcaggtgtactgaaaggaccagaatcccaagtaaagaacactgaggtgagtgtaccagaaacactggaatcccaagtaaagaagagtgagtcaggtgtactaaaaggacaggaagcccaagaaaagaaggagagttttgaggataaaggaaataatgataaagaaaaggagagagatgcagagaaagatccaaataaaaaagaaaaaggtgacaaaaacacaaaaggtgacaaaggaaaggacaaagttaaaggaaagagagaatcagaaatcaatggtgaaaaatcaaaaggctcgaaaagggcgaaggcaaatacaggaaggaagtacaacaaaaaagtggaagagtaaggataaattttttaaaggcccataagacaagtgattattatgattcccatactccagatacaaaccatatcccagccattgcctaaacagattacaattataaaatccctttcatcttcatatcacagtttctgctcttcagaagtttcaccctttttaatctctcagccacaaacctcagtttccaaatatttgttttataagttaagacgtatatgattccgtcaagaaagactggatactttctgaagtaaaacattttaattaaagaaatatatagt

SEQ ID NO: 119157 - DNA, 2125 bp, Homo sapiens
  Payload ID: 3348
  Gene Symbol: C6orf10
  Gene Name: chromosome 6 open reading frame 10
  ENST ID: ENST00000547550
  CDS Start-End: 174-1859
ctgctccacacaatttctcagtgatcctctgcatctctgcctacaagggcctccctgacacccaagttcatattgctcagaaacagtgaacttgagtttttcgttttatcttgatctctctctgacaaagaaatccagatgatgcgagacctgatgaagacaatacatggaaaatgacagtcttggaaataactttggctgtcatcctgactctactgggacttgccatcctggctattttgttaacaagatgggcacgatgtaagcaaagtgaaatgtatatctccagatacagttcagaacaaagtgctagacttctggactatgaggatggtagaggatcccgacatgcatattcaacacaaagtggtaatttatgttttcagagatccaaaagagattacacaccatcaaccaactctctagtgtctatggcatctaagttctccctgggacaaacagaactcattcttcttttgatgtgttttattttagcactgtctcgatcaagtattggtagtataaaatgtttacaaacaactgaagaacctccttccagaactgcaggagccatgatgcaattcacagcccctattcccggagctacaggacctatcaagctctctcaaaaaaccattgtgcaaactccaggacctattgtacaatatcctggatccaatgctggtccaccttcagcaccccgcggtccacccatggcacccataataatttcacagagaaccgcaagaatacctcaagttcacactatggacagttctggaaaaatcacactgactcctgtggttatattaacaggttacatggatgaagaacttgcaaaaaaatcttgttccaaaatccagattctaaaatgtggaggcactgcaaggtctcagaatagccgagaagaaaacaaggaagcactaaagaatgacatcatatttacgaattctgtagaatccttgaaatcagcacacataaaggagccagaaagagaaggaaaaggcactgatttagagaaagacaaaataggaatggaggtcaaggtagacagtgacgctggaataccaaaaagacaggaaacccaactaaaaatcagtgagatgagtataccacaaggacagggagcccaaataaagaaaagtgtgtcagatgtaccaagaggacaggagtcccaagtaaagaagagtgagtcaggtgtcccaaaaggacaagaagcccaagtaacgaagagtgggttggttgtactgaaaggacaggaagcccaggtagagaagagtgagatgggtgtgccaagaagacaggaatcccaagtaaagaagagtcagtctggtgtctcaaagggacaggaagcccaggtaaagaagagggagtcagttgtactgaaaggacaggaagcccaggtagagaagagtgagttgaaggtaccaaaaggacaagaaggccaagtagagaagactgaggcagatgtgccaaaggaacaagaggtccaagaaaagaagagtgaggcaggtgtactgaaaggaccagaatcccaagtaaagaacactgaggtgagtgtaccagaaacactggaatcccaagtaaagaagagtgagtcaggtgtactaaaaggacaggaagcccaagaaaagaaggagagttttgaggataaaggaaataatgataaagaaaaggagagagatgcagagaaagatccaaataaaaaagaaaaaggtgacaaaaacacaaaaggtgacaaaggaaaggacaaagttaaaggaaagagagaatcagaaatcaatggtgaaaaatcaaaaggctcgaaaagggcgaaggcaaatacaggaaggaagtacaacaaaaaagtggaagagtaaggataaattttttaaaggcccataagacaagtgattattatgattcccatactccagatacaaaccatatcccagccattgcctaaacagattacaattataaaatccctttcatcttcatatcacagtttctgctcttcagaagtttcaccctttttaatctctcagccacaaacctcagtttccaaatatttgttttataagttaagacgtatatgattccgtcaagaaagactggatactttctgaagtaaaacattttaatt

SEQ ID NO: 119158 - DNA, 1904 bp, Homo sapiens
  Payload ID: 3348
  Gene Symbol: C6orf10
  Gene Name: chromosome 6 open reading frame 10
  ENST ID: ENST00000548975
  CDS Start-End: 207-1904
cacactcccatcatttgcttaggtctgatcaatctgctccacacaatttctcagtgatcctctgcatctctgcctacaagggcctccctgacacccaagttcatattgctcagaaacagtgaacttgagtttttcgttttatcttgatctctctctgacaaagaaatccagatgatgcgagacctgatgaagacaatacatggaaaatgacagtcttggaaataactttggctgtcatcctgactctactgggacttgccatcctggctattttgttaacaagatgggcacgatgtaagcaaagtgaaatgtatatctccagatacagttcagaacaaagtgctagacttctggactatgaggatggtagaggatcccgacatgcatatcacaaagtgacacttcatatgataaccgagcgcatatccaaaagagattacacaccatcaaccaactctctagcactgtctcgatcaagtattgctttacctcaaggatccatgagtagtataaaatgtttacaaacaactgaagaacctccttccagaactgcaggagccatgatgcaattcacagcccctattcagccggagctacaggacctatcaagctctctcaaaaaaccattgtgcaaactccaggacctattgtacaattggatccaatgtcagatcgcatcctcacacaatcatacagtccaccttcagcaccccggtccacccatggcacccataataatttcacagagaaccgcaagtcagctggcagcacctataagaatacctcaagttcacactatggacagttctggaaaaatcacactgactcctgtggttatattaacaggttacatggatgaagaacttgcaaaaaaatcttgttccaaaatccagattctaaaatgtggaggcactgcaaggtctcagaatagccgagaagaaaacaaggaagcactaaagaatgacatcatatttacgaattctgtagaatccttgaaatcagcacacataaaggagccagaaagagaaggaaaaggcactgatttagagaaagacaaaataggaatggaggtcaaggtagacagtgacgctggaataccaaaaagacaggaaacccaactaaaaatcagtgatgagtataccacaaggacagggagcccaaataaagaaaagtgtgtcagatgtaccaagaggacaggacaagtaaagaagagtgagtcaggtgtcccaaaaggacaagaagcccaagtaacgaagagtgggttggttgtactgaaaggacaggaagcccaggtagagaagagtgagatgggtgtgccaagaagacaggaatcccaagtaaagaagagtcagtctggtgtctcaaagggacaggaagcccaggtaaagaagagggagtcagttgtactgaaaggacaggaagcccaggtagagaagagtgagttgaaggtaccaaaaggacaagaaggccaagtagagaagactgaggcagatgtgccaaaggaacaagaggtccaagaaaagaagagtgaggcaggtgtactgaaaggaccagaatcccaagtaaagaacactgaggtgagtgtaccagaaacactggaatcccaagtaaagaagagtgagtcaggtgtactaaaaggacaggaagcccaagaaaagaaggagagttttgaggataaaggaaataatgataaagaaaaggagagagatgcagagaaagatccaaataaaaaagaaaaaggtgacaaaaacacaaaaggtgacaaaggaaaggacaaagttaaaggaaagagagaatcagaaatcaatggtgaaaaatcaaaaggctcgaaaaggaggcaaatacaggaaggaagtacaacaaaaaagtggaagagtaaggataaattttttaaaggcccataa

SEQ ID NO: 119159 - DNA, 2131 bp, Homo sapiens
  Payload ID: 3348
  Gene Symbol: C6orf10
  Gene Name: chromosome 6 open reading frame 10
  ENST ID: ENST00000617503
  CDS Start-End: 207-1850
cacactcccatcatttgcttaggtctgatcaatctgctccacacaatttctcagtgatcctctgcatctctgcctacaagggcctccctgacacccaagttcatattgctcagaaacagtgaacttgagtttttcgttttatcttgatctctctctgacaaagaaatccagatgatgcgagacctgatgaagacaatacatggaaaatgacagtcttggaaataactttggctgtcatcctgactctactgggacttgccatcctggctattttgttaacaagatgggcacgatgtaagcaaagtgaaatgtatatctccagatacagttcagaacaaagtgctagacttctggactatgaggatggtagaggatcccgacatgcatattcaacacaaagtgagagatccaaaagagattacacaccatcaaccaactctctagcactgtctcgatcaagtattgctttacctcaaggatccatgagtagtataaaatgtttacaaacaactgaagaacctccttccagaactgcaggagccatgatgcaattcacagcccctattcccggagctacaggacctatcaagctctctcaaaaaaccattgtgcaaactccaggacctattgtacaatatcctggatccaatgctggtccaccttcagcaccccgcggtccacccatggcacccataataatttcacagagaaccgcaagtcagctggcagcacctataagaatacctcaagttcacactatggacagttctggaaaaatcacactgactcctgtggttatattaacaggttacatggatgaagaacttgcaaaaaaatcttgttccaaaatccagattctaaaatgtggaggcactgcaaggtctcagaatagccgagaagaaaacaaggaagcactaaagaatgacatcatatttacgaattctgtagaatccttgaaatcagcacacataaaggagccagaaagagaaggaaaaggcactgatttagagaaagacaaaataggaatggaggtcaaggtagacagtgacgctggaataccaaaaagacaggaaacccaactaaaaatcagtgagatgagtataccacaaggacagggagcccaaataaagaaaagtgtgtcagatgtaccaagaggacaggagtcccaagtaaagaagagtgagtcaggtgtcccaaaaggacaagaagcccaagtaacgaagagtgggttggttgtactgaaaggacaggaagcccaggtagagaagagtgagatgggtgtgccaagaagacaggaatcccaagtaaagaagagtcagtctggtgtctcaaagggacaggaagcccaggtaaagaagagggagtcagttgtactgaaaggacaggaagcccaggtagagaagagtgagttgaaggtaccaaaaggacaagaaggccaagtagagaagactgaggcagatgtgccaaaggaacaagaggtccaagaaaagaagagtgaggcaggtgtactgaaaggaccagaatcccaagtaaagaacactgaggtgagtgtaccagaaacactggaatcccaagtaaagaagagtgagtcaggtgtactaaaaggacaggaagcccaagaaaagaaggagagttttgaggataaaggaaataatgataaagaaaaggagagagatgcagagaaagatccaaataaaaaagaaaaaggtgacaaaaacacaaaaggtgacaaaggaaaggacaaagttaaaggaaagagagaatcagaaatcaatggtgaaaaatcaaaaggctcgaaaagggcgaaggcaaatacaggaaggaagtacaacaaaaaagtggaagagtaaggataaattttttaaaggcccataagacaagtgattattatgattcccatactccagatacaaaccatatcccagccattgcctaaacagattacaattataaaatccctttcatcttcatatcacagtttctgctcttcagaagtttcaccctttttaatctctcagccacaaacctcagtttccaaatatttgttttataagttaagacgtatatgattccgtcaagaaagactggatactttctgaagtaaaacattttaattaaagaaatatatagt

SEQ ID NO: 119160 - DNA, 1879 bp, Homo sapiens
  Payload ID: 3348
  Gene Symbol: C6orf10
  Gene Name: chromosome 6 open reading frame 10
  ENST ID: ENST00000620562
  CDS Start-End: 194-1879
tttgcttaggtctgatcaatctgctccacacaatttctcagtgatcctctgcatctctgcctacaagggcctccctgacacccaagttcatattgctcagaaacagtgaacttgagtttttcgttttatcttgatctctctctgacaaagaaatccagatgatgcgagacctgatgaagacaatacatggaaaatgacagtcttggaaataactttggctgtcatcctgactctactgggacttgccatcctggctattttgttaacaagatgggcacgacgtaagcaaagtgaaatgcatatctccagatacagttcagaacaaagtgctagacttctggactatgaggatggtagaggatcccgacatgcatattcaacacaaagtgacacttcatgtgataaccgagagagatccaaaagagattacacaccatcaaccaactctctagcactgtctcgatcaagtattgctttacctcaaggatccatgagtagtataaaatgtttacaaacaactgaagaacttccttccagaactgcaggagccatgatgcaattcacagcccctattcccggagctacaggacctatcaagctctctcaaaaaaccattgtgcaaactccaggacctattgtacaatatcctggacccaatgctggtccaccttcagcaccccgcggtccacccatggcacccataataatttcacagagaaccgcaagtcagctggcagcacctataataatttcgcagagaactgcaagaatacctcaagttcacactatggacagttctggaaaaatcacactgactcctgtggttatattaacaggttacatggatgaagaacttgcaaaaaaaccttgttccaaaatccagattctaaaatgtggaggcactgcaaggtctcagaatagccgagaagaaaacaaggaagcactaaagaatgacatcatatttacgaattctgtagaatccttgaaatcagcacacataaaggagccagaaagagaaggaaaaggcactgatttagagaaagacaaaataggaatggaggtcaaggtagacagtgacgctggaataccaaaaagacaggaaacccaactaaaaatcagtgagatgagtataccacaaggacagggagcccaaataaagaaaagtgtgtcagatgtaccaagaggacaggagtcccaagtaaagaagagtgagtcaggtgtcccaaaaggacaagaagcccaagtaacgaagagtgggttggttgtactgaaaggacaggaagcccaggtagagaagagtgagatgggtgtgccaagaagacaggaatcccaagtaaagaagagtcagtctggtgtctcaaagggacaggaagcccaggtaaagaagagggagtcagttgtactgaaaggacaggaagcccaggtagagaagagtgagttgaaggtaccaaaaggacaagaaggccaagtagagaagactgaggcagatgtgccaaaggaacaagaggtccaagaaaagaagagtgaggcaggtgtactgaaaggaccagaatcccaagtaaagaacactgaggtgagtgtaccagaaacactggaatcccaagtaaagaagagtgagtcaggtgtactaaaaggacaggaagcccaagaaaagaaggagagttttgaggataaaggaaataatgataaagaaaaggagagagatgcagagaaagatccaaataaaaaagaaaaaggtgacaaaaacacaaaaggtgacaaaggaaaggacaaagttaaaggaaagagagaatcagaaatcaatggtgaaaaatcaaaaggctcgaaaagggcgaaggcaaatacaggaaggaagtacaacaaaaaagtggaagagtaa

SEQ ID NO: 119161 - DNA, 1692 bp, Homo sapiens
  Payload ID: 3348
  Gene Symbol: C6orf10
  Gene Name: chromosome 6 open reading frame 10
  ENST ID: ENST00000620408
  CDS Start-End: 1-1692
atgacagtcttggaaataactttggctgtcatcctgactctactgggacttgccatcctggctattttgttaacaagatgggcacgacgtaagcaaagtgaaatgtatatctccagatacagttcagaacaaagtgctagacttctggactatgaggatggtagaggatcccgacatgcatattcaacacaaagtgacacttcatatgataaccgagagagatccaaaagagattacacaccatcaaccaactctctagtgtctatggcatctaagttctccctgggacaaacagaactcattcttcttttgatgtgttttattttagcactgtctcgatcaagtattggtagtataaaatgtttacaaacaactgaagaacctccttccagaactgcaggagccatgatgcaattcacagcccctattcccggagctacaggacctatcaagctctctcaaaaaaccattgtgcaaactctaggacctattgtacaatatcctggatccaatgctggtccaccttcagcaccccgcggtccacccatggcacccataataatttcgcagagaactgcaagaatacctcaagttcacactatggacagttctggaaaaatcacactgactcctgtggttatattaacaggttacatggatgaagaacttgcaaaaaaatcttgttccaaaatccagattctaaaatgtggaggcactgcaaggtctcagaatagccgagaagaaaacaaggaagcactaaagaatgacatcatatttacgaattctgtagaatccttgaaatcagcacacataaaggagccagaaagagaaggaaaaggcactgatttagagaaagacaaaataggaatggaggtcaaggtagacagtgacgctggaataccaaaaagacaggaaacccaactaaaaatcagtgagatgagtataccacaaggacagggagcccaaataaagaaaagtgtgtcagatgtaccaagaggacaggagtcccaagtaaagaagagtgagtcaggtgtcccaaaaggacaagaagcccaagtaacgaagagtgggttggttgtactgaaaggacaggaagcccaggtagagaagagtgagatgggtgtgccaagaagacaggaatcccaagtaaagaagagtcagtctggtgtctcaaagggacaggaagcccaggtaaagaagagggagtcagttgtactgaaaggacaggaagcccaggtagagaagagtgagttgaaggtaccaaaaggacaagaaggccaagtagagaagactgaggcagatgtgccaaaggaacaagaggtccaagaaaagaagagtgaggcaggtgtactgaaaggaccagaatcccaagtaaagaacactgaggtgagtgtaccagaaacactggaatcccaagtaaagaagagtgagtcaggtgtactaaaaggacaggaagcccaagaaaagaaggagagttttgaggataaaggaaataatgataaagaaaaggagagagatgcagagaaagatccaaataaaaaagaaaaaggtgacaaaaacacaaaaggtgacaaaggaaaggacaaagttaaaggaaagagagaatcagaaatcaatggtgaaaaatcaaaaggctcgaaaagggcgaaggcaaatacaggaaggaagtacaacaaaaaagtggaagagtaa

SEQ ID NO: 119162 - DNA, 1644 bp, Homo sapiens
  Payload ID: 3348
  Gene Symbol: C6orf10
  Gene Name: chromosome 6 open reading frame 10
  ENST ID: ENST00000613493
  CDS Start-End: 1-1644
atgacagtcttggaaataactttggctgtcatcctgactctactgggacttgccatcctggctattttgttaacaagatgggcacgacgtaagcaaagtgaaatgtatatctccagatacagttcagaacaaagtgctagacttctggactatgaggatggtagaggatcccgacatgcatattcaacacaaagtgagagatccaaaagagattacacaccatcaaccaactctctagcactgtctcgatcaagtattgctttacctcaaggatccatgagtagtataaaatgtttacaaacaactgaagaacctccttccagaactgcaggagccatgatgcaattcacagcccctattcccggagctacaggacctatcaagctctctcaaaaaaccattgtgcaaactctaggacctattgtacaatatcctggatccaatgctggtccaccttcagcaccccgcggtccacccatggcacccataataatttcacagagaaccgcaagtcagctggcagcacctataagaatacctcaagttcacactatggacagttctggaaaaatcacactgactcctgtggttatattaacaggttacatggatgaagaacttgcaaaaaaatcttgttccaaaatccagattctaaaatgtggaggcactgcaaggtctcagaatagccgagaagaaaacaaggaagcactaaagaatgacatcatatttacgaattctgtagaatccttgaaatcagcacacataaaggagccagaaagagaaggaaaaggcactgatttagagaaagacaaaataggaatggaggtcaaggtagacagtgacgctggaataccaaaaagacaggaaacccaactaaaaatcagtgagatgagtgtaccacaaggacagggagcccaaataaagaaaagtgtgtcagatgtaccaagaggacaggagtcccaagtaaagaagagtgagtcaggtgtcccaaaaggacaagaagcccaagtaacgaagagtgggttggttgtactgaaaggacaggaagcccaggtagagaagagtgagatgggtgtgccaagaagacaggaatcccaagtaaagaagagtcagtctggtgtctcaaagggacaggaagcccaggtaaagaagagggagtcagttgtactgaaaggacaggaagcccaggtagagaagagtgagttgaaggtaccaaaaggacaagaaggccaagtagagaagactgaggcagatgtgccaaaggaacaagaggtccaagaaaagaagagtgaggcaggtgtactgaaaggaccagaatcccaagtaaagaacactgaggtgagtgtaccagaaacactggaatcccaagtaaagaagagtgagtcaggtgtactaaaaggacaggaagcccaagaaaagaaggagagttttgaggataaaggaaataatgataaagaaaaggagagagatgcagagaaagatccaaataaaaaagaaaaaggtgacaaaaacacaaaaggtgacaaaggaaaggacaaagttaaaggaaagagagaatcagaaatcaatggtgaaaaatcaaaaggctcgaaaagggcgaaggcaaatacaggaaggaagtacaacaaaaaagtggaagagtaa

SEQ ID NO: 119163 - DNA, 1644 bp, Homo sapiens
  Payload ID: 3348
  Gene Symbol: C6orf10
  Gene Name: chromosome 6 open reading frame 10
  ENST ID: ENST00000614741
  CDS Start-End: 1-1644
atgacagtcttggaaataactttggctgtcatcctgactctactgggacttgccatcctggctattttgttaacaagatgggcacgacgtaagcaaagtgaaatgtatatctccagatacagttcagaacaaagtgctagacttctggactatgaggatggtagaggatcccgacatgcatattcaacacaaagtgagagatccaaaagagattacacaccatcaaccaactctctagcactgtctcgatcaagtattgctttacctcaaggatccatgagtagtataaaatgtttacaaacaactgaagaacctccttccagaactgcaggagccatgatgcaattcacagcccctattcccggagctacaggacctatcaagctctctcaaaaaaccattgtgcaaactctaggacctattgtacaatatcctggatccaatgctggtccaccttcagcaccccgcggtccacccatggcacccataataatttcacagagaaccgcaagtcagctggcagcacctataagaatacctcaagttcacactatggacagttctggaaaaatcacactgactcctgtggttatattaacaggttacatggatgaagaacttgcaaaaaaatcttgttccaaaatccagattctaaaatgtggaggcactgcaaggtctcagaatagccgagaagaaaacaaggaagcactaaagaatgacatcatatttacgaattctgtagaatccttgaaatcagcacacataaaggagccagaaagagaaggaaaaggcactgatttagagaaagacaaaataggaatggaggtcaaggtagacagtgacgctggaataccaaaaagacaggaaacccaactaaaaatcagtgagatgagtataccacaaggacagggagcccaaataaagaaaagtgtgtcagatgtaccaagaggacaggagtcccaagtaaagaagagtgagtcaggtgtcccaaaaggacaagaagcccaagtaacgaagagtgggttggttgtactgaaaggacaggaagcccaggtagagaagagtgagatgggtgtgccaagaagacaggaatcccaagtaaagaagagtcagtctggtgtctcaaagggacaggaagcccaggtaaagaagagggagtcagttgtactgaaaggacaggaagcccaggtagagaagagtgagttgaaggtaccaaaaggacaagaaggccaagtagagaagactgaggcagatgtgccaaaggaacaagaggtccaagaaaagaagagtgaggcaggtgtactgaaaggaccagaatcccaagtaaagaacactgaggtgagtgtaccagaaacactggaatcccaagtaaagaagagtgagtcaggtgtactaaaaggacaggaagcccaagaaaagaaggagagttttgaggataaaggaaataatgataaagaaaaggagagagatgcagagaaagatccaaataaaaaagaaaaaggtgacaaaaacacaaaaggtgacaaaggaaaggacaaagttaaaggaaagagagaatcagaaatcaatggtgaaaaatcaaaaggctcgaaaagggcgaaggcaaatacaggaaggaagtacaacaaaaaagtggaagagtaa

SEQ ID NO: 119164 - DNA, 2131 bp, Homo sapiens
  Payload ID: 3348
  Gene Symbol: C6orf10
  Gene Name: chromosome 6 open reading frame 10
  ENST ID: ENST00000612773
  CDS Start-End: 207-1850
cacactcccatcatttgcttaggtctgatcaatctgctccacacaatttctcagtgatcctctgcatctctgcctacaagggcctccctgacacccaagttcatattgctcagaaacagtgaacttgagtttttcgttttatcttgatctctctctgacaaagaaatccagatgatgcgagacctgatgaagacaatacatggaaaatgacagtcttggaaataactttggctgtcatcctgactctactgggacttgccatcctggctattttgttaacaagatgggcacgacgtaagcaaagtgaaatgcatatctccagatacagttcagaacaaagtgctagacttctggactatgaggatggtagaggatcccgacatgcatattcaacacaaagtgagagatccaaaagagattacacaccatcaaccaactctctagcactgtctcgatcaagtattgctttacctcaaggatccatgagtagtataaaatgtttacaaacaactgaagaacttccttccagaactgcaggagccatgatgcaattcacagcccctattcccggagctacaggacctatcaagctctctcaaaaaaccattgtgcaaactccaggacctattgtacaatatcctggacccaatgctggtccaccttcagcaccccgcggtccacccatggcacccataataatttcacagagaaccgcaagtcagctggcagcacctataagaatacctcaagttcacactatggacagttctggaaaaatcacactgactcctgtggttatattaacaggttacatggatgaagaacttgcaaaaaaaccttgttccaaaatccagattctaaaatgtggaggcactgcaaggtctcagaatagccgagaagaaaacaaggaagcactaaagaatgacatcatatttacgaattctgtagaatccttgaaatcagcacacataaaggagccagaaagagaaggaaaaggcactgatttagagaaagacaaaataggaatggaggtcaaggtagacagtgacgctggaataccaaaaagacaggaaacccaactaaaaatcagtgagatgagtataccacaaggacagggagcccaaataaagaaaagtgtgtcagatgtaccaagaggacaggagtcccaagtaaagaagagtgagtcaggtgtcccaaaaggacaagaagcccaagtaacgaagagtgggttggttgtactgaaaggacaggaagcccaggtagagaagagtgagatgggtgtgccaagaagacaggaatcccaagtaaagaagagtcagtctggtgtctcaaagggacaggaagcccaggtaaagaagagggagtcagttgtactgaaaggacaggaagcccaggtagagaagagtgagttgaaggtaccaaaaggacaagaaggccaagtagagaagactgaggcagatgtgccaaaggaacaagaggtccaagaaaagaagagtgaggcaggtgtactgaaaggaccagaatcccaagtaaagaacactgaggtgagtgtaccagaaacactggaatcccaagtaaagaagagtgagtcaggtgtactaaaaggacaggaagcccaagaaaagaaggagagttttgaggataaaggaaataatgataaagaaaaggagagagatgcagagaaagatccaaataaaaaagaaaaaggtgacaaaaacacaaaaggtgacaaaggaaaggacaaagttaaaggaaagagagaatcagaaatcaatggtgaaaaatcaaaaggctcgaaaagggcgaaggcaaatacaggaaggaagtacaacaaaaaagtggaagagtaaggataaattttttaaaggcccataagacaagtgattattatgattcccatactccagatacaaaccatatcccagccattgcctaaacagattacaattataaaatccctttcatcttcatatcacagtttctgctcttcagaagtttcaccctttttaatctctcagccacaaacctcagtttccaaatatttgtttcataagttaagacgtatatgattccgtcaagaaagactggatactttctgaagtaaaacattttaattaaagaaatatatagt

SEQ ID NO: 119165 - DNA, 2179 bp, Homo sapiens
  Payload ID: 3348
  Gene Symbol: C6orf10
  Gene Name: chromosome 6 open reading frame 10
  Uniprot ID: Q5SRN2
  ENST ID: ENST00000612031
  CDS Start-End: 207-1898
cacactcccatcatttgcttaggtctgatcaatctgctccacacaatttctcagtgatcctctgcatctctgcctacaagggcctccctgacacccaagttcatattgctcagaaacagtgaacttgagtttttcgttttaccttgatctctctctgacaaagaaatccagatgatgcgagacctgatgaagacaatacatggaaaatgacagtcttggaaataactttggctgtcatcctgactctactgggacttgccatcctggctattttgttaacaagatgggcacgatgtaagcaaagtgaaatgtatatctccagatacagttcagaacaaagtgctagacttctggactatgaggatggtagaggatcccgacatgcatattcaacacaaagtgacacttcatatgataaccgagagagatccaaaagagattacacaccatcaaccaactctctagtgtctatggcatctaagttctccctgggacaaacagaactcattcttcttttgatgtgttttattttagcactgtctcgatcaagtattggtagtataaaatgtttacaaacaactgaagaacctccttccagaactgcaggagccatgatgcaattcacagcccctattcccggagctacaggacctatcaagctctctcaaaaaaccattgtgcaaactccaggacctattgtacaatatcctggatccaatgctggtccaccttcagcaccccgcggtccacccatggcacccataataatttcgcagagaactgcaagaatacctcaagttcacactatggacagttctggaaaaatcacactgactcctgtggttatattaacaggttacatggatgaagaacttgcaaaaaaatcttgttccaaaatccagattctaaaatgtggaggcactgcaaggtctcagaatagccgagaagaaaacaaggaagcactaaagaatgacatcatatttacgaattctgtagaatccttgaaatcagcacacataaaggagccagaaagagaaggaaaaggcactgatttagagaaagacaaaataggaatggaggtcaaggtagacagtgacgctggaataccaaaaagacaggaaacccaactaaaaatcagtgagatgagtataccacaaggacagggagcccaaataaagaaaagtgtgtcagatgtaccaagaggacaggagtcccaagtaaagaagagtgagtcaggtgtcccaaaaggacaagaagcccaagtaacgaagagtgggttggttgtactgaaaggacaggaagcccaggtagagaagagtgagatgggtgtgccaagaagacaggaatcccaagtaaagaagagtcagtctggtgtctcaaagggacaggaagcccaggtaaagaagagggagtcagttgtactgaaaggacaggaagcccaggtagagaagagtgagttgaaggtaccaaaaggacaagaaggccaagtagagaagactgaggcagatgtgccaaaggaacaagaggtccaagaaaagaagagtgaggcaggtgtactgaaaggaccagaatcccaagtaaagaacactgaggtgagtgtaccagaaacactggaatcccaagtaaagaagagtgagtcaggtgtactaaaaggacaggaagcccaagaaaagaaggagagttttgaggataaaggaaataatgataaagaaaaggagagagatgcagagaaagatccaaataaaaaagaaaaaggtgacaaaaacacaaaaggtgacaaaggaaaggacaaagttaaaggaaagagagaatcagaaatcaatggtgaaaaatcaaaaggctcgaaaagggcgaaggcaaatacaggaaggaagtacaacaaaaaagtggaagagtaaggataaattttttaaaggcccataagacaagtgattattatgattcccatactccagatacaaaccatatcccagccattgcctaaacagattacaattataaaatccctttcatcttcatatcacagtttctgctcttcagaagtttcaccctttttaatctctcagccacaaacctcagtttccaaatatttgttttataagttaagacgtatatgattccgtcaagaaagactggatactttctgaagtaaaacattttaattaaagaaatatatagt

SEQ ID NO: 119166 - DNA, 1891 bp, Homo sapiens
  Payload ID: 3348
  Gene Symbol: C6orf10
  Gene Name: chromosome 6 open reading frame 10
  ENST ID: ENST00000620772
  CDS Start-End: 194-1891
tttgcttaggtctgatcaatctgctccacacaatttctcagtgatcctctgcatctctgcctacaagggcctccctgacacccaagttcatattgctcagaaacagtgaacttgagtttttcgttttatcttgatctctctctgacaaagaaatccagatgatgcgagacctgatgaagacaatacatggaaaatgacagtcttggaaataactttggctgtcatcctgactctactgggacttgccatcctggctattttgttaacaagatgggcacgacgtaagcaaagtgaaatgcatatctccagatacagttcagaacaaagtgctagacttctggactatgaggatggtagaggatcccgacatgcatatcacaaagtgacacttcatgtgataaccgagcgcatatccaaaagagattacacaccatcaaccaactctctagcactgtctcgatcaagtattgctttacctcaaggatccatgagtagtataaaatgtttacaaacaactgaagaacttccttccagaactgcaggagccatgatgcaattcacagcccctattcagccggagctacaggacctatcaagctctctcaaaaaaccattgtgcaaactccaggacctattggctagagtacagcagcagtgcattgtggccattcacactgtgctggtccaccttcagcaccccggtccacccatggcacccataataatttcacagagaaccgcaagtcagctggcagcacctataagaatacctcaagttcacactatggacagttctggaaaaatcacactgactcctgtggttatattaacaggttacatggatgaagaacttgcaaaaaaaccttgttccaaaatccagattctaaaatgtggaggcactgcaaggtctcagaatagccgagaagaaaacaaggaagcactaaagaatgacatcatatttacgaattctgtagaatccttgaaatcagcacacataaaggagccagaaagagaaggaaaaggcactgatttagagaaagacaaaataggaatggaggtcaaggtagacagtgacgctggaataccaaaaagacaggaaacccaactaaaaatcagtgatgagtataccacaaggacagggagcccaaataaagaaaagtgtgtcagatgtaccaagaggacaggacaagtaaagaagagtgagtcaggtgtcccaaaaggacaagaagcccaagtaacgaagagtgggttggttgtactgaaaggacaggaagcccaggtagagaagagtgagatgggtgtgccaagaagacaggaatcccaagtaaagaagagtcagtctggtgtctcaaagggacaggaagcccaggtaaagaagagggagtcagttgtactgaaaggacaggaagcccaggtagagaagagtgagttgaaggtaccaaaaggacaagaaggccaagtagagaagactgaggcagatgtgccaaaggaacaagaggtccaagaaaagaagagtgaggcaggtgtactgaaaggaccagaatcccaagtaaagaacactgaggtgagtgtaccagaaacactggaatcccaagtaaagaagagtgagtcaggtgtactaaaaggacaggaagcccaagaaaagaaggagagttttgaggataaaggaaataatgataaagaaaaggagagagatgcagagaaagatccaaataaaaaagaaaaaggtgacaaaaacacaaaaggtgacaaaggaaaggacaaagttaaaggaaagagagaatcagaaatcaatggtgaaaaatcaaaaggctcgaaaaggaggcaaatacaggaaggaagtacaacaaaaaagtggaagagtaaggataaattttttaaaggcccataa

SEQ ID NO: 119167 - DNA, 1686 bp, Homo sapiens
  Payload ID: 3348
  Gene Symbol: C6orf10
  Gene Name: chromosome 6 open reading frame 10
  ENST ID: ENST00000621801
  CDS Start-End: 1-1686
atgacagtcttggaaataactttggctgtcatcctgactctactgggacttgccatcctggctattttgttaacaagatgggcacgacgtaagcaaagtgaaatgtatatctccagatacagttcagaacaaagtgctagacttctggactatgaggatggtagaggatcccgacatgcatattcaacacaaagtgacacttcatatgataaccgagagagatccaaaagagattacacaccatcaaccaactctctagcactgtctcgatcaagtattgctttacctcaaggatccatgagtagtataaaatgtttacaaacaactgaagaacctccttccagaactgcaggagccatgatgcaattcacagcccctattcccggagctacaggacctatcaagctctctcaaaaaaccattgtgcaaactctaggacctattgtacaatatcctggatccaatgctggtccaccttcagcaccccgcggtccacccatggcacccataataatttcacagagaaccgcaagtcagctggcagcacctataataatttcgcagagaactgcaagaatacctcaagttcacactatggacagttctggaaaaatcacactgactcctgtggttatattaacaggttacatggatgaagaacttgcaaaaaaatcttgttccaaaatccagattctaaaatgtggaggcactgcaaggtctcagaatagccgagaagaaaacaaggaagcactaaagaatgacatcatatttacgaattctgtagaatccttgaaatcagcacacataaaggagccagaaagagaaggaaaaggcactgatttagagaaagacaaaataggaatggaggtcaaggtagacagtgacgctggaataccaaaaagacaggaaacccaactaaaaatcagtgagatgagtgtaccacaaggacagggagcccaaataaagaaaagtgtgtcagatgtaccaagaggacaggagtcccaagtaaagaagagtgagtcaggtgtcccaaaaggacaagaagcccaagtaacgaagagtgggttggttgtactgaaaggacaggaagcccaggtagagaagagtgagatgggtgtgccaagaagacaggaatcccaagtaaagaagagtcagtctggtgtctcaaagggacaggaagcccaggtaaagaagagggagtcagttgtactgaaaggacaggaagcccaggtagagaagagtgagttgaaggtaccaaaaggacaagaaggccaagtagagaagactgaggcagatgtgccaaaggaacaagaggtccaagaaaagaagagtgaggcaggtgtactgaaaggaccagaatcccaagtaaagaacactgaggtgagtgtaccagaaacactggaatcccaagtaaagaagagtgagtcaggtgtactaaaaggacaggaagcccaagaaaagaaggagagttttgaggataaaggaaataatgataaagaaaaggagagagatgcagagaaagatccaaataaaaaagaaaaaggtgacaaaaacacaaaaggtgacaaaggaaaggacaaagttaaaggaaagagagaatcagaaatcaatggtgaaaaatcaaaaggctcgaaaagggcgaaggcaaatacaggaaggaagtacaacaaaaaagtggaagagtaa

SEQ ID NO: 119168 - DNA, 1904 bp, Homo sapiens
  Payload ID: 3348
  Gene Symbol: C6orf10
  Gene Name: chromosome 6 open reading frame 10
  ENST ID: ENST00000617061
  CDS Start-End: 207-1904
cacactcccatcatttgcttaggtctgatcaatctgctccacacaatttctcagtgatcctctgcatctctgcctacaagggcctccctgacacccaagttcatattgctcagaaacagtgaacttgagtttttcgttttaccttgatctctctctgacaaagaaatccagatgatgcgagacctgatgaagacaatacatggaaaatgacagtcttggaaataactttggctgtcatcctgactctactgggacttgccatcctggctattttgttaacaagatgggcacgatgtaagcaaagtgaaatgtatatctccagatacagttcagaacaaagtgctagacttctggactatgaggatggtagaggatcccgacatgcatatcacaaagtgacacttcatatgataaccgagcgcatatccaaaagagattacacaccatcaaccaactctctagcactgtctcgatcaagtattgctttacctcaaggatccatgagtagtataaaatgtttacaaacaactgaagaacctccttccagaactgcaggagccatgatgcaattcacagcccctattcagccggagctacaggacctatcaagctctctcaaaaaaccattgtgcaaactccaggacctattgtacaattggatccaatgtcagatcgcatcctcacacaatcatacagtccaccttcagcaccccggtccacccatggcacccataataatttcacagagaaccgcaagtcagctggcagcacctataagaatacctcaagttcacactatggacagttctggaaaaatcacactgactcctgtggttatattaacaggttacatggatgaagaacttgcaaaaaaatcttgttccaaaatccagattctaaaatgtggaggcactgcaaggtctcagaatagccgagaagaaaacaaggaagcactaaagaatgacatcatatttacgaattctgtagaatccttgaaatcagcacacataaaggagccagaaagagaaggaaaaggcactgatttagagaaagacaaaataggaatggaggtcaaggtagacagtgacgctggaataccaaaaagacaggaaacccaactaaaaatcagtgatgagtataccacaaggacagggagcccaaataaagaaaagtgtgtcagatgtaccaagaggacaggacaagtaaagaagagtgagtcaggtgtcccaaaaggacaagaagcccaagtaacgaagagtgggttggttgtactgaaaggacaggaagcccaggtagagaagagtgagatgggtgtgccaagaagacaggaatcccaagtaaagaagagtcagtctggtgtctcaaagggacaggaagcccaggtaaagaagagggagtcagttgtactgaaaggacaggaagcccaggtagagaagagtgagttgaaggtaccaaaaggacaagaaggccaagtagagaagactgaggcagatgtgccaaaggaacaagaggtccaagaaaagaagagtgaggcaggtgtactgaaaggaccagaatcccaagtaaagaacactgaggtgagtgtaccagaaacactggaatcccaagtaaagaagagtgagtcaggtgtactaaaaggacaggaagcccaagaaaagaaggagagttttgaggataaaggaaataatgataaagaaaaggagagagatgcagagaaagatccaaataaaaaagaaaaaggtgacaaaaacacaaaaggtgacaaaggaaaggacaaagttaaaggaaagagagaatcagaaatcaatggtgaaaaatcaaaaggctcgaaaaggaggcaaatacaggaaggaagtacaacaaaaaagtggaagagtaaggataaattttttaaaggcccataa

SEQ ID NO: 119169 - DNA, 1701 bp, Homo sapiens
  Payload ID: 3348
  Gene Symbol: C6orf10
  Gene Name: chromosome 6 open reading frame 10
  ENST ID: ENST00000615490
  CDS Start-End: 1-1701
atgacagtcttggaaataactttggctgtcatcctgactctactgggacttgccatcctggctattttgttaacaagatgggcacgacgtaagcaaagtgaaatgtatatctccagatacagttcagaacaaagtgctagacttctggactatgaggatggtagaggatcccgacatgcatatcacaaagtgacacttcatatgataaccgagcgcatatccaaaagagattacacaccatcaaccaactctctagcactgtctcgatcaagtattgctttacctcaaggatccatgagtagtataaaatgtttacaaacaactgaagaacctccttccagaactgcaggagccatgatgcaattcacagcccctattcagccggagctacaggacctatcaagctctctcaaaaaaccattgtgcaaactgcaggatattggatataacacctgggtgacagatcagatcgcatcctcacacaatcatacagtccaccttcagcaccccggtccacccatggcacccataataatttcacagagaaccgcaagtcagctggcagcacctataagaatacctcaagttcacactatggacagttctggaaaaatcacactgactcctgtggttatattaacaggttacatggatgaagaacttgcaaaaaaatcttgttccaaaatccagattctaaaatgtggaggcactgcaaggtctcagaatagccgagaagaaaacaaggaagcactaaagaatgacatcatatttacgaattctgtagaatccttgaaatcagcacacataaaggagccagaaagagaaggaaaaggcactgatttagagaaagacaaaataggaatggaggtcaaggtagacagtgacgctggaataccaaaaagacaggaaacccaactaaaaatcagtgatgagtataccacaaggacagggagcccaaataaagaaaagtgtgtcagatgtaccaagaggacaggacaagtaaagaagagtgagtcaggtgtcccaaaaggacaagaagcccaagtaacgaagagtgggttggttgtactgaaaggacaggaagcccaggtagagaagagtgagatgggtgtgccaagaagacaggaatcccaagtaaagaagagtcagtctggtgtctcaaagggacaggaagcccaggtaaagaagagggagtcagttgtactgaaaggacaggaagcccaggtagagaagagtgagttgaaggtaccaaaaggacaagaaggccaagtagagaagactgaggcagatgtgccaaaggaacaagaggtccaagaaaagaagagtgaggcaggtgtactgaaaggaccagaatcccaagtaaagaacactgaggtgagtgtaccagaaacactggaatcccaagtaaagaagagtgagtcaggtgtactaaaaggacaggaagcccaagaaaagaaggagagttttgaggataaaggaaataatgataaagaaaaggagagagatgcagagaaagatccaaataaaaaagaaaaaggtgacaaaaacacaaaaggtgacaaaggaaaggacaaagttaaaggaaagagagaatcagaaatcaatggtgaaaaatcaaaaggctcgaaaaggaggcaaatacaggaaggaagtacaacaaaaaagtggaagagtaaggataaattttttaaaggcccataa

SEQ ID NO: 119170 - DNA, 1692 bp, Homo sapiens
  Payload ID: 3348
  Gene Symbol: C6orf10
  Gene Name: chromosome 6 open reading frame 10
  ENST ID: ENST00000614995
  CDS Start-End: 1-1692
atgacagtcttggaaataactttggctgtcatcctgactctactgggacttgccatcctggctattttgttaacaagatgggcacgacgtaagcaaagtgaaatgtatatctccagatacagttcagaacaaagtgctagacttctggactatgaggatggtagaggatcccgacatgcatattcaacacaaagtgacacttcatatgataaccgagagagatccaaaagagattacacaccatcaaccaactctctagtgtctatggcatctaagttctccctgggacaaacagaactcattcttcttttgatgtgttttattttagcactgtctcgatcaagtattggtagtataaaatgtttacaaacaactgaagaacctccttccagaactgcaggagccatgatgcaattcacagcccctattcccggagctacaggacctatcaagctctctcaaaaaaccattgtgcaaactctaggacctattgtacaatatcctggatccaatgctggtccaccttcagcaccccgcggtccacccatggcacccataataatttcgcagagaactgcaagaatacctcaagttcacactatggacagttctggaaaaatcacactgactcctgtggttatattaacaggttacatggatgaagaacttgcaaaaaaatcttgttccaaaatccagattctaaaatgtggaggcactgcaaggtctcagaatagccgagaagaaaacaaggaagcactaaagaatgacatcatatttacgaattctgtagaatccttgaaatcagcacacataaaggagccagaaagagaaggaaaaggcactgatttagagaaagacaaaataggaatggaggtcaaggtagacagtgacgctggaataccaaaaagacaggaaacccaactaaaaatcagtgagatgagtgtaccacaaggacagggagcccaaataaagaaaagtgtgtcagatgtaccaagaggacaggagtcccaagtaaagaagagtgagtcaggtgtcccaaaaggacaagaagcccaagtaacgaagagtgggttggttgtactgaaaggacaggaagcccaggtagagaagagtgagatgggtgtgccaagaagacaggaatcccaagtaaagaagagtcagtctggtgtctcaaagggacaggaagcccaggtaaagaagagggagtcagttgtactgaaaggacaggaagcccaggtagagaagagtgagttgaaggtaccaaaaggacaagaaggccaagtagagaagactgaggcagatgtgccaaaggaacaagaggtccaagaaaagaagagtgaggcaggtgtactgaaaggaccagaatcccaagtaaagaacactgaggtgagtgtaccagaaacactggaatcccaagtaaagaagagtgagtcaggtgtactaaaaggacaggaagcccaagaaaagaaggagagttttgaggataaaggaaataatgataaagaaaaggagagagatgcagagaaagatccaaataaaaaagaaaaaggtgacaaaaacacaaaaggtgacaaaggaaaggacaaagttaaaggaaagagagaatcagaaatcaatggtgaaaaatcaaaaggctcgaaaagggcgaaggcaaatacaggaaggaagtacaacaaaaaagtggaagagtaa

SEQ ID NO: 119171 - DNA, 1686 bp, Homo sapiens
  Payload ID: 3348
  Gene Symbol: C6orf10
  Gene Name: chromosome 6 open reading frame 10
  ENST ID: ENST00000620668
  CDS Start-End: 1-1686
atgacagtcttggaaataactttggctgtcatcctgactctactgggacttgccatcctggctattttgttaacaagatgggcacgacgtaagcaaagtgaaatgtatatctccagatacagttcagaacaaagtgctagacttctggactatgaggatggtagaggatcccgacatgcatattcaacacaaagtgacacttcatatgataaccgagagagatccaaaagagattacacaccatcaaccaactctctagcactgtctcgatcaagtattgctttacctcaaggatccatgagtagtataaaatgtttacaaacaactgaagaacctccttccagaactgcaggagccatgatgcaattcacagcccctattcccggagctacaggacctatcaagctctctcaaaaaaccattgtgcaaactctaggacctattgtacaatatcctggatccaatgctggtccaccttcagcaccccgcggtccacccatggcacccataataatttcacagagaaccgcaagtcagctggcagcacctataataatttcgcagagaactgcaagaatacctcaagttcacactatggacagttctggaaaaatcacactgactcctgtggttatattaacaggttacatggatgaagaacttgcaaaaaaatcttgttccaaaatccagattctaaaatgtggaggcactgcaaggtctcagaatagccgagaagaaaacaaggaagcactaaagaatgacatcatatttacgaattctgtagaatccttgaaatcagcacacataaaggagccagaaagagaaggaaaaggcactgatttagagaaagacaaaataggaatggaggtcaaggtagacagtgacgctggaataccaaaaagacaggaaacccaactaaaaatcagtgagatgagtataccacaaggacagggagcccaaataaagaaaagtgtgtcagatgtaccaagaggacaggagtcccaagtaaagaagagtgagtcaggtgtcccaaaaggacaagaagcccaagtaacgaagagtgggttggttgtactgaaaggacaggaagcccaggtagagaagagtgagatgggtgtgccaagaagacaggaatcccaagtaaagaagagtcagtctggtgtctcaaagggacaggaagcccaggtaaagaagagggagtcagttgtactgaaaggacaggaagcccaggtagagaagagtgagttgaaggtaccaaaaggacaagaaggccaagtagagaagactgaggcagatgtgccaaaggaacaagaggtccaagaaaagaagagtgaggcaggtgtactgaaaggaccagaatcccaagtaaagaacactgaggtgagtgtaccagaaacactggaatcccaagtaaagaagagtgagtcaggtgtactaaaaggacaggaagcccaagaaaagaaggagagttttgaggataaaggaaataatgataaagaaaaggagagagatgcagagaaagatccaaataaaaaagaaaaaggtgacaaaaacacaaaaggtgacaaaggaaaggacaaagttaaaggaaagagagaatcagaaatcaatggtgaaaaatcaaaaggctcgaaaagggcgaaggcaaatacaggaaggaagtacaacaaaaaagtggaagagtaa

SEQ ID NO: 119172 - DNA, 1701 bp, Homo sapiens
  Payload ID: 3348
  Gene Symbol: C6orf10
  Gene Name: chromosome 6 open reading frame 10
  ENST ID: ENST00000621079
  CDS Start-End: 1-1701
atgacagtcttggaaataactttggctgtcatcctgactctactgggacttgccatcctggctattttgttaacaagatgggcacgacgtaagcaaagtgaaatgtatatctccagatacagttcagaacaaagtgctagacttctggactatgaggatggtagaggatcccgacatgcatatcacaaagtgacacttcatatgataaccgagcgcatatccaaaagagattacacaccatcaaccaactctctagcactgtctcgatcaagtattgctttacctcaaggatccatgagtagtataaaatgtttacaaacaactgaagaacctccttccagaactgcaggagccatgatgcaattcacagcccctattcagccggagctacaggacctatcaagctctctcaaaaaaccattgtgcaaactgcaggatattggatataacacctgggtgacagatcagatcgcatcctcacacaatcatacagtccaccttcagcaccccggtccacccatggcacccataataatttcacagagaaccgcaagtcagctggcagcacctataagaatacctcaagttcacactatggacagttctggaaaaatcacactgactcctgtggttatattaacaggttacatggatgaagaacttgcaaaaaaatcttgttccaaaatccagattctaaaatgtggaggcactgcaaggtctcagaatagccgagaagaaaacaaggaagcactaaagaatgacatcatatttacgaattctgtagaatccttgaaatcagcacacataaaggagccagaaagagaaggaaaaggcactgatttagagaaagacaaaataggaatggaggtcaaggtagacagtgacgctggaataccaaaaagacaggaaacccaactaaaaatcagtgatgagtgtaccacaaggacagggagcccaaataaagaaaagtgtgtcagatgtaccaagaggacaggacaagtaaagaagagtgagtcaggtgtcccaaaaggacaagaagcccaagtaacgaagagtgggttggttgtactgaaaggacaggaagcccaggtagagaagagtgagatgggtgtgccaagaagacaggaatcccaagtaaagaagagtcagtctggtgtctcaaagggacaggaagcccaggtaaagaagagggagtcagttgtactgaaaggacaggaagcccaggtagagaagagtgagttgaaggtaccaaaaggacaagaaggccaagtagagaagactgaggcagatgtgccaaaggaacaagaggtccaagaaaagaagagtgaggcaggtgtactgaaaggaccagaatcccaagtaaagaacactgaggtgagtgtaccagaaacactggaatcccaagtaaagaagagtgagtcaggtgtactaaaaggacaggaagcccaagaaaagaaggagagttttgaggataaaggaaataatgataaagaaaaggagagagatgcagagaaagatccaaataaaaaagaaaaaggtgacaaaaacacaaaaggtgacaaaggaaaggacaaagttaaaggaaagagagaatcagaaatcaatggtgaaaaatcaaaaggctcgaaaaggaggcaaatacaggaaggaagtacaacaaaaaagtggaagagtaaggataaattttttaaaggcccataa

SEQ ID NO: 119173 - DNA, 2179 bp, Homo sapiens
  Payload ID: 3348
  Gene Symbol: C6orf10
  Gene Name: chromosome 6 open reading frame 10
  Uniprot ID: Q5SRN2
  ENST ID: ENST00000618584
  CDS Start-End: 207-1898
cacactcccatcatttgcttaggtctgatcaatctgctccacacaatttctcagtgatcctctgcatctctgcctacaagggcctccctgacacccaagttcatattgctcagaaacagtgaacttgagtttttcgttttatcttgatctctctctgacaaagaaatccagatgatgcgagacctgatgaagacaatacatggaaaatgacagtcttggaaataactttggctgtcatcctgactctactgggacttgccatcctggctattttgttaacaagatgggcacgatgtaagcaaagtgaaatgtatatctccagatacagttcagaacaaagtgctagacttctggactatgaggatggtagaggatcccgacatgcatattcaacacaaagtgacacttcatatgataaccgagagagatccaaaagagattacacaccatcaaccaactctctagtgtctatggcatctaagttctccctgggacaaacagaactcattcttcttttgatgtgttttattttagcactgtctcgatcaagtattggtagtataaaatgtttacaaacaactgaagaacctccttccagaactgcaggagccatgatgcaattcacagcccctattcccggagctacaggacctatcaagctctctcaaaaaaccattgtgcaaactccaggacctattgtacaatatcctggatccaatgctggtccaccttcagcaccccgcggtccacccatggcacccataataatttcgcagagaactgcaagaatacctcaagttcacactatggacagttctggaaaaatcacactgactcctgtggttatattaacaggttacatggatgaagaacttgcaaaaaaatcttgttccaaaatccagattctaaaatgtggaggcactgcaaggtctcagaatagccgagaagaaaacaaggaagcactaaagaatgacatcatatttacgaattctgtagaatccttgaaatcagcacacataaaggagccagaaagagaaggaaaaggcactgatttagagaaagacaaaataggaatggaggtcaaggtagacagtgacgctggaataccaaaaagacaggaaacccaactaaaaatcagtgagatgagtataccacaaggacagggagcccaaataaagaaaagtgtgtcagatgtaccaagaggacaggagtcccaagtaaagaagagtgagtcaggtgtcccaaaaggacaagaagcccaagtaacgaagagtgggttggttgtactgaaaggacaggaagcccaggtagagaagagtgagatgggtgtgccaagaagacaggaatcccaagtaaagaagagtcagtctggtgtctcaaagggacaggaagcccaggtaaagaagagggagtcagttgtactgaaaggacaggaagcccaggtagagaagagtgagttgaaggtaccaaaaggacaagaaggccaagtagagaagactgaggcagatgtgccaaaggaacaagaggtccaagaaaagaagagtgaggcaggtgtactgaaaggaccagaatcccaagtaaagaacactgaggtgagtgtaccagaaacactggaatcccaagtaaagaagagtgagtcaggtgtactaaaaggacaggaagcccaagaaaagaaggagagttttgaggataaaggaaataatgataaagaaaaggagagagatgcagagaaagatccaaataaaaaagaaaaaggtgacaaaaacacaaaaggtgacaaaggaaaggacaaagttaaaggaaagagagaatcagaaatcaatggtgaaaaatcaaaaggctcgaaaagggcgaaggcaaatacaggaaggaagtacaacaaaaaagtggaagagtaaggataaattttttaaaggcccataagacaagtgattattatgattcccatactccagatacaaaccatatcccagccattgcctaaacagattacaattataaaatccctttcatcttcatatcacagtttctgctcttcagaagtttcaccctttttaatctctcagccacaaacctcagtttccaaatatttgttttataagttaagacgtatatgattccgtcaagaaagactggatactttctgaagtaaaacattttaattaaagaaatatatagt

SEQ ID NO: 119174 - DNA, 916 bp, Homo sapiens
  Payload ID: 3349
  Gene Symbol: C6orf106
  Gene Name: chromosome 6 open reading frame 106
  ENST ID: ENST00000374021
  CDS Start-End: 186-860
gtgtaacctctcctgtttttgtacatgtgtttattcctgaactgttttgggctactcattgttaaccaggttgctgctctacttttcccactgctggctaaggaagattcaactttttcaggaacctacaagcagcaattggcgcctattatgactttgagagcccaaacatcagtgtgccctctatgtcctttgttgaagatgtcaccataggagaaggggagtcaatacctccggatactcagtttgtaaaaacatggcggatccagaattctggggcagaggcctggcctccaggggtttgtcttaaatatgtcgggggagaccaatttggacatgtgaacatggtgatggtgagatcgctagagccccaagagattgcagatgtcagcgtccagatgtgcagccccagcagagcaggaatgtatcagggacagtggcggatgtgcactgctacaggactctactatggagatgtcatctgggtgattctcagtgtggaggtgggtggacttttaggagtaacgcagcagctgtcatcttttgaaacggagttcaacacacagccgcatcgtaaggtagaaggaaacttcaacccttttgcctctccccaaaagaaccgacaatcagatgaaaacaacttaaaagaccctgggggctccgagttcgactcgatcagcaaaaacacatgggctcctgctcctgacacatgggctcctgctcctgaccaaactgagcaagaccagaatagactgtcacagaactctgtaaatctgtctcccagcagtcacgcaaacaacttatcagtagtgacttacagtaaggggctccatgggccttaccccttcggccagtcttaaacgggtgtcagcaagaagaaaaattaacaaaagacagaaggcctgactttgggggg

SEQ ID NO: 119175 - DNA, 4418 bp, Homo sapiens
  Payload ID: 3349
  Gene Symbol: C6orf106
  Gene Name: chromosome 6 open reading frame 106
  Uniprot ID: Q9H6K1
  ENST ID: ENST00000374023
  CDS Start-End: 245-1141
ggcggagtggcgagaggcgagaggcggcggaggcggcggagctggggggggtgggaggggggggagagtgagtgagtggcagagtgagtttacccctatgagactgtgagaggcccggggcctacctcaaaggagcggggtcgcgaagctagctagcagcggcccccctccaggtccccgggcccggcggcgcggcggcggcttggttgtgaagaggcggggaagcgggtgtccggtccccgccatggagggcatggacgtagacctggacccggagctgatgcagaagttcagctgcctgggcaccaccgacaaggacgtgctcatctccgagttccagaggctgctcggcttccagctcaatcctgccggttgcgccttcttcctggacatgaccaactggaacctacaagcagcaattggcgcctattatgactttgagagcccaaacatcagtgtgccctctatgtcctttgttgaagatgtcaccataggagaaggggagtcaatacctccggatactcagtttgtaaaaacatggcggatccagaattctggggcagaggcctggcctccaggggtttgtcttaaatatgtcgggggagaccaatttggacatgtgaacatggtgatggtgagatcgctagagccccaagagattgcagatgtcagcgtccagatgtgcagccccagcagagcaggaatgtatcagggacagtggcggatgtgcactgctacaggactctactatggagatgtcatctgggtgattctcagtgtggaggtgggtggacttttaggagtaacgcagcagctgtcatcttttgaaacggagttcaacacacagccgcatcgtaaggtagaaggaaacttcaacccttttgcctctccccaaaagaaccgacaatcagatgaaaacaacttaaaagaccctgggggctccgagttcgactcgatcagcaaaaacacatgggctcctgctcctgacacatgggctcctgctcctgaccaaactgagcaagaccagaatagactgtcacagaactctgtaaatctgtctcccagcagtcacgcaaacaacttatcagtagtgacttacagtaaggggctccatgggccttaccccttcggccagtcttaaacgggtgtcagcaagaagaaaaattaacaaaagacagaaggcctgactttggggggttagggcaaggggttcctctggattgcagaccacatcgcacagacccctggctctgaccccctctcatcccggaagaagaggaagaagcagaacagactagttttgagtaaactcagtatgcatgtgtgaatgctgaatcacaggaatggtgttgaggctaccaagaagaaatccatgcagccactttgggttttgttataggcatcagtctaacaagtcattaggtcactcgggaagggggaaaaagtttaaaatgggggaaaaaaagccatctttttaaacaaaaattattttgcctacagaaaggttgtagttttgagcacatgttaatttttttccctctttccccacttttatttttttaaataagggataacatattctttatagaatagtgcttgttctggaagagattcaggtgaaaagttggcgtggcatgtttgaggactctgcggatcagtgctacaggagtacatctgccctgccacatgactccagaagtctctgaccccatttgtttttaatggcatcagccaatgagttatcacccttttcctcctcttttctctttaatcttctgttgatttacacctttgacatttgtattcgtcaaccctgtggcttgttagcatcagaacctctctgaagaccaaacttccctgtgtggccagcagaggaagccttgaggatagatctcgggtgacgtgggattttctaagcctgagaggtgtccttctgcacacccttgtaacaattaaaattgcttttcttccatgtttctcttggcagagagaaatgccatcatgcttactgctcttttggattcttcatgcagtggcttcccatttgctctgggaacagtgcctctgtgctggttatatgtatgcaccacatgtgcacacacgggtgttggtgcaactcaccagcaggtgtgcagtaggcaagcttgaaggtggcccatgcttctctgttgtcacacaacacctttccctgtttctcttcagttgtcctctgatattttcacagcctgttagtggcggctgatctgtagaggtatgaaaatacagccccaaagggggaatttgtcatggggaagggccagccactgactacttgatcttggagaccacatttagatggaaatgagaggacctccacagccccgcctccctgccaggatgctagattattggctgggaggtgggcaagtggcagcccagctgaagcaagaggctgattgactggctgctcactcaggcaggtggcctgccctggcatcctgtagattctgagcaggttgagatgtggatatctccatgggaagcttgaaccaggctagaacagctgtctgccaaagatacaagaatatgcaaagtccctcttacccccctccttccctcaagtcttagttggtttgagagccagggatatggatccagggtgctgttgcagggtcacctgcctgttaccacacccccatccagctgggtggtgggtgagggtgtgagacaggcagggagaccaggtaatgagtggctgcaaggagtcatatagcctgggtgtgggtgagggtctgcctgcctgtttctgtctgggtgtctgagttccaaaaaatgtgtgttgtttgttcctcctcatcctcttctgagactgttgtttttttagagcttgattgtgggagaaaagcttgtgtgaaattccctcttcacctccccaccccccaaaaaataaaagggggcataaactttattccactggagaagccctgggggtggctggagccagcctgctgagaagcgtggtgcagctgggtctgggacttcactagagcttactctggagcacctattttctgtgcacatgggagtgctccactccctagcagagcagagggaagtctctgccaggtacccacgccacaggcctcaggatggctttttgtctgagggcctcattaggcccagactgctgctgctggtaccagtctcctgagacactgcctccctggagcccatgcatgcccagctgttcttactgcttagtagccttgaagcagcacatctccactgtccctggcaggattgtgggaggcttcacaacccctgctttcctgacttcctcttctgcccaacactgggtgccccttcccagtttcccagcaggggcttcatgggccaccgtcagtgggtctgggcctgccagagtcgtcttgctcttcctcttgcttctaggcaaccacacttggcaagttaaatgtcccaagcaccttgtctcccttcccaagaacaaaccatttctgtgcacatccttggaggcgagatgagctccttgcagagggccagagtaagtgcaagtcatggagtgcaggcagaggggtccatggcttccccagcccagggagggtatcagtatcattcattctctctcccctcactggtatgggttcagagcaatgcctagggcccctctctgctcccctgcctagtggggtggtagtggctacctctcagccccaatagtccctgctcctcttagaatcttcaccaagtggcaggccacctctgggcaggaccacctgcgtctggcacccaggaggtgaggcagacaccatggttaggtgatagggtctgaacccagttggggagacagaggggttcagacttgggaagaatctgtcagtgtgcatggagtgaggtgtgtgtgtgtggatggatgtgcacgtgtgcatgctttttttctttttgccgtgaggacagttgaatttggggcatttttctacaagaagcagtcagccttctctcccccataaggactggctgtaaccttaagcccatcaaagttacttccagcctggagagaacctcaccaaacagctggtgtggcctgagggtggccatggtgggaaatgggcatgagaataaatacctccccaaattcaatctgagcccagcaggagaggatggtagggttgccagggctcagaagtgcaagctgattactcaccccaccctgcctcgccgcacctttcctttgtttccttgggtgaatgcaggagcagcagtggctgcccttcccacctggacagtggtgtgtgtagaaagccagctggatgtttgtggtggggcctcatggtgcctaggaggagataaagatgaggaggtttttccttattgtataaatgaatatttgtatgattaaattaacacacacaccaaaaaaa

SEQ ID NO: 119176 - DNA, 4232 bp, Homo sapiens
  Payload ID: 3349
  Gene Symbol: C6orf106
  Gene Name: chromosome 6 open reading frame 106
  Uniprot ID: Q9H6K1
  ENST ID: ENST00000374026
  CDS Start-End: 257-955
ggaggcggaggcggcggagtggcgagaggcgagaggcggcggaggcggcggagctggggggggtgggaggggggggagagtgagtgagtggcagagtgagtttacccctatgagactgtgagaggcccggggcctacctcaaaggagcggggtcgcgaagctagctagcagcggcccccctccaggtccccgggcccggcggcgcggcggcggcttggttgtgaagaggcggggaagcgggtgtccggtccccgccatggagggcatggacgtagacctggacccggagctgatgcagaagttcagctgcctgggcaccaccgacaaggacgtgctcatctccgagttccagaggctgctcggcttccagctcaatcctgccggttgcgccttcttcctggacatgaccaactggaacctacaagcagcaattggcgcctattatgactttgagagcccaaacatcagtgtgccctctatgtcctttgttgaagatgtcaccataggagaaggggagtcaatacctccggatactcagtttgtaaaaacatggcggatccagaattctgatgtcatctgggtgattctcagtgtggaggtgggtggacttttaggagtaacgcagcagctgtcatcttttgaaacggagttcaacacacagccgcatcgtaaggtagaaggaaacttcaacccttttgcctctccccaaaagaaccgacaatcagatgaaaacaacttaaaagaccctgggggctccgagttcgactcgatcagcaaaaacacatgggctcctgctcctgacacatgggctcctgctcctgaccaaactgagcaagaccagaatagactgtcacagaactctgtaaatctgtctcccagcagtcacgcaaacaacttatcagtagtgacttacagtaaggggctccatgggccttaccccttcggccagtcttaaacgggtgtcagcaagaagaaaaattaacaaaagacagaaggcctgactttggggggttagggcaaggggttcctctggattgcagaccacatcgcacagacccctggctctgaccccctctcatcccggaagaagaggaagaagcagaacagactagttttgagtaaactcagtatgcatgtgtgaatgctgaatcacaggaatggtgttgaggctaccaagaagaaatccatgcagccactttgggttttgttataggcatcagtctaacaagtcattaggtcactcgggaagggggaaaaagtttaaaatgggggaaaaaaagccatctttttaaacaaaaattattttgcctacagaaaggttgtagttttgagcacatgttaatttttttccctctttccccacttttatttttttaaataagggataacatattctttatagaatagtgcttgttctggaagagattcaggtgaaaagttggcgtggcatgtttgaggactctgcggatcagtgctacaggagtacatctgccctgccacatgactccagaagtctctgaccccatttgtttttaatggcatcagccaatgagttatcacccttttcctcctcttttctctttaatcttctgttgatttacacctttgacatttgtattcgtcaaccctgtggcttgttagcatcagaacctctctgaagaccaaacttccctgtgtggccagcagaggaagccttgaggatagatctcgggtgacgtgggattttctaagcctgagaggtgtccttctgcacacccttgtaacaattaaaattgcttttcttccatgtttctcttggcagagagaaatgccatcatgcttactgctcttttggattcttcatgcagtggcttcccatttgctctgggaacagtgcctctgtgctggttatatgtatgcaccacatgtgcacacacgggtgttggtgcaactcaccagcaggtgtgcagtaggcaagcttgaaggtggcccatgcttctctgttgtcacacaacacctttccctgtttctcttcagttgtcctctgatattttcacagcctgttagtggcggctgatctgtagaggtatgaaaatacagccccaaagggggaatttgtcatggggaagggccagccactgactacttgatcttggagaccacatttagatggaaatgagaggacctccacagccccgcctccctgccaggatgctagattattggctgggaggtgggcaagtggcagcccagctgaagcaagaggctgattgactggctgctcactcaggcaggtggcctgccctggcatcctgtagattctgagcaggttgagatgtggatatctccatgggaagcttgaaccaggctagaacagctgtctgccaaagatacaagaatatgcaaagtccctcttacccccctccttccctcaagtcttagttggtttgagagccagggatatggatccagggtgctgttgcagggtcacctgcctgttaccacacccccatccagctgggtggtgggtgagggtgtgagacaggcagggagaccaggtaatgagtggctgcaaggagtcatatagcctgggtgtgggtgagggtctgcctgcctgtttctgtctgggtgtctgagttccaaaaaatgtgtgttgtttgttcctcctcatcctcttctgagactgttgtttttttagagcttgattgtgggagaaaagcttgtgtgaaattccctcttcacctccccaccccccaaaaaataaaagggggcataaactttattccactggagaagccctgggggtggctggagccagcctgctgagaagcgtggtgcagctgggtctgggacttcactagagcttactctggagcacctattttctgtgcacatgggagtgctccactccctagcagagcagagggaagtctctgccaggtacccacgccacaggcctcaggatggctttttgtctgagggcctcattaggcccagactgctgctgctggtaccagtctcctgagacactgcctccctggagcccatgcatgcccagctgttcttactgcttagtagccttgaagcagcacatctccactgtccctggcaggattgtgggaggcttcacaacccctgctttcctgacttcctcttctgcccaacactgggtgccccttcccagtttcccagcaggggcttcatgggccaccgtcagtgggtctgggcctgccagagtcgtcttgctcttcctcttgcttctaggcaaccacacttggcaagttaaatgtcccaagcaccttgtctcccttcccaagaacaaaccatttctgtgcacatccttggaggcgagatgagctccttgcagagggccagagtaagtgcaagtcatggagtgcaggcagaggggtccatggcttccccagcccagggagggtatcagtatcattcattctctctcccctcactggtatgggttcagagcaatgcctagggcccctctctgctcccctgcctagtggggtggtagtggctacctctcagccccaatagtccctgctcctcttagaatcttcaccaagtggcaggccacctctgggcaggaccacctgcgtctggcacccaggaggtgaggcagacaccatggttaggtgatagggtctgaacccagttggggagacagaggggttcagacttgggaagaatctgtcagtgtgcatggagtgaggtgtgtgtgtgtggatggatgtgcacgtgtgcatgctttttttctttttgccgtgaggacagttgaatttggggcatttttctacaagaagcagtcagccttctctcccccataaggactggctgtaaccttaagcccatcaaagttacttccagcctggagagaacctcaccaaacagctggtgtggcctgagggtggccatggtgggaaatgggcatgagaataaatacctccccaaattcaatctgagcccagcaggagaggatggtagggttgccagggctcagaagtgcaagctgattactcaccccaccctgcctcgccgcacctttcctttgtttccttgggtgaatgcaggagcagcagtggctgcccttcccacctggacagtggtgtgtgtagaaagccagctggatgtttgtggtggggcctcatggtgcctaggaggagataaagatgaggaggtttttccttattgtataaatgaatatttgtatgattaaattaacacacacaccaaaaaaa

SEQ ID NO: 119177 - DNA, 1812 bp, Homo sapiens
  Payload ID: 3350
  Gene Symbol: C6orf118
  Gene Name: chromosome 6 open reading frame 118
  Uniprot ID: Q5T5N4
  ENST ID: ENST00000230301
  CDS Start-End: 22-1431
gcagctggagggaaggaagcgatggcggaggagcgggagcctgaattgtacctgaagtggaagcactgcgagacgccaggcgtgaagaccctgtgtaatctgaagcactgcgagacgccaggagtgaagaccctgtgtaatctgaagaaacttctgaatcggcttcagaaagaccaccgggaggacgtctacctctacatctctggacacctgaaccccaacaagctctaccagcctccggagacgatcttacagcactggcccaatgcccaccggcccaagggggagcgcgcctctgaggtgggagagccgcccgcagggaaggtggcgaggatgaaggaggccctggcccacttcaccatccacacggccctggtccccagtgaggcccaggacaccccgctgttcaggtacctgaacccccaggcctctctttcccacacttcagaggaggatttccttccagtggaggctgtcagagaggggaaggaagaaaagaaaggaggccctcctggacggggccctcctggatggcgcaggagggaagaactccggctgcccgacttgaaggtgctgtgctaccaggaggccgggtccagaggcaccagggaccggcaccactatgtcagctcctacctggccggagccaccagcgcagacaggtacaggatgttcctgcgtttccagaaggaagtgctcgccaagcaagatctcctgaagaatgacttcactgggagcaaggcggccgcgggccacgagagaaagctgcagcaggagctccagaaaatttgcacgtgcagcccccagcagttcaacagactgcacgtctttggaaaagtctttgaagatatttgtaacagttctttgatatttggtgatctcttgaaaaaagttaaggatgaatatgaactctacatggcaacgctcctggagtcccagcctgcagcacagtacgaggctcttctggctcaactcaaggcgctggggcagaggccggtgaagacggcggacatggatctcgccagggaagagctgaggatgctcgtgacagccacaaaagcagccctggagcagaatgatagactcagaagtgaactggagatggaggtggcattgctgcagtctgcaaaggaacgatcagaatcatctgagaaacatataattgatgaaaaccgacttactcttactgagaaggttgaaaagaagaggtgtgaaatactcagtaagtgggatgagatacaagctctggaaaaagaaattaaaacaactttggttcatactggaatttcagatatcactgagaataggattaaaagcatagagcatgaagctatacaattggaaacagaaaatatgattttaaagaagaaaataaaagggcctttggaaatttatcaaggaatttgtaaaatcagaggaaacagaagataacgctcaagtggctgaacaaatggccagtggaaattcttaacttccatgtatgtagcatggatatttgcagatgcatatacattcataaagatacatttcatttcatcagctttaatctctagtaaaattaatgtggtatatgtatcctactcaggatactgaaatacacacatgcgtacacatgattagtttctgttgcatacatatttacaacaatactagttcttaacgtatgttttactttcatttaataatgttcaactttggaaaatacttttgattatttgctaagaataaggaattcagcgctgcttgaatacagctcaaatttgtttatttgccaacacaagtttacatatatgcatttaataaaattttata

SEQ ID NO: 119178 - DNA, 2667 bp, Homo sapiens
  Payload ID: 3351
  Gene Symbol: C6orf120
  Gene Name: chromosome 6 open reading frame 120
  Uniprot ID: Q7Z4R8
  ENST ID: ENST00000332290
  CDS Start-End: 271-846
agtggtggtgagtccgagggtgccacagcggccctgcccctgcccctgcccctgccctgagtgggcgccgcgctacgggggaggggttaacccacccctcctccccggggcctcacgcgggtgggaagggacagtcccagcgacagaccaggcgcctggacgcgccgtggacccgcgtgcggacggcggggacaggctccggtgctgagcgcctccggtgtccccagcagcactgacccacttgcaggccccggagctgagccgccagccatggccgctccccgcgggagggccgcgccctggacgacggccctgctgctgctcctagcctcgcaggtcctgtctccgggaagctgcgcggacgaggaggaggtccccgaggagtgggtgctcctgcacgtcgtccagggccagataggcgccgggaactacagctacctgcggctgaaccacgagggcaagatagtcctcaggatgcgcagcctcaagggagatgcggatctgtacgtctccgccagcagcctgcaccccagcttcgacgactacgagctgcaatcggccacctgcggcccggacgccgtgtccatccccgcgcacttccggcgcccagtgggcatcggcgtctatggacacccctcccacctggagagcgagttcgagatgaaggtgtactacgacggcacggtcgagcagcacccgttcggcgaggccgcctaccccgccgacggcgcagatgccggccagaagcacgctggtgccccggaagacgcctcgcaagaggaggaatctgttctctggacgatattaattagcattttgaaactggtacttgaaattctcttttgagtcgttgaccacactctgggatataaaaccctccatctgtgaagctgattgcagtttgctgtgaaccttgctacttgtacttggttgaagttctaggtacctttagtcaagggatggaaaaataaagccatacgcagttttgttacctcagttaccccaaaaataggaaaagcagcaagcacagtattttaaagatcataattcctataaaaggactgtgcacaaagtgtttagactccattttcattaggcaggttgactaaaaatgattgcagtaacaggtttatataaaatagagcaacctttcatgctgtgacacaaatcaaaaggttgataactttgtaattttactctggagattctaaccgaagttggtgtaagttttcaagagttactaaaatcaagttggaaatgatttacgtacacttccctgagcctggactaaagcctcatgcctgtaccccaagtaggtgatggtacttttctatacaaaaaggatttcctggcaggcaggtatttacaaagtttgttcctgtaccagtccaataatgacaactctaaatccagctgcaccaaatcttagtgggccatttgtcatacctatgaaaattcttcagttattaaataactttgtcagtgctacctatggtaggccggaaacaatgtagattaggaagtttcatgaaaattaacttttggggctatggagaaacagttaagtatcttaagttactaaacatttccactgaatttttggagtgagccaaggttactataaaatactttggaagatgaattctctacctggagttagtttcgagagtaagcgtagcttttaacagaaataactgcagattttaagctcataatttgcaaaaaaaatcttttattggcatgaaaataatgttgtaaatggcaccaaatattccacttaaatgcatatacagtattagagtcaaaaactattttatccctctttgctgtttttcccccttctgcccactttcctgggtgttgggggggcccgctgacaacagtcacaaatccagcgacctaggaaaaaaattgttaatatagaatgaaaaattatctttacaggactgaattttaagcccatctaaactcttctgccttagctatcactaatgatattcctctctggattttgtggtgagaagggcactatgagttccttaatttaaggaaaaaatgtaaacttaatcaatgtaatcaatgccatgcaaaattcattgcaagtcaagggggatgggagagatgcaatgccatacggtgatacggacctttaagaaagtacaatctttcctgaaattcaaacactatcatacttcaaaaggtcaaaacccattccggaatttggcttttttaagactttttctctcctgctcactggcagctgtgtgtcttaacagcattctttcaagtcctggtgtactctgctgacagcactttaaaactttaacagcacaatgataacttgtactacatacttgatctgaattactacagaaaaataattatgttgcttgcttaatgattcccaggaaacttcgttgtaggcatatattttataagagtattatacagtgttaactatgcaagtaagttctaaaattacacaattatctgtgtaatgttttagtccaattactgtgatttattcaactctgttctaaagttatctggaattgtcatgctgcctcaatttacagaaatctataatagatttctatagaaatgtataaagacgtagcagtcattttgttgtttctaaatagataacatataaaaataaaggctttg

SEQ ID NO: 119179 - DNA, 6210 bp, Homo sapiens
  Payload ID: 3352
  Gene Symbol: C6orf132
  Gene Name: chromosome 6 open reading frame 132
  Uniprot ID: Q5T0Z8
  ENST ID: ENST00000341865
  CDS Start-End: 1-3567
atgaaaaagaagcagacggtgcagggcaccttcagcaaactcttcgggaagaagcacaccacgacccccagcacctccctctacgccaccaatccgccctggatcttcacccaggaggccccggaggaggggaccgggggcttcgatggcatctattatggagacaatcggtttaacacagtgagcgagtcaggaacagccacgctgaaagctcggccaagagtccggcccctgctgaccttccttccgctgaatgcccaggaaaaccatgggctggctgtgcccaccccctcggttccagatgattttgcagacaaagaagtgacaggtaccagctcactagtcaatggcaacctccgactgtacagctctgtgggtgacctgaggcctggacaatatggccaggatctactcatccccccacctcccccaggcccagccccagggccccctcaggacatttcagaacctccaggggggtcgccactgccatctccaccttccacagcacccccaccacctcccctgctgctggaacccccacccccgcccagcatggccccacctccacccccagtattggaggccctatccccaccacacactctttcctccccatccatacccacccctcctgacttcattccccctgccccacccttggcctttctagcccccccaccgcctcctgtgccagccccagcacccccagctccagcatctcctcacacagtggggactcgtctctttccccctgggggtgtcaccaagtggaaatcagatgtagcactgaatggcaggcaggcagaggccaccagagccagccccccgagaagccctgctgagccaaaggggagcgccctgggacctaacccagagccccatctcaccttcccccgttctttcaaagtgcctcccccaaccccagtcaggacttcgtccatcccagttcaggaagcacaagaggctccccgaaaggaagagggggccaccaagaaggctcccagccgactcccactgcctcccagcttccacatccgccccgcctcccaggtctacccagacagggcccccgagccagactgccctggggagctcaaggccacagcaccagccagcccaaggcttggccagtcccagtcccaagcagatgaacgagctgggactccgcctccagcccctcccctgccccctcctgcaccccccctccctcccccagcacccccacttcccccagctgcacctcctttgccctgtgctcagaaggcagcccatccacctgctgggtttacaaaaacccctaaatccagctctcctgctctcaaacccaaacccaacccccccagcccagagaacacagcgtcttcagcacctgtggactggagggaccccagccagatggaaaagctgcggaacgagctggcagcctatctctgtggctccaggagagaggaccgattcctcagtcacaggccaggcccaacagtggcccctcagagcaaggagggcaagaagggcccccgcctgcctgagaaggagactctcctgagcctgccagcaaaggacactcccccaggtgttcctgaaaagagtcttggcggcagcagcctgacagagacagaggctgcccccagcctgaccctgccctctgtggactacattccccaagactctccaactcccagtgtgcggcagatccggaatgagctggaggcccggctctcctcagcagcagagaaggaggctaagcccagcataggatctctgccccctaagcctcggctagaagggggaagaatttgtgaaaacggggctgatgatgacaaactctccaagcctgtggccaagaatctgccacctcaatccaccaccctgctgccaactacatcactccagcccaaggctatgttgggaccagccataccacccaaggccacacctgagccagccataccacccaaggctacactttggccagccacaccacccaaggccacacttgggccagccacaccactcaaggccacatctgggccaaccacaccactcaaggccacatctggccctgccatagcatctacagccacaactctgcccaccaccacatcccaactgatggcagagaaggactcaggcccagctggccagccagagaagccagcatctcaagaagtttccactccctcccaggcaaggggagaggggtccccctcagaggccactaggctgcccacacagggagcccgctcatctgcagccttcccaccaaagacatctcctggtggaggagaggtgccatgtctctacaagccccactgccaccagagcagcctcagccgtgaggttgctgtggtgatgcccaccctggccagaggaggggctgcagggccaggggagcccgtggaggtgaaggagcccccagggctgccagccaagcctcctgcctcggcccagcccactgatgaactcctcaggcacccggtgactggggaggtggtggagcggggctcgccgatggccctgctcctggcggccaggcagagggctcagaagggaaggtctgtaggggctgccctgggtcggtcctctctgccaggaagtctccgtgaccacagccaccaagccgaggccagctctgacagcatcttccacagccagggcacgcccaactccttcactgtggtgcccaagttacccaaggaggctgagaaggactccccgctgacgaccgaaatacccaataagtgggggccgcggctgggaagagacgcagagggcacagagctgagccgcaggcacaactggacaaagccagagccccaggcccctgtggcctgggaaagagtagctccctccaacctcccccagggccacccgctgcccaagtccttctcctccccaccttctccttcgaacaagagggaggaggaggaggaggagttcaacttcgaggtcatcccaccgccgccagagttcagcaatgaccctgagcccccggccccggccctccagtatctgggccgccagagctcccctccccggaacaactactcagacttgaggcagctcccgaacgctggccccggggcgcccccggctctcggcttctcgcgctttcccgcgggcgcgcgctacgccggggctgggggcctggagcgcttctcgggagggggccgctcgctcataaagaagcgcctgtacgtcggggagccgcaccgaggcccagggctaccccacggtggcaccggccgcagcctgagctctcccaactgcttcgggccgcagcccggaggccccgagatgcggcgcgtgaactcggcgggtcgcgcgccccccggaggcctgcacgcgccgaggctgtccctggagggcgccgcccggggcgccgcggaggccaagcacaaagcgcccggcagcgccgactacggcttcgccccagctgccggcaggtctccctacaccaccacccgctatggaagccccatcaacacgttcaccgtgaggcctgggacccgccatcccatctcctatgtctgctcaggggcccatcggaaagccacctcctgagccaggggttctcttagctctactccaacaaactgtgtctttaaggatctgggcacttgtttcttgtggggggtgggaggtacacagcaggtgttgggcgacctgactcagacacagaggagtctttgatccccaaagaccaacgatgagaagcagtggcccaggaagaccgagagtgggcttctgtttcccaaagcgctggtgtgactgtggactgtttacacgtggggggtgggaggggaaggagggtagagagaaggaaccattaaggacctgggcgctgagtttctgctctctggtactatctgctttagcaagagttatttaaaacagttttacaagcacggcctactgagcaggttctgaaagcaaggggtggggcactgactgaactggaacccatcgagatagctgtgattgcctgtcaggcccttgcaaagggctgaggcccagctctgtctggtgggtgtgcagggcaccgaagggagatctttagcctccatcacctgccatcccaagcaagagtggacacctggggttcctagccgcattgaggtgggaccaggaatgtgtatgtataacatgtggagaaggaccatgtgtggggtggggagtgaagctcccacatgtggaatggaagccctttgcattggccaagggcagaggtgggagattgatggttcatttttccttggccctagcccttagctacagggaggcctagagagaggacacttggcaagtttaggatgggaaacaaggttaagcctggctttgctattcagacctgtgcagccctgattttggggactgggcccaaggagccatgagtcttaggcttgacactaggggccttacatggccaggtctcatatgggatttggagaaggcatttttcctaacactgatactacaagtcaccaatactcttgatgccttaagatgctagaaagccttggagagtggaggcagcagagatgggaatggaggtctgaagaagcttgctgctgttggggaatgtgtttgggaaagtcaagagtggtaggattggttggctgggcgcggtggctcacacctgtaatcccagcactttgggaggccgaggccggtggatcacttgaggtcagaagttcgagaccagcctgcccaaatggtgaaaccccatctctactaaaaatacggaaaaaaaaaaaaaaagagtgctaggattgggccagttaagagcaggggagacctggctgggcatggtggctcacacctgtaattctagcactttgggaggctgaggcgggtggatcatgaggtcaagagattaagaccatcctggcctacatggcgaaaccctgtctctactaaaaataaaaaaatgacctgggcatggtggtgggcgcctgtagtcccagctactcggggcgctgaggcaggagaatcgctcgaacccaggaggtggaggttgcagtgagccgagattgcacaattgcactccagcctggcgacagagcgagactcgtctcaaaaaaaaaaaaaaaaaaaaaaaaaggagcaggggagacctatcagtagggtgaccacgtgtcctttgcctgggcagtccaggtttatgcttgttttccagtgaattagacccccttccacttttcaaaaaagtcctggtttagatgctgtgatcaccaaacatatcaggaaacaatattccttggtcttgcttccctatcttcaggtactggtgggccaaattcctgggaccaggtcaaggtgggctgcctcagtaagaaggaaggactggagagtgcccatttcagaggagcaggctggtgggggccagccagaaagtagttccctttggggggaagatgttggacctttattatttgtggtaaccagccgaggctggttgtcaggacagcaggtgagccactttagggaagaaagtgcaggggtgggtggatgcccagattaccaaggccagccaccctgatggggtagggtctggttatctgtgttcaagaagcaaatcccaccccagccccagcactagctctctatgtatgtattttccctgtacaatgttttataaaagagatcattaatttatctgctatgttaaggctcgaggggtggggcgtagactctcagctgtatattgctctggggtgggcagggaaggctgagtctcacttgacttggaagataaacaggccagtttggactggcctccagctccgtggctgtgtttgtctaacaaggatttgggtaactactggatacaagccactgtgcttagtatggatagactgccatcagctcacccacatgactcctgttcatggcaagctaatagtctgtctggtggaagaggattgaaaaagcacacaaaaacatcataaattacaaggagtagtaagaaggaaaaaacagggaacgtgagagaataactagcgagtggggagaggagtggatttactttaacagggtagtcagggaaggcctcttgtggtggtgacatactgatttaggcaaagcgtccagcacgtgcctagcgcttagtagttgctcagcaaatggcatctttgggtgatgaatacctcacatttgtatatggcctgtcacagttttccataaagcttttttttttaaggccat

SEQ ID NO: 119180 - DNA, 894 bp, Homo sapiens
  Payload ID: 3352
  Gene Symbol: C6orf132
  Gene Name: chromosome 6 open reading frame 132
  Uniprot ID: Q5T0Z8
  ENST ID: ENST00000356542
  CDS Start-End: 176-475
tttcccggcaagcggcggcgcccgcagcacctgttgcccggtgcgcgggcggggaggacggcgggggacatggcctggtagagtcccctggggagaccgtgctgagttcagtccggggcagggcagggcgagggagggaaggtccttccctggcgcccgcgcgggctgcggcagcatgaaaaagaagcagacggtgcagggcaccttcagcaaactcttcgggaagaagcacaccacgacccccagcacctccctctacgccaccaatccgccctggatcttcacccaggaggccccggaggaggggaccgggggcttcgatggcatctattatggagacaatcggtttaacacagtgagcgagtcaggaacagccacgctgaaagctcggccaagagtccggcccctgctgaccttccttccgctgactgagtttcattcttgttgcccaggctggagtggtacaatggcgtgatctcggctccctgcaacctccacctcctgggttcaagcgattctcctgcctcagcctcccaagtagctgggattacaggtgcccaccaccatgcccggcaaattttttgtatttttagtagagacagggtttcaccattttggccaggctggtctcgaactcctgacctcaggtgatccacaaacctcagcctcccaaagtgctgggattacaggcgtgagctaccgcgcccagcctgaaatactctatattgggaggttaattagattctctcctatcacttaccctcagcacacatacccagattcatagcagtgtgggcccagagttgacacacctctaccagtcggtaaaatactaaaacattcatctgtaaaatgggaataaaaaaaaaaaaacaaataaaatactgaaataca

SEQ ID NO: 119181 - DNA, 1978 bp, Homo sapiens
  Payload ID: 3353
  Gene Symbol: C6orf136
  Gene Name: chromosome 6 open reading frame 136
  Uniprot ID: Q5SQH8
  ENST ID: ENST00000293604
  CDS Start-End: 194-1684
cttcagccgcttccctcgagcctgcagtgcgcaagcgcgggacatctccgtttccctccctcagccccttccccccctacccccccgccccggcctcctttccccttcacgaagccggctctggggcgcgctcacccctgtgaggaggccggaggtcggactcaggaggctccttctccactcccggaagatcatgtaccagcccagccggggtgcggcccggcgtctcggcccttgcctgcgcgcctaccaggctcgaccccaggtgagcggaggagaagagggagggaggagagggggcggggagagaccctcctcaaagccggtgcgtggggcggagcgcgcgctgggttccgcgcaggcgcagagacacccgccgccccttcccacctgtgccctgcagcgcgtggacaggctaggggtcgcgggagcgggagggaggcgctgccgggcctgtcgcgcaaggacgtcggtcctcccaggtttgagggcggtcaggcggggtcaaggccaggcagcggggcgcgtctgcgttgcgcccgactctccgcggttacctgtgcctagaggtgatttgaagggcaggggccgagagattcgtagccctgctgcggcgccgtcccggagttccccggcccagaccagacccgcggggcgccctcagcagcccgcccgtcttgcactcggagagcggtcctggcaggaaggccggccagtgtgcacccggttcgggcccctgcgcccgggctggcaagatggccacgcccccagcagagacggcgcctctaggacaccatcggggaccgaggaccagctttatccagggactctaccattcccacccctttggccccactccacgacaaccacttccccatcttctcctctattctggtctcccctgcccccacgccttcccacccagcgtcttccccaggttcccccactacctctccctcagatccaggccctcagctcagcatgggtggttctccctccaggaaagggggaggagggaccaggacctgagttgcatagcggctgcctggatgggcttagaagcctttttgagggacctccctgcccctatcctggggcttggatacctttccaagtccctggaactgcccacccttcccctgccaccccgtcaggagatcctagtatggaggaacatctgtctgtcatgtatgagagactgagacaagagcttcccaagctcttccttcagtcccacgactacagtctgtattccttggatgtggaattcatcaatgagatcctcaacatacgtaccaagggccggacatggtacattctttcactgaccctctgccgtttcctggcctggaattattttgcacaccttcgtttggaggttttacagctgacccgccaccctgagaactggaccctgcaagcccggtggcggcttgtggggctgcccgtccacttgctctttttgcggttctacaagcgtgacaaagacgagcattaccggacctatgatgcctactccactttctacctgaattccagtggcctcatttgtcgccatcgtctagataaactgatgccttcacactcacctccaacgcctgtgaagaagctgctagtgggagccctggtggccctggggctgtcagagccagaacctgacttaaacctgtgttccaagccctgatccttgaccttggagtggaggcagcactgaagactgctacgcccaagagaaggaggtggaggcagccaagaatctcaggagccagcttcctctcctcgtttctctccttccttcctttccatctcatgctgtgtaaagctgctgtgtaatttaacttgtaaataataaagtttaactgactatatgagatagaatttcacatatcactttctctagatcccaaatgttcccacaagctttattccaaaaataattttatttaataggtattaaataatgtatagaaggaaaagg

SEQ ID NO: 119182 - DNA, 614 bp, Homo sapiens
  Payload ID: 3353
  Gene Symbol: C6orf136
  Gene Name: chromosome 6 open reading frame 136
  Uniprot ID: Q5SQH8
  ENST ID: ENST00000376471
  CDS Start-End: 69-614
gcgcgctcacccctgtgaggaggccggaggtcggactcaggaggctccttctccactcccggaagatcatgtaccagcccagccggggtgcggcccggcgtctcggcccttgcctgcgcgcctaccaggctcgaccccagcttcccaagctcttccttcagtcccacgactacagtctgtattccttggatgtggaattcatcaatgagatcctcaacatacgtaccaagggccggacatggtacattctttcactgaccctctgccgtttcctggcctggaattattttgcacaccttcgtttggaggttttacagctgacccgccaccctgagaactggaccctgcaagcccggtggcggcttgtggggctgcccgtccacttgctctttttgcggttctacaagcgtgacaaagacgagcattaccggacctatgatgcctactccactttctacctgaattccagtggcctcatttgtcgccatcgtctagataaactgatgccttcacactcacctccaacgcctgtgaagaagctgctagtgggagccctggtggccctggggctgtcagagccagaacctgacttaaacctgtgttccaagccctga

SEQ ID NO: 119183 - DNA, 1402 bp, Homo sapiens
  Payload ID: 3353
  Gene Symbol: C6orf136
  Gene Name: chromosome 6 open reading frame 136
  Uniprot ID: Q5SQH8
  ENST ID: ENST00000376473
  CDS Start-End: 160-1107
gcgcgggacatctccgtttccctccctcagccccttccccccctacccccccgccccggcctcctttccccttcacgaagccggctctggggcgcgctcacccctgtgaggaggccggaggtcggactcaggaggctccttctccactcccggaagatcatgtaccagcccagccggggtgcggcccggcgtctcggcccttgcctgcgcgcctaccaggctcgaccccaggaccagctttatccagggactctaccattcccacccctttggccccactccacgacaaccacttccccatcttctcctctattctggtctcccctgcccccacgccttcccacccagcgtcttccccaggttcccccactacctctccctcagatccaggccctcagctcagcatgggtggttctccctccaggaaagggggaggagggaccaggacctgagttgcatagcggctgcctggatgggcttagaagcctttttgagggacctccctgcccctatcctggggcttggatacctttccaagtccctggaactgcccacccttcccctgccaccccgtcaggagatcctagtatggaggaacatctgtctgtcatgtatgagagactgagacaagagcttcccaagctcttccttcagtcccacgactacagtctgtattccttggatgtggaattcatcaatgagatcctcaacatacgtaccaagggccggacatggtacattctttcactgaccctctgccgtttcctggcctggaattattttgcacaccttcgtttggaggttttacagctgacccgccaccctgagaactggaccctgcaagcccggtggcggcttgtggggctgcccgtccacttgctctttttgcggttctacaagcgtgacaaagacgagcattaccggacctatgatgcctactccactttctacctgaattccagtggcctcatttgtcgccatcgtctagataaactgatgccttcacactcacctccaacgcctgtgaagaagctgctagtgggagccctggtggccctggggctgtcagagccagaacctgacttaaacctgtgttccaagccctgatccttgaccttggagtggaggcagcactgaagactgctacgcccaagagaaggaggtggaggcagccaagaatctcaggagccagcttcctctcctcgtttctctccttccttcctttccatctcatgctgtgtaaagctgctgtgtaatttaacttgtaaataataaagtttaactgactatatgagatagaatttcacatatcactttctctagatcccaaatgttcccacaagctttattccaaaaataattttatttaataggtattaaataatgtatagaaggaaaagga

SEQ ID NO: 119184 - DNA, 808 bp, Homo sapiens
  Payload ID: 3353
  Gene Symbol: C6orf136
  Gene Name: chromosome 6 open reading frame 136
  Uniprot ID: Q5SQH8
  ENST ID: ENST00000383580
  CDS Start-End: 69-614
gcgcgctcacccctgtgaggaggccggaggtcggactcaggaggctccttctccactcccggaagatcatgtaccagcccagccggggtgcggcccggcgtctcggcccttgcctgcgcgcctaccaggctcgaccccagcttcccaagctcttccttcagtcccacgactacagtctgtattccttggatgtggaattcatcaatgagatcctcaacatacgtaccaagggccggacatggtacattctttcactgaccctctgccgtttcctggcctggaattattttgcacaccttcgtttggaggttttacagctgacccgccaccctgagaactggaccctgcaagcccggtggcggcttgtggggctgcccgtccacttgctctttttgcggttctacaagcgtgacaaagacgagcattaccggacctatgatgcctactccactttctacctgaattccagtggcctcatttgtcgccatcgtctagataaactgatgccttcacactcacctccaacgcctgtgaagaagctgctagtgggagccctggtggccctggggctgtcagagccagaacctgacttaaacctgtgttccaagccctgatccttgaccttggagtggaggcagcactgaagactgctacgcccaagagaaggaggtggaggcagccaagaatctcaggagccagcttcctctcctcgtttctctccttccttcctttccatctcatgctgtgtaaagctgctgtgtaatttaacttgtaaataataaagtttaactgactatatgagatagaa

SEQ ID NO: 119185 - DNA, 1301 bp, Homo sapiens
  Payload ID: 3353
  Gene Symbol: C6orf136
  Gene Name: chromosome 6 open reading frame 136
  Uniprot ID: Q5SQH8
  ENST ID: ENST00000383581
  CDS Start-End: 160-1107
gcgcgggacatctccgtttccctccctcagccccttccccccctacccccccgccccggcctcctttccccttcacgaagccggctctggggcgcgctcacccctgtgaggaggccggaggtcggactcaggaggctccttctccactcccggaagatcatgtaccagcccagccggggtgcggcccggcgtctcggcccttgcctgcgcgcctaccaggctcgaccccaggaccagctttatccagggactctaccattcccacccctttggccccactccacgacaaccacttccccatcttctcctctattctggtctcccctgcccccacgccttcccacccagcgtcttccccaggttcccccactacctctccctcagatccaggccctcagctcagcatgggtggttctccctccaggaaagggggaggagggaccaggacctgagttgcatagcggctgcctggatgggcttagaagcctttttgagggacctccctgcccctatcctggggcttggatacctttccaagtccctggaactgcccacccttcccctgccaccccgtcaggagatcctagtatggaggaacatctgtctgtcatgtatgagagactgagacaagagcttcccaagctcttccttcagtcccacgactacagtctgtattccttggatgtggaattcatcaatgagatcctcaacatacgtaccaagggccggacatggtacattctttcactgaccctctgccgtttcctggcctggaattattttgcacaccttcgtttggaggttttacagctgacccgccaccctgagaactggaccctgcaagcccggtggcggcttgtggggctgcccgtccacttgctctttttgcggttctacaagcgtgacaaagacgagcattaccggacctatgatgcctactccactttctacctgaattccagtggcctcatttgtcgccatcgtctagataaactgatgccttcacactcacctccaacgcctgtgaagaagctgctagtgggagccctggtggccctggggctgtcagagccagaacctgacttaaacctgtgttccaagccctgatccttgaccttggagtggaggcagcactgaagactgctacgcccaagagaaggaggtggaggcagccaagaatctcaggagccagcttcctctcctcgtttctctccttccttcctttccatctcatgctgtgtaaagctgctgtgtaatttaacttgtaaataataaagtttaactgactatatgagatagaa

SEQ ID NO: 119186 - DNA, 808 bp, Homo sapiens; identical to SEQ ID NO: 119184
  Payload ID: 3353
  Gene Symbol: C6orf136
  Gene Name: chromosome 6 open reading frame 136
  Uniprot ID: Q5SQH8
  ENST ID: ENST00000456444
  CDS Start-End: 69-614

SEQ ID NO: 119187 - DNA, 1496 bp, Homo sapiens
  Payload ID: 3353
  Gene Symbol: C6orf136
  Gene Name: chromosome 6 open reading frame 136
  ENST ID: ENST00000447330
  CDS Start-End: 1-1302
cttcccacctgtgccctgcagcgcgtggacaggctaggggtcgcgggagcgggagggaggcgctgccgggcctgtcgcgcaaggacgtcggtcctcccaggtttgagggcggtcaggcggggtcaaggccaggcagcggggcgcgtctgcgttgcgcccgactctccgcggttacctgtgcctagaggtgatttgaagggcaggggccgagagattcgtagccctgctgcggcgccgtcccggagttccccggcccagaccagacccgcggggcgccctcagcagcccgcccgtcttgcactcggagagcggtcctggcaggaaggccggccagtgtgcacccggttcgggcccctgcgcccgggctggcaagatggccacgcccccagcagagacggcgcctctaggacaccatcggggaccgaggaccagctttatccagggactctaccattcccacccctttggccccactccacgacaaccacttccccatcttctcctctattctggtctcccctgcccccacgccttcccacccagcgtcttccccaggttcccccactacctctccctcagatccaggccctcagctcagcatgggtggttctccctccaggaaagggggaggagggaccaggacctgagttgcatagcggctgcctggatgggcttagaagcctttttgagggacctccctgcccctatcctggggcttggatacctttccaagtccctggaactgcccacccttcccctgccaccccgtcaggagatcctagtatggaggaacatctgtctgtcatgtatgagagactgagacaagagcttcccaagctcttccttcagtcccacgactacagtctgtattccttggatgtggaattcatcaatgagatcctcaacatacgtaccaagggccggacatggtacattctttcactgaccctctgccgtttcctggcctggaattattttgcacaccttcgtttggaggttttacagctgacccgccaccctgagaactggaccctgcaagcccggtggcggcttgtggggctgcccgtccacttgctctttttgcggttctacaagcgtgacaaagacgagcattaccggacctatgatgcctactccactttctacctgaattccagtggcctcatttgtcgccatcgtctagataaactgatgccttcacactcacctccaacgcctgtgaagaagctgctagtgggagccctggtggccctggggctgtcagagccagaacctgacttaaacctgtgttccaagccctgatccttgaccttggagtggaggcagcactgaagactgctacgcccaagagaaggaggtggaggcagccaagaatctcaggagccagcttcctctcctcgtttctctccttccttcctttccatctcatgctgtgtaaagctgctgtgtaatttaacttgtaaataataaagtttaactgactatatgagatagaa

SEQ ID NO: 119188 - DNA, 1301 bp, Homo sapiens; identical to SEQ ID NO: 119185
  Payload ID: 3353
  Gene Symbol: C6orf136
  Gene Name: chromosome 6 open reading frame 136
  Uniprot ID: Q5SQH8
  ENST ID: ENST00000422530
  CDS Start-End: 160-1107

SEQ ID NO: 119189 - DNA, 808 bp, Homo sapiens; identical to SEQ ID NO: 119184
  Payload ID: 3353
  Gene Symbol: C6orf136
  Gene Name: chromosome 6 open reading frame 136
  Uniprot ID: Q5SQH8
  ENST ID: ENST00000455682
  CDS Start-End: 69-614

SEQ ID NO: 119190 - DNA, 1496 bp, Homo sapiens; identical to SEQ ID NO: 119187
  Payload ID: 3353
  Gene Symbol: C6orf136
  Gene Name: chromosome 6 open reading frame 136
  ENST ID: ENST00000424031
  CDS Start-End: 1-1302

SEQ ID NO: 119191 - DNA, 808 bp, Homo sapiens; identical to SEQ ID NO: 119184
  Payload ID: 3353
  Gene Symbol: C6orf136
  Gene Name: chromosome 6 open reading frame 136
  Uniprot ID: Q5SQH8
  ENST ID: ENST00000417649
  CDS Start-End: 69-614

SEQ ID NO: 119192 - DNA, 1301 bp, Homo sapiens; identical to SEQ ID NO: 119185
  Payload ID: 3353
  Gene Symbol: C6orf136
  Gene Name: chromosome 6 open reading frame 136
  Uniprot ID: Q5SQH8
  ENST ID: ENST00000430141
  CDS Start-End: 160-1107

SEQ ID NO: 119193 - DNA, 1301 bp, Homo sapiens; identical to SEQ ID NO: 119185
  Payload ID: 3353
  Gene Symbol: C6orf136
  Gene Name: chromosome 6 open reading frame 136
  Uniprot ID: Q5SQH8
  ENST ID: ENST00000419321
  CDS Start-End: 160-1107

SEQ ID NO: 119194 - DNA, 808 bp, Homo sapiens; identical to SEQ ID NO: 119184
  Payload ID: 3353
  Gene Symbol: C6orf136
  Gene Name: chromosome 6 open reading frame 136
  Uniprot ID: Q5SQH8
  ENST ID: ENST00000415931
  CDS Start-End: 69-614

SEQ ID NO: 119195 - DNA, 1496 bp, Homo sapiens
  Payload ID: 3353
  Gene Symbol: C6orf136
  Gene Name: chromosome 6 open reading frame 136
  ENST ID: ENST00000449122
  CDS Start-End: 1-1302
cttcccacctgtgccctgcagcgcgtggacaggctaggggtcgcggaagcgggagggaggcgctgccgggcctgtcgcgcaaggacgtcggtcctcccaggtttgagggcggtcaggcggggtcaaggccaggcagcggggcgcgtctgcgttgcgcccgactctccgcggttacctgtgcctagaggtgatttgaagggcaggggccgagagattcgtagccctgctgcggcgccgtcccggagttccccggcccagaccagacccgcggggcgccctcagcagcccgcccgtcttgcactcggagagcggtcctggcaggaaggccggccagtgtgcacccggttcgggcccctgcgcccgggctggcaagatggccacgcccccagcagagacggcgcctctaggacaccatcggggaccgaggaccagctttatccagggactctaccattcccacccctttggccccactccacgacaaccacttccccatcttctcctctattctggtctcccctgcccccacgccttcccacccagcgtcttccccaggttcccccactacctctccctcagatccaggccctcagctcagcatgggtggttctccctccaggaaagggggaggagggaccaggacctgagttgcatagcggctgcctggatgggcttagaagcctttttgagggacctccctgcccctatcctggggcttggatacctttccaagtccctggaactgcccacccttcccctgccaccccgtcaggagatcctagtatggaggaacatctgtctgtcatgtatgagagactgagacaagagcttcccaagctcttccttcagtcccacgactacagtctgtattccttggatgtggaattcatcaatgagatcctcaacatacgtaccaagggccggacatggtacattctttcactgaccctctgccgtttcctggcctggaattattttgcacaccttcgtttggaggttttacagctgacccgccaccctgagaactggaccctgcaagcccggtggcggcttgtggggctgcccgtccacttgctctttttgcggttctacaagcgtgacaaagacgagcattaccggacctatgatgcctactccactttctacctgaattccagtggcctcatttgtcgccatcgtctagataaactgatgccttcacactcacctccaacgcctgtgaagaagctgctagtgggagccctggtggccctggggctgtcagagccagaacctgacttaaacctgtgttccaagccctgatccttgaccttggagtggaggcagcactgaagactgctacgcccaagagaaggaggtggaggcagccaagaatctcaggagccagcttcctctcctcgtttctctccttccttcctttccatctcatgctgtgtaaagctgctgtgtaatttaacttgtaaataataaagtttaactgactatatgagatagaa

SEQ ID NO: 119196 - DNA, 1496 bp, Homo sapiens; identical to SEQ ID NO: 119187
  Payload ID: 3353
  Gene Symbol: C6orf136
  Gene Name: chromosome 6 open reading frame 136
  ENST ID: ENST00000442792
  CDS Start-End: 1-1302

SEQ ID NO: 119197 - DNA, 1301 bp, Homo sapiens; identical to SEQ ID NO: 119185
  Payload ID: 3353
  Gene Symbol: C6orf136
  Gene Name: chromosome 6 open reading frame 136
  Uniprot ID: Q5SQH8
  ENST ID: ENST00000425581
  CDS Start-End: 160-1107

SEQ ID NO: 119198 - DNA, 808 bp, Homo sapiens; identical to SEQ ID NO: 119184
  Payload ID: 3353
  Gene Symbol: C6orf136
  Gene Name: chromosome 6 open reading frame 136
  Uniprot ID: Q5SQH8
  ENST ID: ENST00000417076
  CDS Start-End: 69-614

SEQ ID NO: 119199 - DNA, 1496 bp, Homo sapiens; identical to SEQ ID NO: 119187
  Payload ID: 3353
  Gene Symbol: C6orf136
  Gene Name: chromosome 6 open reading frame 136
  ENST ID: ENST00000453871
  CDS Start-End: 1-1302

SEQ ID NO: 119200 - DNA, 1496 bp, Homo sapiens; identical to SEQ ID NO: 119187
  Payload ID: 3353
  Gene Symbol: C6orf136
  Gene Name: chromosome 6 open reading frame 136
  ENST ID: ENST00000411654
  CDS Start-End: 1-1302

SEQ ID NO: 119201 - DNA, 1496 bp, Homo sapiens; identical to SEQ ID NO: 119187
  Payload ID: 3353
  Gene Symbol: C6orf136
  Gene Name: chromosome 6 open reading frame 136
  ENST ID: ENST00000446773
  CDS Start-End: 1-1302

SEQ ID NO: 119202 - DNA, 1301 bp, Homo sapiens; identical to SEQ ID NO: 119185
  Payload ID: 3353
  Gene Symbol: C6orf136
  Gene Name: chromosome 6 open reading frame 136
  Uniprot ID: Q5SQH8
  ENST ID: ENST00000447505
  CDS Start-End: 160-1107

SEQ ID NO: 119203 - DNA, 692 bp, Homo sapiens
  Payload ID: 3353
  Gene Symbol: C6orf136
  Gene Name: chromosome 6 open reading frame 136
  ENST ID: ENST00000465699
  CDS Start-End: 1-315
atcaatgagatcctcaacatacgtaccaagggccggacatggtacattctttcactgaccctctgccgtttcctggcctggaattattttgcacaccttcgtttggaggttttacagctgacccgccaccctgagaactggaccctgcaagcccggtggcggcttgtggggctgcccgtccacttgctctttttgcggttctacaagcgtgacaaagacgagcattaccggacctatgatgcctactccactttctacctgaattccagtggcctcatttgtcgccatcgtctagataaagtgagtcctaggtagggctgggtggggtaaagggtagaacatttgtgtgcctcccccaactggcattaacctttctccctgcagctgatgccttcacactcacctccaacgcctgtgaagaagctgctagtgggagccctggtggccctggggctgtcagagccagaacctgacttaaacctgtgttccaagccctgatccttgaccttggagtggaggcagcactgaagactgctacgcccaagagaaggaggtggaggcagccaagaatctcaggagccagcttcctctcctcgtttctctccttccttcctttccatctcatgctgtgtaaagctgctgtgtaatttaacttgtaaataataaagtttaactgactatatgagatagaa

SEQ ID NO: 119204 - DNA, 445 bp, Homo sapiens
  Payload ID: 3353
  Gene Symbol: C6orf136
  Gene Name: chromosome 6 open reading frame 136
  ENST ID: ENST00000463794
  CDS Start-End: 107-283
ccccggcctcctttccccttcacgaagccggctctggggcgcgctcacccctgtgaggaggccggaggtcggactcaggaggctccttctccactcccggaagatcatgtaccagcccagccggggtgcggcccggcgtctcggcccttgcctgcgcgcctaccaggctcgaccccaggggccggacatggtacattctttcactgaccctctgccgtttcctggcctggaattattttgcacaccttcgtttggaggttttacagctgacccgccaccctgagaactggaccctgcaagcccggtggcggcttgtggggctgcccgtccacttgctctttttgcggttctacaagcgtgacaaagacgagcattaccggacctatgatgcctactccactttctacctgaattccagtggcctcatttgtcgccatcgtctaga

SEQ ID NO: 119205 - DNA, 613 bp, Homo sapiens
  Payload ID: 3353
  Gene Symbol: C6orf136
  Gene Name: chromosome 6 open reading frame 136
  ENST ID: ENST00000484551
  CDS Start-End: 194-466
cttcagccgcttccctcgagcctgcagtgcgcaagcgcgggacatctccgtttccctccctcagccccttccccccctacccccccgccccggcctcctttccccttcacgaagccggctctggggcgcgctcacccctgtgaggaggccggaggtcggactcaggaggctccttctccactcccggaagatcatgtaccagcccagccggggtgcggcccggcgtctcggcccttgcctgcgcgcctaccaggctcgaccccaggaaagggggaggagggaccaggacctgagttgcatagcggctgcctggatgggcttagaagcctttttgagggacctccctgcccctatcctggggcttggatacctttccaagtccctggaactgcccacccttcccctgccaccccgtcaggagatcctagtatggaggaacatctgtctgtcatgtatgagagactgagacaagagcttcccaagctcttccttcagtcccacgactacagtctgtattccttggatgtggaattcatcaatgagatcctcaacatacgtaccaagggccggacatggtacattctttcactgaccctctgccgtttcctggcct

SEQ ID NO: 119206 - DNA, 464 bp, Homo sapiens
  Payload ID: 3353
  Gene Symbol: C6orf136
  Gene Name: chromosome 6 open reading frame 136
  ENST ID: ENST00000487873
  CDS Start-End: 1-147
gatcctagtatggaggaacatctgtctgtcatgtatgagagactgagacaagagcttcccaagctcttccttcagtcccacgactacagtctgtattccttggatgtggaattcatcaatgagatcctcaacatacgtaccaagtgagaattggggcacaggggccggacatggtacattctttcactgaccctctgccgtttcctggcctggaattattttgcacaccttcgtttggaggttttacagctgacccgccaccctgagaactggaccctgcaagcccggtggcggcttgtggggctgcccgtccacttgctctttttgcggttctacaagcgtgacaaagacgagcattaccggacctatgatgcctactccactttctacctgaattccagtggcctcatttgtcgccatcgtctagataaagtgagtcctaggtagggctgggtggggtaaag

SEQ ID NO: 119207 - DNA, 492 bp, Homo sapiens
  Payload ID: 3353
  Gene Symbol: C6orf136
  Gene Name: chromosome 6 open reading frame 136
  ENST ID: ENST00000468785
  CDS Start-End: 1-87
caagcccggtggcggcttgtggggctgcccgtccacttgctctttttgcggttctacaagcgtgacaaagacgagcattaccgctgatgccttcacactcacctccaacgcctgtgaagaagctgctagtgggagccctggtggccctggggctgtcagagccagaacctgacttaaacctgtgttccaagccctgatccttgaccttggagtggaggcagcactgaagactgctacgcccaagagaaggaggtggaggcagccaagaatctcaggagccagcttcctctcctcgtttctctccttccttcctttccatctcatgctgtgtaaagctgctgtgtaatttaacttgtaaataataaagtttaactgactatatgagatagaatttcacatatcactttctctagatcccaaatgttcccacaagctttattccaaaaataattttatttaataggtattaaataatgtatagaaggaaaagga

SEQ ID NO: 119208 - DNA, 583 bp, Homo sapiens
  Payload ID: 3353
  Gene Symbol: C6orf136
  Gene Name: chromosome 6 open reading frame 136
  ENST ID: ENST00000467801
  CDS Start-End: 1-286
gggccggacatggtacattctttcactgaccctctgccgtttcctggcctggaattattttgcacaccttcgtttggaggttttacagctgacccgccaccctgagaactggaccctgcaagcccggtggcggcttgtggggctgcccgtccacttgctctttttgcggttctacaagcgtgacaaagacgagcattaccggacctatgatgcctactccactttctacctgaattccagtggcctcatttgtcgccatcgtctagataaagtgagtcctagctgatgccttcacactcacctccaacgcctgtgaagaagctgctagtgggagccctggtggccctggggctgtcagagccagaacctgacttaaacctgtgttccaagccctgatccttgaccttggagtggaggcagcactgaagactgctacgcccaagagaaggaggtggaggcagccaagaatctcaggagccagcttcctctcctcgtttctctccttccttcctttccatctcatgctgtgtaaagctgctgtgtaatttaacttgtaaataataaagtttaactgactatatga

SEQ ID NO: 119209 - DNA, 1337 bp, Homo sapiens
  Payload ID: 3353
  Gene Symbol: C6orf136
  Gene Name: chromosome 6 open reading frame 136
  ENST ID: ENST00000488383
  CDS Start-End: 178-744
cgagcctgcagtgcgcaagcgcgggacatctccgtttccctccctcagccccttccccccctacccccccgccccggcctcctttccccttcacgaagccggctctggggcgcgctcacccctgtgaggaggccggaggtcggactcaggaggctccttctccactcccggaagatcatgtaccagcccagccggggtgcggcccggcgtctcggcccttgcctgcgcgcctaccaggctcgaccccaggaccagctttatccagggactctaccattcccacccctttggccccactccacgacaaccacttccccatcttctcctctattctggtctcccctgcccccacgccttcccacccagcgtcttccccaggttcccccactacctctccctcagatccaggccctcagctcagcatgggtggttctccctccaggaaagggggaggagggaccaggacctgagttgcatagcggctgcctggatgggcttagaagcctttttgagggacctccctgcccctatcctggggcttggatacctttccaagtccctggaactgcccacccttcccctgccaccccgtcaggagatcctagtatggaggaacatctgtctgtcatgtatgagagactgagacaagagcttcccaagctcttccttcagtcccacgactacagtctgtattccttggatgtggaattcatcaatgagatcctcaacatacgtaccaagtgagaattggggcacaggggccggacatggtacattctttcactgaccctctgccgtttcctggcctggaattattttgcacaccttcgtttggaggttttacagctgacccgccaccctgagaactggaccctgcaagcccggtggcggcttgtggggctgcccgtccacttgctctttttgcggttctacaagcgtgacaaagacgagcattaccggacctatgatgcctactccactttctacctgaattccagtggcctcatttgtcgccatcgtctagataaactgatgccttcacactcacctccaacgcctgtgaagaagctgctagtgggagccctggtggccctggggctgtcagagccagaacctgacttaaacctgtgttccaagccctgatccttgaccttggagtggaggcagcactgaagactgctacgcccaagagaaggaggtggaggcagccaagaatctcaggagccagcttcctctcctcgtttctctccttccttcctttccatctcatgctgtgtaaagctgctgtgtaatttaacttgtaaataataaagtttaactgactatatgagatagaa

SEQ ID NO: 119210 - DNA, 1820 bp, Homo sapiens
  Payload ID: 3354
  Gene Symbol: C6orf141
  Gene Name: chromosome 6 open reading frame 141
  Uniprot ID: Q5SZD1
  ENST ID: ENST00000371194
  CDS Start-End: 119-853
agctttcaccggctgggagtccggagctgcagcagaggccacacccagggcttggtggtcccgcgctttccggagctcagcaggcgcttgctgcttgaaccggtcaaagaaggaacgaatgaatgacccttttgccaggatggagacccgggggcctcagggagctgcgaatcccatggactcctcccgcagcctgggggacctcgggccttttccgcgggaggtagggcgcggggctccgctagctccgggcgcccggaatcccgcgacggcaggggcgagccgaagccagggcggcggccacgaggacagaacggcagatcgggccctcggacctcgggccggggaggaattggaccgtgagtcctgggtcagagagaaagtgctctttctcctgcacccagagaggtggttagggactcgaggggaccctgcacgggaagaggtggccggtgcagaggaccttcctcatgcgggtggagaggaccacggcgaggagcccaactacccttctgtctttcaacgacaaaagcgaatttctggcaggcgtgtagccccgccgcgggacgcagcagacccacccaaatacgtgcttgtgcgggtggaggattatcaggtaacacaagaagtgttgcagacctcctgggccaagggtcgcatgaccacgaggactgaggagcacttcgtgaccgcgctcacttttcgcagcagtagagagggacagcctggggaacgctggggccctgctgaatcccgggctctccaggcacgaacaggggcatcccgcgtccacgccgcggggaggagggtttcaccgtctccagggacttggctcgaggaaattaaactctaatgagtagctcgagaaatgttccgggatggtggatgagcgatcatccttaaaagaaaatgctattctgggagctccaacctgcaattaacctacagaaggaaccttttgagaggctggtgcagcgcttcggggaggcagattaagaactttggcctggttgaagctctgtgaggagcaaagcagccctctccaggtgaactgcttgactttaccacctgaaggagtatttactgcaagaattaacaaagcagactgcagtgcaacggcacgatcttggctcaccacaacctctacctccagggttcaagcgatgctcctacctcagcctcctcagtagctgggattacaggcatgtgccatcaccccggctaattctgtatttttagtagagatggggtttctccatgttggccaggctggtcttgaactcccaacctcaggtgatcctcctgcctccgcctcccaaagtgctgggattacaggtgttcctgatccaagcagaaccctgttatttgaagagcctgagaaatcttatcccgtttacaaatgtcctgggagtgcatccaaagtgaaacttgggcatcctcaatactaagaaatctctgagaatgactggatcttggctctttgatcttacctctactcctctgaaaaacatgattatctaaaattgtgttaggtggatgaaccgcatcaaagacttccagaagccactccagtgaccataagataaatgtcagaatcgcataacccccaggatcagagatggagtctcactctgtcacccagcctggaatgtagtggcatcattgtaactcactgcagcctgaaactccttggcttaagtgatcctcccacctcagcctcccaagtagctggaactataggcacaagctaccatgcctggctattcttttttgttaattttttttaaactaaggaatgaagaaaataaaacattacatga

SEQ ID NO: 119211 - DNA, 585 bp, Homo sapiens
  Payload ID: 3354
  Gene Symbol: C6orf141
  Gene Name: chromosome 6 open reading frame 141
  ENST ID: ENST00000415078
  CDS Start-End: 1-218
agacctcctgggccaagggtcgcatgaccacgaggactgaggagcacttcgtgaccgcgctcacttttcgcagcagtagagagggacagcctggggaacgctggggccctgctgaatcccgggctctccaggcacgaacaggggcatcccgcgtccacgccgcggggaggagggtttcaccgtctccagggacttggctcgaggaaattaaactctaatgagtagctcgagaaatgttccgggatggtggatgagcgatcatccttaaaagaaaatgctattctgggagctccaacctgcaattaacctacagaaggaaccttttgagaggctggtgcagcgcttcggggaggcagattaagaactgacctagaaacagaagtgaagtttgaagtctgctctctgcaaagagggtgggagtgggtggagaagaggcttgttttaaaagccaaaaacagaaagtaaaaagaaatgggaaagtaaaaccaaagcagcaagtgactctcttctgatgtgcacttttcatttttctcccccacatttcagtgttagaaagaaaacgagaggagctagggaaagaaggag

SEQ ID NO: 119212 - DNA, 1450 bp, Homo sapiens
  Payload ID: 3354
  Gene Symbol: C6orf141
  Gene Name: chromosome 6 open reading frame 141
  Uniprot ID: Q5SZD1
  ENST ID: ENST00000529246
  CDS Start-End: 148-882
gcggttagcctggggctgatctagtcttcagctttcaccggctgggagtccggagctgcagcagaggccacacccagggcttggtggtcccgcgctttccggagctcagcaggcgcttgctgcttgaaccggtcaaagaaggaacgaatgaatgacccttttgccaggatggagacccgggggcctcagggagctgcgaatcccatggactcctcccgcagcctgggggacctcgggccttttccgcgggaggtagggcgcggggctccgctagctccgggcgcccggaatcccgcgacggcaggggcgagccgaagccagggcggcggccacgaggacagaacggcagatcgggccctcggacctcgggccggggaggaattggaccgtgagtcctgggtcagagagaaagtgctctttctcctgcacccagagaggtggttagggactcgaggggaccctgcacgggaagaggtggccggtgcagaggaccttcctcatgcgggtggagaggaccacggcgaggagcccaactacccttctgtctttcaacgacaaaagcgaatttctggcaggcgtgtagccccgccgcgggacgcagcagacccacccaaatacgtgcttgtgcgggtggaggattatcaggtaacacaagaagtgttgcagacctcctgggccaagggtcgcatgaccacgaggactgaggagcacttcgtgaccgcgctcacttttcgcagcagtagagagggacagcctggggaacgctggggccctgctgaatcccgggctctccaggcacgaacaggggcatcccgcgtccacgccgcggggaggagggtttcaccgtctccagggacttggctcgaggaaattaaactctaatgagtagctcgagaaatgttccgggatggtggatgagcgatcatccttaaaagaaaatgctattctgggagctccaacctgcaattaacctacagaaggaaccttttgagaggctggtgcagcgcttcggggaggcagattaagaactgtaagcagcataatacctcctttgtggcttgaattccttcgctgtctggggacctaagtcattcagaagaggtggagaaaagatattttcagattggcagaatgtgggagttttgaaatgagaaaacctgttgttaatttgcattttggaataactctcaattgatctcttttctgttccccgcccccctcttgtttctctttaggacctagaaacagaagtgaagtttgaagtctgctctctgcaaagagggtgggagtgggtggagaagaggcttgttttaaaagccaaaaacagaaagtaaaaagaaatgggaaagtaaaaccaaagcagcaagtgactctcttctgatgtgcacttttcatttttctcccccacatttcagtgttagaaagaaaacgagaggagctagggaaagaa

SEQ ID NO: 119213 - DNA, 1692 bp, Homo sapiens
  Payload ID: 3354
  Gene Symbol: C6orf141
  Gene Name: chromosome 6 open reading frame 141
  Uniprot ID: Q5SZD1
  ENST ID: ENST00000414696
  CDS Start-End: 128-862
ctagtcttcagctttcaccggctgggagtccggagctgcagcagaggccacacccagggcttggtggtcccgcgctttccggagctcagcaggcgcttgctgcttgaaccggtcaaagaaggaacgaatgaatgacccttttgccaggatggagacccgggggcctcagggagctgcgaatcccatggactcctcccgcagcctgggggacctcgggccttttccgcgggaggtagggcgcggggctccgctagctccgggcgcccggaatcccgcgacggcaggggcgagccgaagccagggcggcggccacgaggacagaacggcagatcgggccctcggacctcgggccggggaggaattggaccgtgagtcctgggtcagagagaaagtgctctttctcctgcacccagagaggtggttagggactcgaggggaccctgcacgggaagaggtggccggtgcagaggaccttcctcatgcgggtggagaggaccacggcgaggagcccaactacccttctgtctttcaacgacaaaagcgaatttctggcaggcgtgtagccccgccgcgggacgcagcagacccacccaaatacgtgcttgtgcgggtggaggattatcaggtaacacaagaagtgttgcagacctcctgggccaagggtcgcatgaccacgaggactgaggagcacttcgtgaccgcgctcacttttcgcagcagtagagagggacagcctggggaacgctggggccctgctgaatcccgggctctccaggcacgaacaggggcatcccgcgtccacgccgcggggaggagggtttcaccgtctccagggacttggctcgaggaaattaaactctaatgagtagctcgagaaatgttccgggatggtggatgagcgatcatccttaaaagaaaatgctattctgggagctccaacctgcaattaacctacagaaggaaccttttgagaggctggtgcagcgcttcggggaggcagattaagaactgtgttcctgatccaagcagaaccctgttatttgaagagcctgagaaatcttatcccgtttacaaatgtcctgggagtgcatccaaagtgaaacttgggcatcctcaatactaagaaatctctgagaatgactggatcttggctctttgatcttacctctactcctctgaaaaacatgattatctaaaattgtgttaggtggatgaaccgcatcaaagacttccagaagccactccagtgaccataagataaatgtcagaatcgcataacccccaggatcagcctgttgctcaggctggagtgcaatggcacgatctgagctcactgcaaccacctgcctcccgggttcaagctattctcctgcctcagcctcctgagtagctgggattacaggcgcctgcaaccacacccagctaatttttgtacttttagtagagatggggttttgccatgttggccaggctggtctcgaactcttgacctcaggtgatctgcctgcctcagcctcccaaagtgctgggattacaggcttgagccaccgagcctggcctctactttttattactgtcatgtagttagtgataaaatgcttctatctgaaaaaaaatttgttgttctaaattctaaaaaattctcgtgattattgcttaaattttaataaagcagatgtgattttcaaatta

SEQ ID NO: 119214 - DNA, 1140 bp, Homo sapiens
  Payload ID: 3355
  Gene Symbol: C6orf15
  Gene Name: chromosome 6 open reading frame 15
  Uniprot ID: Q6UXA7
  ENST ID: ENST00000259870
  CDS Start-End: 5-982
caggatgcagggccgcgtggcagggagctgcgctcctctgggcctgctcctggtctgtcttcatctcccaggcctctttgcccggagcatcggtgttgtggaggagaaagtttcccaaaacttggggaccaacttgcctcagctcggacaaccttcctccactggcccctctaactctgaacatccgcagcccgctctggaccctaggtctaatgacttggcaagggttcctctgaagctcagcgtgcctgcatcagatggcttcccacctgcaggaggttctgcagtgcagaggtggcctccatcgtgggggctgcctgccatggattcctggccccctgaggatccttggcagatgatggctgctgcggctgaggaccgcctgggggaagcgctgcctgaagaactctcttacctctccagtgctgcggccctcgctccgggcagtggccctttgcctggggagtcttctcccgatgccacaggcctctcacccaaggcttcactcctccaccaggactcggagtccagacgactgccccgttctaattcactgggagccgggggaaaaatcctttcccaacgccctccctggtctctcatccacagggttctgcctgatcacccctggggtaccctgaatcccagtgtgtcctggggaggtggaggccctgggactggttggggaacgaggcccatgccacaccctgagggaatctggggtatcaataatcaacccccaggtaccagctggggaaatattaatcggtatccaggaggcagctggggaaatattaatcggtatccaggaggcagctgggggaatattaatcggtatccaggaggcagctgggggaatattcatctatacccaggtatcaataacccatttcctcctggagtcctccgccctcctggctcttcttggaacatcccagctggcttccctaatcctccaagccctaggttgcagtggggctagagcacgatagagggaaacccaacattgggagttagagtcctgctcccgccccttgctgtgtgggctcaatccaggccctgtcagcatgtttccagcactatccccacttttcagtgcctcccctgctcatctccaataaaataaaagcacttatggaa

SEQ ID NO: 119215 - DNA, 1140 bp, Homo sapiens
  Payload ID: 3355
  Gene Symbol: C6orf15
  Gene Name: chromosome 6 open reading frame 15
  Uniprot ID: Q6UXA7
  ENST ID: ENST00000383532
  CDS Start-End: 5-982
caggatgcagggccgcgtggcagggagctgcgctcctctgggcctgctcctggtctgtcttcatctcccaggcctctttgcccggagcatcggtgttgtggaggagaaagtttcccaaaacttcgggaccgacttgcctcagctcggacaaccttcctccactggcccctctaactctgaacatccgcagcccgctctggaccctaggtctaatgacttggcaagggttcctctgaagctcagcgtgcctccatcagatggcttcccacctgcaggaggttctgcagtgcagaggtggcctccatcgtgggggctgcctgccatggattcctggccccctgaggatccttggcagatgatggctgctgcggctgaggaccgcctgggggaagcgctgcctgaagaactctcttacctctccagtgctgcggccctcgctccgggcagtggccctttgcctggggagtcttctcccgatgccacaggcctctcacccgaggcttcactcctccaccaggactcggagtccagacgactgccccgttctaattcactgggagccgggggaaaaatcctttcccaacgccctccctggtctctcatccacagggttctgcctgatcacccctggggtaccctgaatcccagtgtgtcctggggaggtggaggccctgggactggttggggaacgaggcccatgccacaccctgagggaatctggggtatcaataatcaacccccaggtaccagctggggaaatattaatcggtatccaggaggcagctggggaaatattaatcggtatccaggaggcagctgggggaatattaatcggtatccaggaggcagctgggggaatattcatctatacccaggtatcaataacccatttcctcctggagttctccgccctcctggctcttcttggaacatcccagctggcttccctaatcctccaagccctaggttgcagtggggctagagcacgatagagggaaacccaacattgggagttagagtcctgctcccgccccttgctgtgtgggctcaatccaggccctgttaacatgtttccagcactatccccacttttcagtgcctcccctgctcatctccaataaaataaaagcacttatggaa

SEQ ID NO: 119216 - DNA, 1140 bp, Homo sapiens; identical to SEQ ID NO: 119214
  Payload ID: 3355
  Gene Symbol: C6orf15
  Gene Name: chromosome 6 open reading frame 15
  Uniprot ID: Q6UXA7
  ENST ID: ENST00000440933
  CDS Start-End: 5-982

SEQ ID NO: 119217 - DNA, 1140 bp, Homo sapiens; identical to SEQ ID NO: 119214
  Payload ID: 3355
  Gene Symbol: C6orf15
  Gene Name: chromosome 6 open reading frame 15
  Uniprot ID: Q6UXA7
  ENST ID: ENST00000412706
  CDS Start-End: 5-982

SEQ ID NO: 119218 - DNA, 1140 bp, Homo sapiens; identical to SEQ ID NO: 119214
  Payload ID: 3355
  Gene Symbol: C6orf15
  Gene Name: chromosome 6 open reading frame 15
  Uniprot ID: Q6UXA7
  ENST ID: ENST00000427005
  CDS Start-End: 5-982

SEQ ID NO: 119219 - DNA, 1140 bp, Homo sapiens
  Payload ID: 3355
  Gene Symbol: C6orf15
  Gene Name: chromosome 6 open reading frame 15
  Uniprot ID: Q6UXA7
  ENST ID: ENST00000452899
  CDS Start-End: 5-982
caggatgcagggccgcgtggcagggagctgcgctcctctgggcctgctcctggtctgtcttcatctcccaggcctctttgcccggagcatcggtgttgtggaggagaaagtttcccaaaacttcgggaccaacttgcctcagctcggacaaccttcctccactggcccctctaactctgaacatccgcagcccgctctggaccctaggtctaatgacttggcaagggttcctctgaagctcagcgtgcctccatcagatggcttcccacctgcaggaggttctgcagtgcagaggtggcctccatcgtgggggctgcctgccatggattcctggccccctgaggatccttggcagatgatggctgctgcggctgaggaccgcctgggggaagcgctgcctgaagaactctcttacctctccagtgctgcggccctcgctccgggcagtggccctttgcctggggagtcttctcccgatgccacaggcctctcacctgaggcttcactcctccaccaggactcggagtccagacgactgccccgttctaattcactgggagccgggggaaaaatcctttcccaacgccctccctggtctctcatccacagggttctgcctgatcacccctggggtaccctgaatcccagtgtgtcctggggaggtggaggccctgggactggttggggaacgaggcccatgccacaccctgagggaatctggggtatcaataatcaacccccaggtaccagctggggaaatattaatcggtatccaggaggcagctggggaaatattaatcggtatccaggaggcagctgggggaatattaatcggtatccaggaggcagctgggggaatattcatctatacccaggtatcaataacccatttcctcctggagttctccgccctcctggctcttcttggaacatcccagctggcttccctaatcctccaagccctaggttgcagtggggctagagcacgatagagggaaacccaacattgggagttagagtcctgctcccgccccttgctgtgtgggctcaatccaggccctgttaacatgtttccagcactatccccacttttcagtgcctcccctgctcatctccaataaaataaaagcacttatggaa

SEQ ID NO: 119220 - DNA, 1308 bp, Homo sapiens
  Payload ID: 3356
  Gene Symbol: C6orf163
  Gene Name: chromosome 6 open reading frame 163
  Uniprot ID: Q5TEZ5
  ENST ID: ENST00000388923
  CDS Start-End: 252-1241
aactacttaaatcttcccaaatctggtgcccataccttctatggcaggggcttttagcaccattctttaacgttagacacataaccacagcctaatcacttgaaccatttaatccttaccagcctctagcattatcctaaaaccctgaacctcttccagctttcttaaactttcagcttttcttgaaacgactttttctgattctaagattattttaactgtaagtaggagaagacatctgaaatttaactatgatcagaaattcagattacaaaaactttgtttgctgtgctgtttgtaataaaataattccaccagccccttttggaaaaaccttcaaacggatccatgaatacaagccacttaagacacgcttttacactcacaaagacatactagatattggggcaaatattctgaaaaaagaagagcagtttcaagaagatatactcagagaacacattgcgaaagcagaagctgaagtatgggctcaggctaatgaacgtcaaaaacaagcagtggagaaagcacttgaagaagcaaatgacagacacaaaattgaaattcagattttgaaagaggaacatcagaaagatttacaggaagtgacagctaaaactaagacagagatgtatcaaaacatggatgacgaaatgaagagagagcacttggctgcagaacagcgcatggtccacagaatccaaaggattatgatggaatgccacagagagaaggtcgaagctgtggagaaagccagggctgaagaaagacacatcgcccaggaagcaatccaggcccagaaaagcaaagccgtggaggaaattgtgaatactggtgtcacagttattaaggatgagaagaccagtgtggcccgactgatgagggaaaaagaacatgaaatgagcatcctctatggcatagctcagaggcagaggcaagaagaggtacaggaagtgcttcaagaagcagagaaaacacatcaggccactcttggcaatatgatggataaactggctaacacccagggggagctgctgtctatagcaaaacaactgggaatcatgacaaattggaaagatttcctagaggaggaattacaggaaaccaggatggcatttcaaaaatacatcaattatacctttcctaagctttcaccaggacatgcagattttattctgccagaaagaaagaaaacaccttctaatcttgttattaaggagaacaaaacaactcttgattagaagtcttcagttgaaattccactacaaaagacatcattccagactaaataaatttactcaaaaacca

SEQ ID NO: 119221 - DNA, 2110 bp, Homo sapiens
  Payload ID: 3356
  Gene Symbol: C6orf163
  Gene Name: chromosome 6 open reading frame 163
  ENST ID: ENST00000608326
  CDS Start-End: 1445-2044
tatttctacacaatgttgggcttttgcagtatgtgtccatctccaccgtaatatatgctgccctgtgtttttaagattcgctgatgaactagtaggagactctgtgccgccaaacatatacttttaattgctagtgacagaaacataactcagaatagactgcatgaaatggaatttcttgactcttttaacagagaaacccaagggaaatctggcatcaaggctttcaatctgtccatgcttacccttttagtgagttggcttaatggtttactgctgcagctagacttactccggcagctgggaaaggaggaatgtggatccagatagctctaagaatctattaccttcagcttagaaatcccagaggaagaccaggcatggtggctcacgcctgtaatcctagcactttgggaggccgaagtgggcagatcacttgaggtcaagagttcgagaccagcctgaccaacatggtgaaagcccgtttctactaaaaatacaaaaattagtcaggcatggtggtgggcgcctgtaattccagctactcgggaggctgaggcaggagaatcacttgaaacgggaggcggaggttgcagtgagccgaaatggcgacactgcactgcaggctgggctacaaagcaagactccctctcaaaaaaaaagagaaatcccagtggaaaaagacctggctgtctgatattgcgtggtcctctagcctctctagacttttattaccttgtctgggtagagaggatattattatgggaatgttattatttggaaatcaaattagatcattgacagaaaaatagtaaacttctaccccttagctcactccatactgaagcagttaaacccacaaagaaccacatgctaaagaaaggcatgtaatgtgaaggcattccacttcccttctcctgatgctagccctagcacccaaataggaacagggagagagagagctgtataatgtgctaagacctcttgaatattcactcatcattctactttgggtgtacaaaatatgtccctttcttcgggcatttatttcacctccccagttgtctgctgtgtggactgggtgtgatgaggggaatgaccaactctatccaggcctgacagtgctgtgaattccctcctaatcagagaaaatcttactctttcaatgggtatctttgaaatatatatactggcatctcctaaaaggacgtgtctcctaaatagccctcataaataactagataatggtggaaaggaaagccaggaagcagtcggtggaggtttgtgaccattgctcttcaaatacacagatattggggcaaatattctgaaaaaagaagagcagtttcaagaagatatactcagagaacacattgcgaaagcagaagctgaagtatgggctcaggaagtgacagctaaaactaagacagagatgtatcaaaacatggatgacgaaatgaagagagagcacttggctgcagaacagcgcatggtccacagaatccaaaggattatgatggaatgccacagagagaaggtcgaagctgtggagaaagccagggctgaagaaagacacatcgcccaggaagcaatccaggcccagaaaagcaaagccgtggaggaaattgtgaatactggtgtcacagttattaaggatgagaagaccagtgtggcccgactgatgagggaaaaagaacatgaaatgagcatcctctatggcatagctcagaggcagaggcaagaagaggtacaggaagtgcttcaagaagcagagaaaacacatcaggccactcttggcaatatgatggataaactggctaacacccagggggagctgctgtctatagcaaaacaactgggaatcatgacaaattggaaagatttcctagaggaggaattacaggaaaccaggatggcatttcaaaaatacatcaattatacctttcctaagctttcaccaggacatgcagattttattctgccagaaagaaagaaaacaccttctaatcttgttattaaggagaacaaaacaactcttgattagaagtcttcagttgaaattccactacaaaagacatcattccagactaaataaatttactcaaaaacc

SEQ ID NO: 119222 - DNA, 1956 bp, Homo sapiens
  Payload ID: 3357
  Gene Symbol: C6orf183
  Gene Name: chromosome 6 open reading frame 183
  ENST ID: ENST00000417143
  CDS Start-End: 82-1956
tgtaagagttgctgtagcaacctcacagctgtgctctgtctagcagaaacttgggatacagaaaaacagcaaatacaaatcatggatgaaatttataagatcacttccacagaaagggtccagctgttggagaaaaaactggctgtgcaactgactgaactgaagtctgagatagaagagcagggagctcttcagggaacagctaatcgagtttacagctctattcaaatgccaaaggatatttattactttagaagagagagggaactagcactgaagaaaaccttacaggtggccgagtcgaagccccttgttgttcaggcagatgccgtgcagagggagctagagagctgcctaagaagggagtacacccctgaaaatttacctttgcttctgttgcagtattacacagagagaattgcccagctggcccagagtaaatatttacacatgcttaggtggaagaggttttgccaacacagtaagatcatggagcaactttatcctctttacaagaaacaagttggctacattatgcaggagtacaatgacacccttcagagagctgaaagattgtctgttgctcgagaaaacttcctcatgggaaaaaacaatcctcctaacttggtgacacaggaagatctgactatttacacaaagtggttagtgtgccacctgcactctcttgggactgttcaccagtacctgcaggccctccagtatttgcccatctccaaagtgctgagtgtagctttcaaccgagtcgctgaagctggtcagaaaaatgaaaatgtctgtgtcaatgacattgaccctgacattcagggttctgcatctcctgaccctgtggataccagcatttctgggccaatgagaacagaagctgcttttgtcctcccccaacatgcaacagaaacaggagaactgaaacctcagctgaagctcctgctctcccatttcagtatcccatatgacgtagaagagctctgggactctgctaaggaaatggaacttttttccttggtttcccaaaaatttcaaagcgtcttcatggagcaacagagattgcaaatgtttccagactgtgaagctggaatagctaaagcagataatttgggtttggcaggacccagaatgaccctgaaaaagaaagccaactggatttccttcataaagatcaagccaaaatgtgatccatggcaaaagaagcttttgactaaattaaaagaacggagaagaacagatgcattattgcaactccaagcaaagtttttgaagatttccaaccctgagtgagtaatgcaagtgctccaagatcacgctgcaaagacagtcatgctggctccacatcagccatcgtttgtggcttcccaaggtttgcatcagggcaattatgaccaagtctgggagaatattgacaacaacatcaacctctgtcagaataaaaatatgaaagatgatgacctctccatgaaacaaaatgaaaatgatctatcacagataactctcagccaacatgctgatgggcctctcaagcagatacaagagacagggtacaactatgcaatgaccctacaactgctgggcttggaagacggcactgaccccagtgataggaatcctgttctgatgagaggggcctacttgtcctttctgtatctgtgccaccttcgaatcagagaactgcagcacatctgcttaggaattctgaattatttcagatctgttgagcgaaccctgacaatcaatacttcgggccttaccttggtttcagggaaactggtccccaccatggaagatagttcctgggtaaatatggcaaaaggaggtctgggcaccttgcagggcctgggcgctcaccactatgtccgtgagacacctgctgagcacaaggtccacagcgtccaattcatggagttctcggaagtggagaaccaggatgactactacagcaca

SEQ ID NO: 119223 - DNA, 2496 bp, Homo sapiens
  Payload ID: 3358
  Gene Symbol: C6orf201
  Gene Name: chromosome 6 open reading frame 201
  ENST ID: ENST00000436110
  CDS Start-End: 204-551
atcttggagatggaggaaagcttgccagaacaactgcacaccccatccactcctcatgttctcagtttgttcttctctgtgatacaaccagcatcacgagaacagccagcagcagctccagcgtgataaaattttcactccttgacaagtgtaagaagccggaaaactgtgcccagccagaagttttgtgtcgcccctttgagatgctgtctaacctccacgagctgcttccgaatcacctgatggagacgctttattcccgcaagagtgaagaggacaagaaaaaatgtgagaatcctgaactctctggcttagaaagaatcttagcaagacatcagttgccaaaagagattaatctgaccccaaagccgaacagaatgcccccgtggaaaagaaaaatcatcaacaatgtaactgacgggtggaagaaatgtcacttgttgaagagaaacacgaaagagcctccaatgtccaccatagttgtcagtaatactattccttccattttgctcccttgctacatggctgaaaaagaacatgcaacccactgaagacctcaagtcagtgatctgtaggctgtcagcatttggcccaattcagtcagccactgtttgtggacgtcaaagtgctatagtggcattcaaagacatgacttcagcctgtaatgctgtgagtgcttttcaaagtaggaccccaggcaccatgttccagtgttcctggcaacaacgattcatgtcaaaagacaaaacttattcaaaaaaatgtacccagaagacacagcctaaggaatacaagcaggaaactgagaaacctgccaacaacagctaaagggacacaaacagtgtctcctgaatctttcagaataacatgaaagctgtatacctattgtggaatttgattagaatccggaacagtcagagttggaacaatgttcacaacaaaatgcaagttaataatgaaggaaaaataaaatcagtcaaatcagcctaatgctttgggaaaaatctaaattcagttaattctaccacaaacaacatgtaacctgcttatgactggcaacgctgaaggaggattcaaaggctctcatctcgcgctgcttgcctgacctcttgctttctaggagctgacttaccctgtcagatgcatacacggcatcgaatagcccaaggagggtgacggagatgcccacagctggaccattgaccactgcaatcagaggcttaggaaaatctataaaacagcccacaaattccctacagaaatggaaacacaaaatcattaaatgtgccaaagcagcatgactaaagcatgggcaagacagtctgactctgagataaagccttctgtcaggctgggtgtttccacagccaccaccagcagtgcctccttgtcctgccacttccctggtcttccgcaccagattcatccagggcatccgtctgaatggcagtggatggaagaccaaccagtgagacctatgggtcaaccctggtttgaatcttgtattctggacagtgagttcagggctgtaaaccagccgcagtcttagagattaggttgggtgactgagcacatgctgcaatatcacaacaagtgggaattacagatttggcaggaataaagagaaaagccttcatgacctcctcctgtgtttacaagactcctccgagtctcctaccttcagcgttcatggaaatctcccattcctctggctggatgagaatttgctaaattcctctgcctcagtgcaagataattttgtttacaactatagctcacttttatgttttccagtcaaatctcatgagaccagcaggatgaacaggtaacagaggtcaaagagaaagaatgaatgcccacctatggatggaggcagtttagagaaatatgcttgtccaaagtcacaattaactgcactgacacagagaagcagatattgcacttttgctcaactaaataccactttgatgactaagaacgggccctctgggatcagacaaaggaaaatcacagtgccttctgggtatatcagaacctacctgaaattcacaaactctaaacaatgaatgctcaactctgttgtatgaagtagccacaattaccaaccttcctgcacaaatcaaacaagagatatcttaaaataggaatgatgctgaaactctacagcttttgtgtgaaacacatagaagaagaaagtaaaacaggacaaactccgtgggcaggctccacctgactagaggattccaatgaaggactcaaactggacaccaaatccacatagttctgcctggcagcttcctgaacggacgatgacaaacaacctcagcccatggtcaatgaataagcactttgagaaagttactatactaataactaacaccttgcaatgaagaaagaatagaagcacatcaagatcttgaagactccatttacaatggcttaatgagaagcacaaacttctttagaagtacagcaaataaaagcacagtaactagt

SEQ ID NO: 119224 - DNA, 2403 bp, Homo sapiens
  Payload ID: 3358
  Gene Symbol: C6orf201
  Gene Name: chromosome 6 open reading frame 201
  Uniprot ID: Q7Z4U5
  ENST ID: ENST00000427996
  CDS Start-End: 371-766
gggccgcggggtcgccgccggccgcccaggcgcggagcctctcgggggtcacccggccgccgggcccgcgggacgcacggggccgccaggggaggacaacaagcctcaggccctgtccctgcgccccgcccggcctcccccgcggggctgcgcagcccactcggccatcctggcctgaaggggccgcccccggcctcgcgggaaagcctgagcctcccgggccttctcgggccttctcggactttcccccaggcgtcctggaccttcttcggccttcctgggcctcctcgggcttccttgaccctccccaggccttccccgaggcctccaggcccttccctgggcctctccaggctgagctctccgcgacatggccagtgggcctctgggacccggggcccggcccacccgcctccaccctccattcccaccgcctgctcacatcaagccaggagcaccgcccggtgagaatcctgaactctctggcttagaaagaatcttagcaagacatcagttgccaaaagagattaatctgaccccaaagccgaacagaatgcccccgtggaaaagaaaaatcatcaacaatgtaactgacgggtggaagaaatgtcacttgttgaagagaaacacgaaagagcctccaatgtccaccatagttgtcagaaaacttattcaaaaaaatgtacccagaagacacagcctaaggaatacaagcaggaaactgagaaacctgccaacaacagctaaagggacacaaacagaataacatgaaagctgtatacctattgtggaatttgattagaatccggaacagtcagagttggaacaatgttcacaacaaaatgcaagttaataatgaaggaaaaataaaatcagtcaaatcagcctaatgctttgggaaaaatctaaattcagttaattctaccacaaacaacatgtaacctgcttatgactggcaacgctgaaggaggattcaaaggctctcatctcgcgctgcttgcctgacctcttgctttctaggagctgacttaccctgtcagatgcatacacggcatcgaatagcccaaggagggtgacggagatgcccacagctggaccattgaccactgcaatcagaggcttaggaaaatctataaaacagcccacaaattccctacagaaatggaaacacaaaatcattaaatgtgccaaagcagcatgactaaagcatgggcaagacagtctgactctgagataaagccttctgtcaggctgggtgtttccacagccaccaccagcagtgcctccttgtcctgccacttccctggtcttccgcaccagattcatccagggcatccgtctgaatggcagtggatggaagaccaaccagtgagacctatgggtcaaccctggtttgaatcttgtattctggacagtgagttcagggctgtaaaccagccgcagtcttagagattaggttgggtgactgagcacatgctgcaatatcacaacaagtgggaattacagatttggcaggaataaagagaaaagccttcatgacctcctcctgtgtttacaagactcctccgagtctcctaccttcagcgttcatggaaatctcccattcctctggctggatgagaatttgctaaattcctctgcctcagtgcaagataattttgtttacaactatagctcacttttatgttttccagtcaaatctcatgagaccagcaggatgaacaggtaacagaggtcaaagagaaagaatgaatgcccacctatggatggaggcagtttagagaaatatgcttgtccaaagtcacaattaactgcactgacacagagaagcagatattgcacttttgctcaactaaataccactttgatgactaagaacgggccctctgggatcagacaaaggaaaatcacagtgccttctgggtatatcagaacctacctgaaattcacaaactctaaacaatgaatgctcaactctgttgtatgaagtagccacaattaccaaccttcctgcacaaatcaaacaagagatatcttaaaataggaatgatgctgaaactctacagcttttgtgtgaaacacatagaagaagaaagtaaaacaggacaaactccgtgggcaggctccacctgactagaggattccaatgaaggactcaaactggacaccaaatccacatagttctgcctggcagcttcctgaacggacgatgacaaacaacctcagcccatggtcaatgaataagcactttgagaaagttactatactaataactaacaccttgcaatgaagaaagaatagaagcacatcaagatcttgaagactccatttacaatggcttaatgagaagcacaaacttctttagaagtacagcaaataaaagcacagtaactagtaaactca

SEQ ID NO: 119225 - DNA, 1834 bp, Homo sapiens
  Payload ID: 3358
  Gene Symbol: C6orf201
  Gene Name: chromosome 6 open reading frame 201
  Uniprot ID: Q7Z4U5
  ENST ID: ENST00000380175
  CDS Start-End: 766-1188
gtattcgcgggccgcggggtcgccgccggccgcccaggcgcggagcctctcgggggtcacccggccgccgggcccgcgggacgcacggggccgccaggggaggacaacaagcctcaggccctgtccctgcgccccgcccggcctcccccgcggggctgcgcagcccactcggccatcctggcctgaaggggccgcccccggcctcgcgggaaagcctgagcctcccgggccttctcgggccttctcggactttcccccaggcgtcctggaccttcttcggccttcctgggcctcctcgggcttccttgaccctccccaggccttccccgaggcctccaggcccttccctgggcctctccaggctgagctctccgcgacatggccagtgggcctctgggacccggggcccggcccacccgcctccaccctccattcccaccgcctgctcacatcaagccaggagcaccgcccggatgaacacgcagggttccggaccaatacctgggccattgtgactctcagaatgccaggcaataagagatcagaaagctggttccacttcatcttggagatggaggaaagcttgccagaacaactgcacaccccatccactcctcatgttctcagtttgttcttctctgtgatacaaccagcatcacgagaacagccagcagcagctccagcgtgataaaattttcactccttgacaagtgtaagaagccggaaaactgtgcccagccagaagttttgtgtcgcccctttgagatgctgtctaacctccacgagctgcttccgaatcacctgatggagacgctttattcccgcaagagtgaagaggacaagaaaaaatgtgagaatcctgaactctctggcttagaaagaatcttagcaagacatcagttgccaaaagagattaatctgaccccaaagccgaacagaatgcccccgtggaaaagaaaaatcatcaacaatgtaactgacgggtggaagaaatgtcacttgttgaagagaaacacgaaagagcctccaatgtccaccatagttgtcagaaaacttattcaaaaaaatgtacccagaagacacagcctaaggaatacaagcaggaaactgagaaacctgccaacaacagctaaagggacacaaacaggaaaatcacagtgccttctgggtatatcagaacctacctgaaattcacaaactctaaacaatgaatgctcaactctgttgtatgaagtagccacaattaccaaccttcctgcacaaatcaaacaagagatatcttaaaataggaatgatgctgaaactctacagcttttgtgtgaaacacatagaagaagaaagtaaaacaggacaaactccgtgggcaggctccacctgactagaggattccaatgaaggactcaaactggacaccaaatccacatagttctgcctggcagcttcctgaacggacgatgacaaacaacctcagcccatggtcaatgaataagcactttgagaaagttactatactaataactaacaccttgcaatgaagaaagaatagaagcacatcaagatcttgaagactccatttacaatggcttaatgagaagcacaaacttctttagaagtacagcaaataaaagcacagtaactagtaaactcaccttgggcaggctgccaagggcattccatgcgtcccatttggccttgttgatcaagtcaaatacacctggtttgggcatgttacaaggtccttcagtggcctgtgaaaaggagaggggcaatatgttcaaatgtccatgtaaactagacccctaaatatttaagatccataaaatctgtaagtaca

SEQ ID NO: 119226 - DNA, 949 bp, Homo sapiens
  Payload ID: 3358
  Gene Symbol: C6orf201
  Gene Name: chromosome 6 open reading frame 201
  ENST ID: ENST00000451679
  CDS Start-End: 219-635
agctggttccacttcatcttggagatggaggaaagcttgccagaacaactgcacaccccatccactcctcatgttctcagtttgttcttctctgtgatacaaccagcatcacgagaacagccagcagcagctccagcgtgataaaattttcactccttgacaagtgtaagaagccggaaaactgtgcccagccagaagttttgtgtcgcccctttgagatgctgtctaacctccacgagctgcttccgaatcacctgatggagacgctttattcccgcaagagtgaagaggacaagaaaaaatgtgagaatcctgaactctctggcttagaaagaatcttagcaagacatcagttgccaaaagagattaatctgaccccaaagccgaacagaatgcccccgtggaaaagaaaaatcatcaacaatgtaactgacgggtggaagaaatgtcacttgttgaagagaaacacgaaagagcctccaatgtccaccatagttgtcagaaaacttattcaaaaaaatgtacccagaagacacagcctaaggaatacaagcaggaaactgagaaacctgccaacaacagctaaagggacacaaacagtcaaatctcatgagaccagcaggatgaacaggtaacagaggtcaaagagaaagaatgaatgcccacctatggatggaggcagtttagagaaatatgcttgtccaaagtcacaattaactgcactgacacagagaagcagatattgcacttttgctcaactaaataccactttgatgactaagaacgggccctctgggatcagacaaaggaaaatcacagtgccttctgggtatatcagaacctacctgaaattcacaaactctaaacaatgaatgctcaactctgttgtatgaagtagccacaattaccaaccttcctgcacaaatcaaacaagagatatcttaaaata

SEQ ID NO: 119227 - DNA, 900 bp, Homo sapiens
  Payload ID: 3359
  Gene Symbol: C6orf203
  Gene Name: chromosome 6 open reading frame 203
  Uniprot ID: Q9P0P8
  ENST ID: ENST00000311381
  CDS Start-End: 72-794
agcctggaggcctgcagtccgcgcggccgcggggagggacgagagggcctgacgtacagattataagcgccatggctatggctagtgttaaattgcttgccggtgttttaagaaagccagatgcctggattggactctggggtgttctccgagggacaccttcatcatacaaactctgtacttcctggaatcgatacttgtatttttctagtaccaagttacgtgcaccaaattataaaacacttttttataatattttctcactgagactcccagggcttttactatctccagaatgtatttttcctttttccgtaagactcaaaagtaatataaggtctacaaaatctactaaaaagtctctgcaaaaagtagatgaagaggactctgatgaagaaagccatcatgatgagatgagtgagcaggaagaggagcttgaggatgatcctactgtagtcaaaaactataaagacctggaaaaagcagttcagtcttttcggtatgatgttgtcctgaagacggggctagatattgggagaaacaaagtggaagatgctttctacaaaggtgaactcaggctgaatgaggaaaaattatggaagaaaagcagaacggtgaaagtgggagatacattggatcttctcattggagaggataaagaagcaggaacagagacagttatgcggattctcttgaaaaaagtgtttgaagagaagactgaaagtgaaaaatacagagtggtgttacggcggtggaaaagtttaaagttgcctaagaagagaatgtctaaataaatggattgctttttagcaatagagctgctttctagtggtaaaggaaggggtcacctgaaaaataggacatttttattaaaataaagttctcttagcgtttgtggaa

SEQ ID NO: 119228 - DNA, 1420 bp, Homo sapiens
  Payload ID: 3359
  Gene Symbol: C6orf203
  Gene Name: chromosome 6 open reading frame 203
  Uniprot ID: Q9P0P8
  ENST ID: ENST00000405204
  CDS Start-End: 598-1320
agcctggaggcctgcagtccgcgcggccgcggggagggacgagagggcctgacgtacaggtgagtgcgcctctgctggcgcgccgcgccgggccccctgcccgcgccccctgtcacttcgcctctccgccccgcccacgctcccgccgggtctccccgtgagtgtcccgtgtcctgccagcctcgggacgccccgcgagctcagggctgcgcagggactgtggtaattgagcgcggcgaagccttccgttcctgcctcctgtcgctcctgctggctccgaatgcagactgcgaacccggggacgcagttgtccatttcctttgaccttggggacccaggaaggtgcactgcccgcgggggtggggagggagcgagaggaatccgaccctgtctcagcccacagcctccgaggtctccaagtaaagggaaggatctttagctgcattagacttcaaagcgtttagaccagtttctccatcttacggagcggtgaacgggctcaggaatgtggagcgtttcctggcgtcaagcaggtcaaagtcagcgctgctttttttacagacactgcttttcttacagtcttcgattataagcgccatggctatggctagtgttaaattgcttgccggtgttttaagaaagccagatgcctggattggactctggggtgttctccgagggacaccttcatcatacaaactctgtacttcctggaatcgatacttgtatttttctagtaccaagttacgtgcaccaaattataaaacacttttttataatattttctcactgagactcccagggcttttactatctccagaatgtatttttcctttttccgtaagactcaaaagtaatataaggtctacaaaatctactaaaaagtctctgcaaaaagtagatgaagaggactctgatgaagaaagccatcatgatgagatgagtgagcaggaagaggagcttgaggatgatcctactgtagtcaaaaactataaagacctggaaaaagcagttcagtcttttcggtatgatgttgtcctgaagacggggctagatattgggagaaacaaagtggaagatgctttctacaaaggtgaactcaggctgaatgaggaaaaattatggaagaaaagcagaacggtgaaagtgggagatacattggatcttctcattggagaggataaagaagcaggaacagagacagttatgcggattctcttgaaaaaagtgtttgaagagaagactgaaagtgaaaaatacagagtggtgttacggcggtggaaaagtttaaagttgcctaagaagagaatgtctaaataaatggattgctttttagcaatagagctgctttctagtggtaaaggaaggggtcacctgaaaaataggacatttttattaaaataaagttctcttagcgttt

SEQ ID NO: 119229 - DNA, 1146 bp, Homo sapiens
  Payload ID: 3359
  Gene Symbol: C6orf203
  Gene Name: chromosome 6 open reading frame 203
  ENST ID: ENST00000625458
  CDS Start-End: 310-1047
ggggtggggagggagcgagaggaatccgaccctgtctcagcccacagcctccgaggtctccaagtaaagggaaggatctttagctgcattagacttcaaagcgtttagaccagtttctccatcttacggagcggtgaacgggctcaggaatgtggagcgtttcctggcgtcaagcaggtcaaagtcagcgctgctttttttacagacactgcttttcttacagtcttcgactataaactctacaagaataggaatcttcgtatttttttcctctgctgaattcctagtgcccagattagtgcttggcacatgattataagcgccatggctatggctagtgttaaattgcttgccggtgttttaagaaagccagatgcctggattggactctggggtgttctccgagggacaccttcatcatacaaactctgtacttcctggaatcgatacttgtatttttctagtaccaagttacgtgcaccaaattataaaacacttttttataatattttctcactgagactcccagggcttttactatctccagaatgtatttttcctttttccgtaagactcaaaagtaatataaggtctacaaaatctactaaaaagtctctgcaaaaagtagatgaagaggactctgatgaagaaagccatcatgatgagatgagtgagcaggaagaggagcttgaggatgatcctactgtagtcaaaaactataaagacctggaaaaagcagttcagtcttttcggtatgatgttgtcctgaagacggggctagatattgggagaaacaaagtggaagatgctttctacaaaggtgaactcaggctgaatgaggaaaaattatggaagaaaagcagaacggtgaaagtgggagatacattggatcttctcattggagaggataaagaagcaggaacagagacagttatgcggattctcttgaaaaaagtgtttgaagagaagactgaaagtgaaaaatacagagtggtgttacggcggtggaaaagtttaaagttgcctaagaagagaatgtctaaataaatggattgctttttagcaatagagctgctttctagtggtaaaggaaggggtcacctgaaaaataggacatttttattaaaataaagttctcttagcgtt

SEQ ID NO: 119230 - DNA, 3736 bp, Homo sapiens
  Payload ID: 3360
  Gene Symbol: C6orf222
  Gene Name: chromosome 6 open reading frame 222
  Uniprot ID: P0C671
  ENST ID: ENST00000437635
  CDS Start-End: 179-2137
actcagaaaattgccagcaccaaagtagtggcatcttctccctgggagagctgggtctgacttctcactggacacaacttccagctgacagggagcagagcctaacacagagacctcttgtctgaagatcccagcccagggtgttcaggacagaagcgatttctgtggtccaagcccgatggagaatccaaggtgcccaaggaggcccctggcggagaagaaagccaggtctctggacaggccgcaggcccccgggaaaggctcggagtcgtgggactgccattggctctccctgcccactgccccctccaggaaggcgcttcactggacgaccagtgattgggccagacattcagacagcccagctccatctgcagaggctcactgcaccaccgctgcagcccccactcccgaggagaccggagattttctccccagcgagcagaggccttcgcaagacaccaagaaggggtggctgaagaccatgctgaacttcttcgtgaggacgggccctgaggagcccagagaaaaggccagcaggaggccaagggggaaggagggtatctcccagcatccggagcccctggaagcagcaggggagccagccctcaggaagaaagcccaccacgacaagaagcccagccgcaagaagcaaggtcacaagaaacacgcggccgaggtgactaaggcagctcaagaccaggaggccagaggccgagaggaagggttgtccaaggcagctgctgccttgcgctccggggaggctgacctgggcccagctcgcaggggtggggaagattctgatcaccagtccttcctcatcaaagtggatggtactggagctttggatgtttctccccatgccacaggtcatcagcaagaagaggagctcaaaaagcctgaccaggatgctatcattcagatgatagtggaattgctcaaaagagtgggagaccagtgggaagaagagcaatctctggcctcacagctgggggtggccctgccaaacccagcaccagctgttaggaagaaatcccaagagaaaaagacaagcctcaagagaacctcaaagacaaaccccaagaaacacggctccgaggaggccaagaggggggctgcagatgtttccagtccagaggcctggccacccaagaagtccagctttctgcccctgtgtgtcagcggccatcggccttccatctccagcagctatggcttggaagaacctaaagtccaggaggccccatctacagaggctggggctccaggtccctccgtgcttcccaccccatcagagagccaggaacctggagaggagcttccgctggacagagcctcggaatacaaagaattcattcagaagatcatttccatgctccaagatgcagaagaacagcaaggagaggagcaacctcaagtccagcaggaagaggtgggtgtagaaaacccggccccacactgcagaaggaaatctcaagaaaaaaggtcgagcttcaggagagcgttttaccataagaaacacacctccaaggaacccagaagagcgggggcagcaggggctgccagcccagaggcccgacgacccaagaggcccagctttctgcccctgtgtgttggtggccatcggccctccacctccagcagccttgatccagaagatctcgagtgccgggagcccctgcccgcagaaggggagccagttgtgatctcagaagcaccctcccaggctagaggccacacgccagaaggggcacctcagctgagtggagcatgtgaatctaaggagatcatcatccagaagcttgtggcacttctccaagaagtggatggccaactggggcagcagatcaggcgccaccccagctttaagaggtttttttacgagttctcggactcctccctcagcaagctggtagccaccctgcgcagccaggtggctcactcctctaagctggacaggaaccgcgccaggagactctaccagtttgacgttagcttagctaacaaatttgctggcagcaacagccatgccatgtgcatcctcatgggcctaagagaccactacaattgcacccagttcccatacagggaggaccagccgaacatcacaagtcctaaggttgaaagtccagattgaaagctgtgtcttgcactcaaattcccttgaactagccaaatggttcgcagctttagccaggagaccctgaagatgctctgtgatgtcccaatccctgcttcacaaacgtgatggaagacaagagcagacaatcattctgtgtccataccctagtatctgagaagcacagagcattcttccacaaggcaagacacagaggccatgtctggggaaatcagcactggactgggaatgaggaagactggggctctacctgctgaacctaccccagacttgctgcatgaccctctacacattccccctcctctccagactttggagtctaggatcccacccagaaggcctactgatattttctcagatgttcatgttaactgagtctagtttttaaactaaatttttatttaatctctaaacagaacatccacatgcatccaaacagatatgcatcgaagtgtatcccatcatttcttcagttgaccagtagttcttcatgctcatatggatttgtagatgcctcccaggaactctgcaggcccaagatggaaaaacctagagactggggacacttggtctctcagaatccttctaaccctgtgtcctgtcattctatgactagagaaatggagctgataccttgcacctctcccatctcatgggattggctaggagtcagtgagaaaatggatgtgaagagttctgaaaattacctagtgccatgtccatgtaggcactatagcttcttttgggtagttttcaggaagtggaggagggcttcaatgggctggactgccatggattgttgcacaggggtgcactgctcaagagcaccatactccaggaggtactattcatgtcctagacattgtggatttgtagatttatcatgacagttttgcagctggtagcagtaacatgtcttgagaaaagggctattttttgtatttgcacaaaggtgaagtgtgggggtgccagaggctctgccttctgtatagctcaacagtttcaatagcttgactcaggtgtgaaatttgccacatgttcatatctatgtgcaggaaggacaagactgtagacagacagtcggctcccttggacactgcccagaacatgtggtcatgggggaaagggtgttaaacctggatggcaagtgagatcttgtgacccttggggacatggtattgccgtgttgaacctgctgtcgcaccatggggtaggactggggaggaggagcagtctagagcggagaggccctgggtgcttatatgggactggcctccaacctgaggcactggcttcataagctcaactcagcctatccggaaagccatttagtttttattgctgcttctgagaagtgggggagaggtgagctatttgtggatttgttttaggcagtgttcacaatcatagcacctaaatatgaaggatcagaataagttatgaaatgaaggtcaggaaccttttgtacatagtttcttatttggaatgatgttctttaagccctatgagtatttggtatgtgctcctgatgctggcatctgagtctcatttttgtaccgtgttatttgagcaaataaatacattaacttgcacaaa

SEQ ID NO: 119231 - DNA, 2757 bp, Homo sapiens
  Payload ID: 3361
  Gene Symbol: C6orf223
  Gene Name: chromosome 6 open reading frame 223
  Uniprot ID: Q8N319
  ENST ID: ENST00000439969
  CDS Start-End: 4-321
gtgatgatgccactggcagaagcaggcgccctggcccaaggaggaggcccttcagcaacggagtgggcctgcattctgcggaggttgttgaggaaggagggagtagatggagggctcttttcaccagaagacccccaggcacaagcagcccaccttactgatggtcagagcatccagaagaagtggcaagacttcagctgtcctcaaagcaggaagacagagtgtttctggcagaaagaacagcacaagcaaagatctggtaaccctaggtgcctccagtttgagggaggagagaggacaccccctccaccccagacataggaaagcagtccacctgcgcaccaggggcaggacacgtggctgggtgcagacgctggcccggatgtcgcggaggactcgcgggccggtagagcgcgcggcggcggcggcggcggcggcggcgggaggagacgcaggtcacgcccccttcccaccacctcccgccgccgacggggcgcgcgcgccgaggagcccgggacaggtgactcctagaggactgcgtctgcgcctcccccggcgggagtcccttcttcgcggcctctgccgccccctgcgtcccctcctgggcttccgagagtctgactcagccaagccggcatcgcttcgcctcctacaacacaccccgagcgcgagaagaaattacaggattgcaggggcacggctaatgcgctctaattacccaccgccgctgtcatccgcggcgctccgcggcgctgggccaacgcgccgtaattaagacgccgctccccggtcccggaaccctcccttcgccaccctccacccacccacctcgcggtccccaggaccactggctgccaactcctgccgccctctgggactgcccctcagtcccaggagagctatgaggcctcactgggggcagaacttggggagaccgaagccggcccttccactcccctaaacctacagtcctggaaggtctctgctggaagagactgggagagtggggaggggccagggacctatttcgttgacagaaacagtgaggtctattggaaagttagccttcagtgggaggagtggcaaaggcacgcagggcagcagtacccccgtttggcacttgaggcacggagaagggaagggaagtccgcccagccagaactcccagacccgctcgtttaacagtggctttatgagcagcacgacggactccctcccctggcggggaaattaccttcctgcgaagaaaggtgacatccccgccacagacacggaggccccgcctgctggccagctgtggccgccataggggagctggtgaggagtgaggtggctctggcctcccatgtcaggtagggtgagagaggccctgaagatagaagccaggcccgaaggccagaattaaaggggtagcttggccatcagctccttcccccaaaaccaggctcagagctctcctctatcagcaattctttcctgaggtccagggtgttgcaaactcatggccttgggccacgttttaccttcagtgaggttttgtttggcttgcaatgagtacatgggttttaggttgaatgtgagagtctgcagacaatgtgggttctccgactgccctcccagtgaaggtggacctctgatttagaccggcccgctgggcccgtgcctacatccttttcctcagcgtcaggatcttagtccccatgattgctgcccctttgtggtctgcatgtttcttggtaagggtgcccagtcaagtgtctctgggagccccctcttctctgtcatcgtcaggctccccacttgcagtggccgtggtggctgcacatgctcccggatacccctccagcactcccttttgtcatcttgagtttcagtccgtgacttgggtggcaccctatcttctccatcagggatggtagctatttttctgccatgagactagaggttgcttgagaacaggaaattggatctctcccttcaggctgggatttcactaagggctggagaaggggggaatatgggaggattatctcctatcacagggagcgctctgagggcaaggctgtgtctccgattcagactgacggttccctgaggatggggctgtttctcccctccgactggggctccctgaggatggggctgtttctcccctccgactggggctccctgaggacagggctgtgtctcccctcagcctggggctccctgagtcagggctgtgtctcccctcagactggggctccctgaggacggggctgtgtctgcctcagactgggaatccctgaagatggggccgtgtctccctcaaagtggggctccctcaggacagcgttgtgtctcccctcagactgcggctccctgaggacggggctgtgtctccctcagactggggctccctgaagaaagggctgcttctccctcagactggagctccctgaagatggggctgtgtccccctcagactggggctgcctgaggatgaggctgcatctcccctcagactggagctccctgagggcagggctgtctccccccttcagactggggcctcccccaaaggacagggactgtgtctcccctgggactaggttctttgtgtcttctgcatcagacagattcccatgaggacagggctgtctccccctccatctggagctccctgaaggcaatggcctctcccctcaaatgggacatttgcaccccaccccaccctctggctccccatggcgcccaggcattcctcccaggacacca

SEQ ID NO: 119232 - DNA, 3581 bp, Homo sapiens
  Payload ID: 3361
  Gene Symbol: C6orf223
  Gene Name: chromosome 6 open reading frame 223
  Uniprot ID: Q8N319
  ENST ID: ENST00000336600
  CDS Start-End: 21-749
ggcggctgaggagtggggtgatgatgccactggcagaagcaggcgccctggcccaaggaggaggcccttcagcaacggagtgggcctgcattctgcggaggaagacccccaggcacaagcagcccaccttactgatggtcagagcatccagaagaagtggcaagacttcagctgtcctcaaagcaggaagacagagtgtttctggcagaaagaacagcacaagcaaagatctggtaaccctaggtgcctccagtttgagggaggagagaggacaccccctccaccccagacataggaaagcagtccacctgcgcaccaggggcaggacacgtggctgggtgcagacgctggcccggatgtcgcggaggactcgcgggccggtagagcgcgcggcggcggcggcggcggcggcggcgggaggagacgcaggtcacgcccccttcccaccacctcccgccgccgacggggcgcgcgcgccgaggagcccgggacaggtgactcctagaggactgcgtctgcgcctcccccggcgggagtcccttcttcgcggcctctgccgccccctgcgtcccctcctgggcttccgagagtctgactcagccaagccggcatcgcttcgcctcctacaacacaccccgagcgcgagaagaaattacaggattgcaggggcacggctaatgcgctctaattacccaccgccgctgtcatccgcggcgctccgcggcgctgggccaacgcgccgtaattaagacgccgctccccggtcccggaaccctcccttcgccaccctccacccacccacctcgcggtccccaggaccactggctgccaactcctgccgccctctgggactgcccctcagtcccaggagagctatgaggcctcactgggggcagaacttggggagaccgaagccggcccttccactcccctaaacctacagtcctggaaggtctctgctggaagagactgggagagtggggaggggccagggacctatttcgttgacagaaacagtgaggtctattggaaagttagccttcagtgggaggagtggcaaaggcacgcagggcagcagtacccccgtttggcacttgaggcacggagaagggaagggaagtccgcccagccagaactcccagacccgctcgtttaacagtggctttatgagcagcacgacggactccctcccctggcggggaaattaccttcctgcgaagaaaggtgacatccccgccacagacacggaggccccgcctgctggccagctgtggccgccataggggagctggtgaggagtgaggtggctctggcctcccatgtcaggtagggtgagagaggccctgaagatagaagccaggcccgaaggccagaattaaaggggtagcttggccatcagctccttcccccaaaaccaggctcagagctctcctctatcagcaattctttcctgaggtccagggtgttgcaaactcatggccttgggccacgttttaccttcagtgaggttttgtttggcttgcaatgagtacatgggttttaggttgaatgtgagagtctgcagacaatgtgggttctccgactgccctcccagtgaaggtggacctctgatttagaccggcccgctgggcccgtgcctacatccttttcctcagcgtcaggatcttagtccccatgattgctgcccctttgtggtctgcatgtttcttggtaagggtgcccagtcaagtgtctctgggagccccctcttctctgtcatcgtcaggctccccacttgcagtggccgtggtggctgcacatgctcccggatacccctccagcactcccttttgtcatcttgagtttcagtccgtgacttgggtggcaccctatcttctccatcagggatggtagctatttttctgccatgagactagaggttgcttgagaacaggaaattggatctctcccttcaggctgggatttcactaagggctggagaaggggggaatatgggaggattatctcctatcacagggagcgctctgagggcaaggctgtgtctccgattcagactgacggttccctgaggatggggctgtttctcccctccgactggggctccctgaggatggggctgtttctcccctccgactggggctccctgaggacagggctgtgtctcccctcagcctggggctccctgagtcagggctgtgtctcccctcagactggggctccctgaggacggggctgtgtctgcctcagactgggaatccctgaagatggggccgtgtctccctcaaagtggggctccctcaggacagcgttgtgtctcccctcagactgcggctccctgaggacggggctgtgtctccctcagactggggctccctgaagaaagggctgcttctccctcagactggagctccctgaagatggggctgtgtccccctcagactggggctgcctgaggatgaggctgcatctcccctcagactggagctccctgagggcagggctgtctccccccttcagactggggcctcccccaaaggacagggactgtgtctcccctgggactaggttctttgtgtcttctgcatcagacagattcccatgaggacagggctgtctccccctccatctggagctccctgaaggcaatggcctctcccctcaaatgggacatttgcaccccaccccaccctctggctccccatggcgcccaggcattcctcccaggacaccatttgtcacgctttgatgaatgaaacttactaagaataactcagtccttgtagactctaaaggacagggggagggagagggaggaggctggtgattgtgggggtgctgggggagggaggacacaatccatttattcaatagcatttcctgagtccccagctgggcactgggggagacacagtgagtgccacagagccccctactgtgccatttctgccactgactgccagggcagactctgagacagaaagttcaggttcctgcttcagagcctccccaccccagcagtcattacctcagggccacccagccccctccatgccagtcatgagctccctctgcccctcccttcagtggaggggagactttgaaatcaggtgcttggggggggggcgctgctcccagtgggggtgtgaggaacctggaggatgaatccctgtcccccgccctccccctactctattcttccttaccctgcccctttccactccaaaacctcaagcctctggttcacatctgagtgacctttccaaagcaactgttctcagggggtccttgggagccgggaggctgtgaccttaacccacttctttggacagtgccttcctggcactccacccccacctgccacctcctgagaggaacatttcggctggtcttggcaaaaacatcagtctatgatccaggcagcctggtacagtaccagctctgccactgacaccactgtgaccttgggaagccatttacacatatgggtctcagtttctccatatgtaaaatgacttttgtttagctttcctgattttcaaacctttttttcaaacagtgaatcctcttgtttaaattgtaaa

SEQ ID NO: 119233 - DNA, 3109 bp, Homo sapiens
  Payload ID: 3361
  Gene Symbol: C6orf223
  Gene Name: chromosome 6 open reading frame 223
  ENST ID: ENST00000442114
  CDS Start-End: 417-1085
taattgccaacctgatgactggcggctgaggagtggggtgatgatgccactggcagaagcaggcgccctggcccaaggaggaggcccttcagcaacggagtgggcctgcattctgcggagggtgagactgaggtggctgcagtcaaaggagaagggggcaggggtttgttgaggctgtgaccgtgggaaagcgcttctccagggcttccctcagcttcaaggagaaagagttcagaggccctgaggggatgaagggacttgtgaaggggcttcagggggatgggttggggggaaggaggttcctattcttactccccttctgcctatgctcccccaatgttcctgtctctcccctcccccaccttggccccctctttggcccctgtggccaaagttgttgaggaaggagggagtagatggagggctcttttcaccagaagacccccaggcacaagcagcccaccttactgatggtcagagcatccagaagaagtggcaagacttcagctgtcctcaaagcaggaagacagagtgtttctggcagaaagaacagcacaagcaaagatctggtaaccctaggtgcctccagtttgagggaggagagaggacaccccctccaccccagacataggaaagcagtccacctgcgcaccaggggcaggacacgtggctgggtgcagacgctggcccggatgtcgcggaggactcgcgggccggtagagcgcgcggcggcggcggcggcggcggcggcgggaggagacgcaggtcacgcccccttcccaccacctcccgccgccgacggggcgcgcgcgccgaggagcccgggacaggtgactcctagaggactgcgtctgcgcctcccccggcgggagtcccttcttcgcggcctctgccgccccctgcgtcccctcctgggcttccgagagtctgactcagccaagccggcatcgcttcgcctcctacaacacaccccgagcgcgagaagaaattacaggattgcaggggcacggctaatgcgctctaattacccaccgccgctgtcatccgcggcgctccgcggcgctgggccaacgcgccgtaattaagacgccgctccccggtcccggaaccctcccttcgccaccctccacccacccacctcgcggtccccaggaccactggctgccaactcctgccgccctctgggactgcccctcagtcccaggagagctatgaggcctcactgggggcagaacttggggagaccgaagccggcccttccactcccctaaacctacagtcctggaaggtctctgctggaagagactgggagagtggggaggggccagggacctatttcgttgacagaaacagtgaggtctattggaaagttagccttcagtgggaggagtggcaaaggcacgcagggcagcagtacccccgtttggcacttgaggcacggagaagggaagggaagtccgcccagccagaactcccagacccgctcgtttaacagtggctttatgagcagcacgacggactccctcccctggcggggaaattaccttcctgcgaagaaaggtgacatccccgccacagacacggaggccccgcctgctggccagctgtggccgccataggggagctggtgaggagtgaggtggctctggcctcccatgtcaggtagggtgagagaggccctgaagatagaagccaggcccgaaggccagaattaaaggggtagcttggccatcagctccttcccccaaaaccaggctcagagctctcctctatcagcaattctttcctgaggtccagggtgttgcaaactcatggccttgggccacgttttaccttcagtgaggttttgtttggcttgcaatgagtacatgggttttaggttgaatgtgagagtctgcagacaatgtgggttctccgactgccctcccagtgaaggtggacctctgatttagaccggcccgctgggcccgtgcctacatccttttcctcagcgtcaggatcttagtccccatgattgctgcccctttgtggtctgcatgtttcttggtaagggtgcccagtcaagtgtctctgggagccccctcttctctgtcatcgtcaggctccccacttgcagtggccgtggtggctgcacatgctcccggatacccctccagcactcccttttgtcatcttgagtttcagtccgtgacttgggtggcaccctatcttctccatcagggatggtagctatttttctgccatgagactagaggttgcttgagaacaggaaattggatctctcccttcaggctgggatttcactaagggctggagaaggggggaatatgggaggattatctcctatcacagggagcgctctgagggcaaggctgtgtctccgattcagactgacggttccctgaggatggggctgtttctcccctccgactggggctccctgaggatggggctgtttctcccctccgactggggctccctgaggacagggctgtgtctcccctcagcctggggctccctgagtcagggctgtgtctcccctcagactggggctccctgaggacggggctgtgtctgcctcagactgggaatccctgaagatggggccgtgtctccctcaaagtggggctccctcaggacagcgttgtgtctcccctcagactgcggctccctgaggacggggctgtgtctccctcagactggggctccctgaagaaagggctgcttctccctcagactggagctccctgaagatggggctgtgtccccctcagactggggctgcctgaggatgaggctgcatctcccctcagactggagctccctgagggcagggctgtctccccccttcagactggggcctcccccaaaggacagggactgtgtctcccctgggactaggttctttgtgtcttctgcatcagacagattcccatgaggacagggctgtctccccctccatctggagctccctgaaggcaatggcctctcccctcaaatgggacatttgcaccccaccccaccctctggctccccatggcgcccaggcattcctcccaggacaccatttgtcacgctttgatgaatgaaacttactaagaataactca

SEQ ID NO: 119234 - DNA, 552 bp, Homo sapiens
  Payload ID: 3362
  Gene Symbol: C6orf226
  Gene Name: chromosome 6 open reading frame 226
  Uniprot ID: Q5I0X4
  ENST ID: ENST00000408925
  CDS Start-End: 29-334
acacgccggtcaggattcgcgacccgacatggagcgtccccgcagtccccaatgctcggccccggcctctgcctcagcttcggttaccctggcgcagctcctgcagctggtccagcagggccaggaactcccgggcctggagaaacgccacatcgcggcgatccacggcgaacccacagcgtcccggctgccgcggaggcccaagccctgggaggccgcggctttggctgagtcccttccccctccgaccctcaggataggaacggccccggcggagcctggcttggttgaggcagcgactgcgccttcttcatggcatacagtgggcccctgaggttccaggtcctttgcggcggcgatctggagggcgtggctacaggacccgggatgccattcagttactcatcttttatgctttcgtcctgacctgtctcaactagacttgctcctgcaaccaccatgggggttttgcatttacatttgtggaccatgttacagttaagaaaaatcctgtttcagtccttatatgtaataaaatgttttatgatgtaa

SEQ ID NO: 119235 - DNA, 814 bp, Homo sapiens
  Payload ID: 3363
  Gene Symbol: C6orf229
  Gene Name: chromosome 6 open reading frame 229
  Uniprot ID: H3BNL8
  ENST ID: ENST00000565469
  CDS Start-End: 33-725
tgtacctgaaggaccactggcctttttacacaatggctaacagccgattttcttgtacgcaaatttgggttaagatgtatgggtattttgcggggctgtgtcggcgtctccagaaattctggcgtgtcactgttaagggcttttttgttaagaagaaggaaaaaaaaatcccttcagctgagacttattttcatgaggaaaaaattgttgtacttggccaagtgttgatgaatgaatctctacccattgagaagagagctcaagctgcccagaaaattggactgctggccttcacaggaggaccacctgctgggaactttgcagctgagtacatggaagaagtggctcacttgttgcaagatgaggagttggcaccaaaaataaagatcctgctgctccagagtgtggcatgttggtgttacttaaaccctgtcagccagaaaagagccaaaagtctgcaatttattcctattctcattagtttttttgaaggcagattcgagtctactatcaaaagtgaaacaaacagctacctcctccttaaattttggacttgttacgttctctctgtcatgacatgcaataacttgtcttgcgtcaaggagcttaaagaccacagtgctctaaaatatcatttgcaaatgttggctgctgagaattggtctggatggacagagaattttgcagaggtgctgtatttcctaattggttttcataggaattagtttctctaaatccagttacatgttgcagctctctgtgtattaccctggaaaactgaaataaacaataaaaatcgatgttttcctttgta

SEQ ID NO: 119236 - DNA, 613 bp, Homo sapiens
  Payload ID: 3364
  Gene Symbol: C6orf25
  Gene Name: chromosome 6 open reading frame 25
  Uniprot ID: O95866
  ENST ID: ENST00000375804
  CDS Start-End: 1-582
atggctgtgtttctgcagctgctaccgctgctgctctcgagggcccaagggaaccctggggcttctctggacggccgccctggggaccgggtgaatctctcctgcggaggagtctctcatcccatccgctgggtctgggcacccagcttcccggcctgcaagggcctgtccaaaggacgccgaccgatcctgtgggcctcttcgagcgggacccccaccgtgcctcccctccagcctttcgtcggccgcctacgctccctggactctggtatccggcggctggagctcctcttgagcgcgggggactcgggcacttttttctgcaagggccgccacgaggacgagagccgtacagtgcttcacgtgctgggggacaggacctattgcaaggcccccgggcctacccatgctctgtcccccccacatagctccacttgtgaaaaccgagccccagaggccagtaaaggaggaagagcccaagattccaggggacctggaccaggaaccgagcctgctctatgcggatctggaccatctagccctcagcaggccccgccggctgtccacagcggaccctgctgatgcctccaccatctatgcagttgtagtttga

SEQ ID NO: 119237 - DNA, 668 bp, Homo sapiens
  Payload ID: 3364
  Gene Symbol: C6orf25
  Gene Name: chromosome 6 open reading frame 25
  Uniprot ID: O95866
  ENST ID: ENST00000375805
  CDS Start-End: 15-668
accacatcctaaccatggctgtgtttctgcagctgctaccgctgctgctctcgagggcccaagggaaccctggggcttctctggacggccgccctggggaccgggtgaatctctcctgcggaggagtctctcatcccatccgctgggtctgggcacccagcttcccggcctgcaagggcctgtccaaaggacgccgaccgatcctgtgggcctcttcgagcgggacccccaccgtgcctcccctccagcctttcgtcggccgcctacgctccctggactctggtatccggcggctggagctcctcttgagcgcgggggactcgggcacttttttctgcaagggccgccacgaggacgagagccgtacagtgcttcacgtgctgggggacaggacctattgcaaggcccccgggcctacccatggcgcctgcccccgcaaccgattcgaccactccctagatttgctctgtcccccccacatagctccacttgtgaaaaccgagccccagaggccagtaaaggaggaagagcccaagattccaggggacctggaccaggaaccgagcctgctctatgcggatctggaccatctagccctcagcaggccccgccggctgtccacagcggaccctgctgatgcctccaccatctatgcagttgtagtttga

SEQ ID NO: 119238 - DNA, 833 bp, Homo sapiens
  Payload ID: 3364
  Gene Symbol: C6orf25
  Gene Name: chromosome 6 open reading frame 25
  Uniprot ID: O95866
  ENST ID: ENST00000375806
  CDS Start-End: 1-726
atggctgtgtttctgcagctgctaccgctgctgctctcgagggcccaagggaaccctggggcttctctggacggccgccctggggaccgggtgaatctctcctgcggaggagtctctcatcccatccgctgggtctgggcacccagcttcccggcctgcaagggcctgtccaaaggacgccgaccgatcctgtgggcctcttcgagcgggacccccaccgtgcctcccctccagcctttcgtcggccgcctacgctccctggactctggtatccggcggctggagctcctcttgagcgcgggggactcgggcacttttttctgcaagggccgccacgaggacgagagccgtacagtgcttcacgtgctgggggacaggacctattgcaaggcccccgggcctacccatgggtccgtgtatccccagctcctgatcccgctgctgggcgctgggttggtgctcggactgggagctttgggcctggtctggtggctgcacaggcgcctgcccccgcaaccgattcgaccactccctagatttgctccacttgtgaaaaccgagccccagaggccagtaaaggaggaagagcccaagattccaggggacctggaccaggaaccgagcctgctctatgcggatctggaccatctagccctcagcaggccccgccggctgtccacagcggaccctgctgatgcctccaccatctatgcagttgtagtttgaagggaagcccttactccaaacctcccaagctaggggatcccagctccccataatccctctcccctccttggttcctcacctggaagaggaaggcaccatggtataga

SEQ ID NO: 119239 - DNA, 2396 bp, Homo sapiens
  Payload ID: 3364
  Gene Symbol: C6orf25
  Gene Name: chromosome 6 open reading frame 25
  Uniprot ID: O95866
  ENST ID: ENST00000375809
  CDS Start-End: 12-725
acatcctaaccatggctgtgtttctgcagctgctaccgctgctgctctcgagggcccaagggaaccctggggcttctctggacggccgccctggggaccgggtgaatctctcctgcggaggagtctctcatcccatccgctgggtctgggcacccagcttcccggcctgcaagggcctgtccaaaggacgccgaccgatcctgtgggcctcttcgagcgggacccccaccgtgcctcccctccagcctttcgtcggccgcctacgctccctggactctggtatccggcggctggagctcctcttgagcgcgggggactcgggcacttttttctgcaagggccgccacgaggacgagagccgtacagtgcttcacgtgctgggggacaggacctattgcaaggcccccgggcctacccatgggtccgtgtatccccagctcctgatcccgctgctgggcgctgggttggtgctcggactgggagctttgggcctggtctggtggctgcacaggcgcctgcccccgcaaccgattcgaccactccctagatttgctctgtcccccccacatagctccacttgtgaaaaccgagccccagaggccagtaaaggaggaagagcccaagattccaggggacctggaccaggaaccgagcctgctctatgcggatctggaccatctagccctcagcaggccccgccggctgtccacagcggaccctgctgatgcctccaccatctatgcagttgtagtttgaagggaagcccttactccaaacctcccaagctaggggatcccagctccccataatccctctcccctccttggttcctcacctggaagaggaaggcaccatggtatagaaataagtgctagactgggagttgggagacctgggttccaggctgtctctgccactggtcttacttctaaacttactcccatctctcctataacctccatgtctccctcaccaccagtgtcctctctatacccaatcaagccctagctccttttttttttttttttgagacggagtctcgctctgttgcccaggctggagtgcagtgacaccatctccctcactgcaagctccgcctgccgggttcacaccattctcctgcctcaggctcctgagtagctgggactacaggcgcccgccaccacgcccagctaattttttgtatttttagtagagacggggtttcactgtgttagccaggatggtcttgatctgctaacctcgtgatccacccgccccggcctcccaaagtgctaggattacaggtgtgagccaccgcgcccggcctgattctttaagctgtttttctttgttgctggtgttttctttttggactcctcttccttgctccatatccctacagtatttcccaccattctaggtttgtccctttctcttcttctgggacactctcatcaacagtcagtcctcagccccctcctctgcaaatgacactcagaactctctctggctcagatctcagatttgggattaacaaacttccacttagacattctgcctgactgacctcaggcatttcgcactctgaatgtcaaacccaactcattgtcatctctgaagctgctcacttaattctcctctgtattctctttaacaacccagttgcccaacccagaaactgggagtcacgcagacctcctttctctcttactcccacacaatgagccatgaagtccagtctttctatcttaacatcactgtcaaacccacactgtattccatgcccagcgctgccacgtgaatgtactctgctcacttccttcctggattacccatagccccacctcatcctcctacccttgctttcctccctgaagtcagagagatcctactcaagagataactgctcctgacagcccttattacagaactgaagtactctccttagcttcagctctgtgcccacgtgccttggctttggatacaaggtactacagcactttgtccactctccaggcttacctgtgtcattccacatgcacatcttagaaaatgccagccttagagaattctccctagccccaaaatgtctttgcccagtgcaattccttcttcctgtattacccctttccctccttcacactatctgcctggctaattcttatttatccttagttcaagtatggccttttctgggaaggtgaccctccttggccaccccttgcatatactttgatgccctagggcgcaccccctttatttccctcatagaaacagccttctgtaaattgttccatgacaacctgtatttcaatttgtaagaaatttgcatgtactgtgagctccccaacgtcaggagactgacccttttgatatcattgctaagcctcattaaatgaatgaatgaaaatgaa

SEQ ID NO: 119240 - DNA, 910 bp, Homo sapiens
  Payload ID: 3364
  Gene Symbol: C6orf25
  Gene Name: chromosome 6 open reading frame 25
  Uniprot ID: O95866
  ENST ID: ENST00000375810
  CDS Start-End: 41-709
cgctgattcgctcgcagcttctcctcaccacatcctaaccatggctgtgtttctgcagctgctaccgctgctgctctcgagggcccaagggaaccctggggcttctctggacggccgccctggggaccgggtgaatctctcctgcggaggagtctctcatcccatccgctgggtctgggcacccagcttcccggcctgcaagggcctgtccaaaggacgccgaccgatcctgtgggcctcttcgagcgggacccccaccgtgcctcccctccagcctttcgtcggccgcctacgctccctggactctggtatccggcggctggagctcctcttgagcgcgggggactcgggcacttttttctgcaagggccgccacgaggacgagagccgtacagtgcttcacgtgctgggggacaggacctattgcaaggcccccgggcctacccatgggtccgtgtatccccagctcctgatcccgctgctgggcgctgggttggtgctcggactgggagctttgggcctggtctggtggctgcacaggcgcctgcccccgcaaccgattcgaccactccctagatttgctctgtcccccccacatagctccacttgtgaaaaccgagccccagaggccagtaaaggaggaagagcccaagattccaggggacctggaccaggaaccggtaagggcatggggatgggaaggggatagccagaatctctgaggaaaatggaccaaaaaaaaaaaggcctgaaccccaaggaagactgtggagaccatcttgtcttcctccccttcctcctccagagcctgctctatgcggatctggaccatctagccctcagcaggccccgccggctgtccacagcggaccctgctgatgcctccaccatctatgcagttgtagtttga

SEQ ID NO: 119241 - DNA, 594 bp, Homo sapiens
  Payload ID: 3364
  Gene Symbol: C6orf25
  Gene Name: chromosome 6 open reading frame 25
  Uniprot ID: O95866
  ENST ID: ENST00000375814
  CDS Start-End: 1-594
atggctgtgtttctgcagctgctaccgctgctgctctcgagggcccaagggaaccctggggcttctctggacggccgccctggggaccgggtgaatctctcctgcggaggagtctctcatcccatccgctgggtctgggcacccagcttcccggcctgcaagggcctgtccaaaggacgccgaccgatcctgtgggcctcttcgagcgggacccccaccgtgcctcccctccagcctttcgtcggccgcctacgctccctggactctggtatccggcggctggagctcctcttgagcgcgggggactcgggcacttttttctgcaagggccgccacgaggacgagagccgtacagtgcttcacgtgctgggggacaggacctattgcaaggcccccgggcctacccatgctccacttgtgaaaaccgagccccagaggccagtaaaggaggaagagcccaagattccaggggacctggaccaggaaccgagcctgctctatgcggatctggaccatctagccctcagcaggccccgccggctgtccacagcggaccctgctgatgcctccaccatctatgcagttgtagtttga

SEQ ID NO: 119242 - DNA, 2230 bp, Homo sapiens
  Payload ID: 3364
  Gene Symbol: C6orf25
  Gene Name: chromosome 6 open reading frame 25
  Uniprot ID: O95866
  ENST ID: ENST00000383410
  CDS Start-End: 1-594
atggctgtgtttctgcagctgctaccgctgctgctctcgagggcccaagggaaccctggggcttctctggacggccgccctggggaccgggtgaatctctcctgcggaggagtctctcatcccatccgctgggtctgggcacccagcttcccggcctgcaagggcctgtccaaaggacgccgaccgatcctgtgggcctcttcgagcgggacccccaccgtgcctcccctccagcctttcgtcggccgcctacgctccctggactctggtatccggcggctggagctcctcttgagcgcgggagactcgggcacttttttctgcaagggccgccacgaggacgagagccgtacagtgcttcacgtgctgggggacaggacctattgcaaggcccccgggcctacccatgctccacttgtgaaaaccgagccccagaggccagtaaaggaggaagagcccaagattccaggggacctggaccaggaaccgagcctgctctatgcggatctggaccatctagccctcagcaggccccgccggctgtccacagcggaccctgctgatgcctccaccatctatgcagttgtagtttgaagggaagcccttactccaaacctcccaagctaggggatcccagctccccataatccctctcccctccttggttcctcacctggaagaggaaggcaccatggtatagaaataagtgctagactgggagttgggagacctgggttccaggctgtctctgccactggtcttacttctaaacttactcccatctctcctataacctccatgtctccctcaccaccagtgtcctctctatacccaatcaagccctagctccttttttttttttttttgagacggagtctcgctctgttgcccaggctggagtgcagtgacaccatctccctcactgcaagctccgcctgccgggttcacaccattctcctgcctcaggctcctgagtagctgggactacaggcgcccgccaccacgcccagctaattttttgtatttttagtagagacggggtttcactgtgttagccaggatggtcttgatctgctaacctcgtgatccacccgccccggcctcccaaagtgctaggattacaggtgtgagccaccgcgcccggcctgattctttaagctgtttttctttgttgctggtgttttctttttggactcctcttccttgctccatatccctacagtatttcccaccattctaggtttgtccctttctcttcttctgggacactctcatcaacagtcagtcctcagccccctcctctgcaaatgacactcagaactctctctggctcagatctcagatttgggattaacaaacttccacttagacattctgcctgactgacctcaggcatttcgcactctgaatgtcaaacccaactcattgtcatctctgaagctgctcacttaattctcctctgtattctctttaacaacccagttgcccaacccagaaactgggagtcacgcagacctcctttctctcttactcccacacaatgagccatgaagtccagtctttctatcttaacatcactgtcaaacccacactgtattccatgcccagcgctgccacgtgaatgtactctgctcacttccttcctggattacccatagccccacctcatcctcctacccttgctttcctccctgaagtcagagagatcctactcaagagataactgctcctgacagcccttattacagaactgaagtactctccttagcttcagctctgtgcccacgtgccttggctttggatacaaggtactacagcactttgtccactctccaggcttacctgtgtcattccacatgcacatcttagaaaatgccagccttagagaattctccctagccccaaaatgtctttgcccagtgcaattccttcttcctgtattacccctttccctccttcacactatctgcctggctaattcttatttatccttagttcaagtatggccttttctgggaaggtgaccctccttggccaccccttgcatatactttgatgccctagggcacaccccctttatttccctcatagaaacagccttctgtaaattgttccatgacaacctgtatttcaatttgtaagaaatttgcatgtactgtgagctccccaacgtcaggagactgacccttttgatatcattgctaagcctcattaaatgaatgaatgaaaa

SEQ ID NO: 119243 - DNA, 2290 bp, Homo sapiens
  Payload ID: 3364
  Gene Symbol: C6orf25
  Gene Name: chromosome 6 open reading frame 25
  Uniprot ID: O95866
  ENST ID: ENST00000383411
  CDS Start-End: 1-654
atggctgtgtttctgcagctgctaccgctgctgctctcgagggcccaagggaaccctggggcttctctggacggccgccctggggaccgggtgaatctctcctgcggaggagtctctcatcccatccgctgggtctgggcacccagcttcccggcctgcaagggcctgtccaaaggacgccgaccgatcctgtgggcctcttcgagcgggacccccaccgtgcctcccctccagcctttcgtcggccgcctacgctccctggactctggtatccggcggctggagctcctcttgagcgcgggagactcgggcacttttttctgcaagggccgccacgaggacgagagccgtacagtgcttcacgtgctgggggacaggacctattgcaaggcccccgggcctacccatggcgcctgcccccgcaaccgattcgaccactccctagatttgctctgtcccccccacatagctccacttgtgaaaaccgagccccagaggccagtaaaggaggaagagcccaagattccaggggacctggaccaggaaccgagcctgctctatgcggatctggaccatctagccctcagcaggccccgccggctgtccacagcggaccctgctgatgcctccaccatctatgcagttgtagtttgaagggaagcccttactccaaacctcccaagctaggggatcccagctccccataatccctctcccctccttggttcctcacctggaagaggaaggcaccatggtatagaaataagtgctagactgggagttgggagacctgggttccaggctgtctctgccactggtcttacttctaaacttactcccatctctcctataacctccatgtctccctcaccaccagtgtcctctctatacccaatcaagccctagctccttttttttttttttttgagacggagtctcgctctgttgcccaggctggagtgcagtgacaccatctccctcactgcaagctccgcctgccgggttcacaccattctcctgcctcaggctcctgagtagctgggactacaggcgcccgccaccacgcccagctaattttttgtatttttagtagagacggggtttcactgtgttagccaggatggtcttgatctgctaacctcgtgatccacccgccccggcctcccaaagtgctaggattacaggtgtgagccaccgcgcccggcctgattctttaagctgtttttctttgttgctggtgttttctttttggactcctcttccttgctccatatccctacagtatttcccaccattctaggtttgtccctttctcttcttctgggacactctcatcaacagtcagtcctcagccccctcctctgcaaatgacactcagaactctctctggctcagatctcagatttgggattaacaaacttccacttagacattctgcctgactgacctcaggcatttcgcactctgaatgtcaaacccaactcattgtcatctctgaagctgctcacttaattctcctctgtattctctttaacaacccagttgcccaacccagaaactgggagtcacgcagacctcctttctctcttactcccacacaatgagccatgaagtccagtctttctatcttaacatcactgtcaaacccacactgtattccatgcccagcgctgccacgtgaatgtactctgctcacttccttcctggattacccatagccccacctcatcctcctacccttgctttcctccctgaagtcagagagatcctactcaagagataactgctcctgacagcccttattacagaactgaagtactctccttagcttcagctctgtgcccacgtgccttggctttggatacaaggtactacagcactttgtccactctccaggcttacctgtgtcattccacatgcacatcttagaaaatgccagccttagagaattctccctagccccaaaatgtctttgcccagtgcaattccttcttcctgtattacccctttccctccttcacactatctgcctggctaattcttatttatccttagttcaagtatggccttttctgggaaggtgaccctccttggccaccccttgcatatactttgatgccctagggcacaccccctttatttccctcatagaaacagccttctgtaaattgttccatgacaacctgtatttcaatttgtaagaaatttgcatgtactgtgagctccccaacgtcaggagactgacccttttgatatcattgctaagcctcattaaatgaatgaatgaaaa

SEQ ID NO: 119244 - DNA, 2392 bp, Homo sapiens
  Payload ID: 3364
  Gene Symbol: C6orf25
  Gene Name: chromosome 6 open reading frame 25
  Uniprot ID: O95866
  ENST ID: ENST00000383412
  CDS Start-End: 12-725
acatcctaaccatggctgtgtttctgcagctgctaccgctgctgctctcgagggcccaagggaaccctggggcttctctggacggccgccctggggaccgggtgaatctctcctgcggaggagtctctcatcccatccgctgggtctgggcacccagcttcccggcctgcaagggcctgtccaaaggacgccgaccgatcctgtgggcctcttcgagcgggacccccaccgtgcctcccctccagcctttcgtcggccgcctacgctccctggactctggtatccggcggctggagctcctcttgagcgcgggagactcgggcacttttttctgcaagggccgccacgaggacgagagccgtacagtgcttcacgtgctgggggacaggacctattgcaaggcccccgggcctacccatgggtccgtgtatccccagctcctgatcccgctgctgggcgctgggttggtgctcggactgggagctttgggcctggtctggtggctgcacaggcgcctgcccccgcaaccgattcgaccactccctagatttgctctgtcccccccacatagctccacttgtgaaaaccgagccccagaggccagtaaaggaggaagagcccaagattccaggggacctggaccaggaaccgagcctgctctatgcggatctggaccatctagccctcagcaggccccgccggctgtccacagcggaccctgctgatgcctccaccatctatgcagttgtagtttgaagggaagcccttactccaaacctcccaagctaggggatcccagctccccataatccctctcccctccttggttcctcacctggaagaggaaggcaccatggtatagaaataagtgctagactgggagttgggagacctgggttccaggctgtctctgccactggtcttacttctaaacttactcccatctctcctataacctccatgtctccctcaccaccagtgtcctctctatacccaatcaagccctagctccttttttttttttttttgagacggagtctcgctctgttgcccaggctggagtgcagtgacaccatctccctcactgcaagctccgcctgccgggttcacaccattctcctgcctcaggctcctgagtagctgggactacaggcgcccgccaccacgcccagctaattttttgtatttttagtagagacggggtttcactgtgttagccaggatggtcttgatctgctaacctcgtgatccacccgccccggcctcccaaagtgctaggattacaggtgtgagccaccgcgcccggcctgattctttaagctgtttttctttgttgctggtgttttctttttggactcctcttccttgctccatatccctacagtatttcccaccattctaggtttgtccctttctcttcttctgggacactctcatcaacagtcagtcctcagccccctcctctgcaaatgacactcagaactctctctggctcagatctcagatttgggattaacaaacttccacttagacattctgcctgactgacctcaggcatttcgcactctgaatgtcaaacccaactcattgtcatctctgaagctgctcacttaattctcctctgtattctctttaacaacccagttgcccaacccagaaactgggagtcacgcagacctcctttctctcttactcccacacaatgagccatgaagtccagtctttctatcttaacatcactgtcaaacccacactgtattccatgcccagcgctgccacgtgaatgtactctgctcacttccttcctggattacccatagccccacctcatcctcctacccttgctttcctccctgaagtcagagagatcctactcaagagataactgctcctgacagcccttattacagaactgaagtactctccttagcttcagctctgtgcccacgtgccttggctttggatacaaggtactacagcactttgtccactctccaggcttacctgtgtcattccacatgcacatcttagaaaatgccagccttagagaattctccctagccccaaaatgtctttgcccagtgcaattccttcttcctgtattacccctttccctccttcacactatctgcctggctaattcttatttatccttagttcaagtatggccttttctgggaaggtgaccctccttggccaccccttgcatatactttgatgccctagggcacaccccctttatttccctcatagaaacagccttctgtaaattgttccatgacaacctgtatttcaatttgtaagaaatttgcatgtactgtgagctccccaacgtcaggagactgacccttttgatatcattgctaagcctcattaaatgaatgaatgaaaa

SEQ ID NO: 119245 - DNA, 2249 bp, Homo sapiens
  Payload ID: 3364
  Gene Symbol: C6orf25
  Gene Name: chromosome 6 open reading frame 25
  Uniprot ID: O95866
  ENST ID: ENST00000400067
  CDS Start-End: 1-582
atggctgtgtttctgcagctgctaccgctgctgctctcgagggcccaagggaaccctggggcttctctggacggccgccctggggaccgggtgaatctctcctgcggaggagtctctcatcccatccgctgggtctgggcacccagcttcccggcctgcaagggcctgtccaaaggacgccgaccgatcctgtgggcctcttcgagcgggacccccaccgtgcctcccctccagcctttcgtcggccgcctacgctccctggactctggtatccggcggctggagctcctcttgagcgcgggagactcgggcacttttttctgcaagggccgccacgaggacgagagccgtacagtgcttcacgtgctgggggacaggacctattgcaaggcccccgggcctacccatgctctgtcccccccacatagctccacttgtgaaaaccgagccccagaggccagtaaaggaggaagagcccaagattccaggggacctggaccaggaaccgagcctgctctatgcggatctggaccatctagccctcagcaggccccgccggctgtccacagcggaccctgctgatgcctccaccatctatgcagttgtagtttgaagggaagcccttactccaaacctcccaagctaggggatcccagctccccataatccctctcccctccttggttcctcacctggaagaggaaggcaccatggtatagaaataagtgctagactgggagttgggagacctgggttccaggctgtctctgccactggtcttacttctaaacttactcccatctctcctataacctccatgtctccctcaccaccagtgtcctctctatacccaatcaagccctagctccttttttttttttttttgagacggagtctcgctctgttgcccaggctggagtgcagtgacaccatctccctcactgcaagctccgcctgccgggttcacaccattctcctgcctcaggctcctgagtagctgggactacaggcgcccgccaccacgcccagctaattttttgtatttttagtagagacggggtttcactgtgttagccaggatggtcttgatctgctaacctcgtgatccacccgccccggcctcccaaagtgctaggattacaggtgtgagccaccgcgcccggcctgattctttaagctgtttttctttgttgctggtgttttctttttggactcctcttccttgctccatatccctacagtatttcccaccattctaggtttgtccctttctcttcttctgggacactctcatcaacagtcagtcctcagccccctcctctgcaaatgacactcagaactctctctggctcagatctcagatttgggattaacaaacttccacttagacattctgcctgactgacctcaggcatttcgcactctgaatgtcaaacccaactcattgtcatctctgaagctgctcacttaattctcctctgtattctctttaacaacccagttgcccaacccagaaactgggagtcacgcagacctcctttctctcttactcccacacaatgagccatgaagtccagtctttctatcttaacatcactgtcaaacccacactgtattccatgcccagcgctgccacgtgaatgtactctgctcacttccttcctggattacccatagccccacctcatcctcctacccttgctttcctccctgaagtcagagagatcctactcaagagataactgctcctgacagcccttattacagaactgaagtactctccttagcttcagctctgtgcccacgtgccttggctttggatacaaggtactacagcactttgtccactctccaggcttacctgtgtcattccacatgcacatcttagaaaatgccagccttagagaattctccctagccccaaaatgtctttgcccagtgcaattccttcttcctgtattacccctttccctccttcacactatctgcctggctaattcttatttatccttagttcaagtatggccttttctgggaaggtgaccctccttggccaccccttgcatatactttgatgccctagggcacaccccctttatttccctcatagaaacagccttctgtaaattgttccatgacaacctgtatttcaatttgtaagaaatttgcatgtactgtgagctccccaacgtcaggagactgacccttttgatatcattgctaagcctcattaaatgaatgaatgaaaa

SEQ ID NO: 119246 - DNA, 2362 bp, Homo sapiens
  Payload ID: 3364
  Gene Symbol: C6orf25
  Gene Name: chromosome 6 open reading frame 25
  Uniprot ID: O95866
  ENST ID: ENST00000400071
  CDS Start-End: 1-726
atggctgtgtttctgcagctgctaccgctgctgctctcgagggcccaagggaaccctggggcttctctggacggccgccctggggaccgggtgaatctctcctgcggaggagtctctcatcccatccgctgggtctgggcacccagcttcccggcctgcaagggcctgtccaaaggacgccgaccgatcctgtgggcctcttcgagcgggacccccaccgtgcctcccctccagcctttcgtcggccgcctacgctccctggactctggtatccggcggctggagctcctcttgagcgcgggagactcgggcacttttttctgcaagggccgccacgaggacgagagccgtacagtgcttcacgtgctgggggacaggacctattgcaaggcccccgggcctacccatgggtccgtgtatccccagctcctgatcccgctgctgggcgctgggttggtgctcggactgggagctttgggcctggtctggtggctgcacaggcgcctgcccccgcaaccgattcgaccactccctagatttgctccacttgtgaaaaccgagccccagaggccagtaaaggaggaagagcccaagattccaggggacctggaccaggaaccgagcctgctctatgcggatctggaccatctagccctcagcaggccccgccggctgtccacagcggaccctgctgatgcctccaccatctatgcagttgtagtttgaagggaagcccttactccaaacctcccaagctaggggatcccagctccccataatccctctcccctccttggttcctcacctggaagaggaaggcaccatggtatagaaataagtgctagactgggagttgggagacctgggttccaggctgtctctgccactggtcttacttctaaacttactcccatctctcctataacctccatgtctccctcaccaccagtgtcctctctatacccaatcaagccctagctccttttttttttttttttgagacggagtctcgctctgttgcccaggctggagtgcagtgacaccatctccctcactgcaagctccgcctgccgggttcacaccattctcctgcctcaggctcctgagtagctgggactacaggcgcccgccaccacgcccagctaattttttgtatttttagtagagacggggtttcactgtgttagccaggatggtcttgatctgctaacctcgtgatccacccgccccggcctcccaaagtgctaggattacaggtgtgagccaccgcgcccggcctgattctttaagctgtttttctttgttgctggtgttttctttttggactcctcttccttgctccatatccctacagtatttcccaccattctaggtttgtccctttctcttcttctgggacactctcatcaacagtcagtcctcagccccctcctctgcaaatgacactcagaactctctctggctcagatctcagatttgggattaacaaacttccacttagacattctgcctgactgacctcaggcatttcgcactctgaatgtcaaacccaactcattgtcatctctgaagctgctcacttaattctcctctgtattctctttaacaacccagttgcccaacccagaaactgggagtcacgcagacctcctttctctcttactcccacacaatgagccatgaagtccagtctttctatcttaacatcactgtcaaacccacactgtattccatgcccagcgctgccacgtgaatgtactctgctcacttccttcctggattacccatagccccacctcatcctcctacccttgctttcctccctgaagtcagagagatcctactcaagagataactgctcctgacagcccttattacagaactgaagtactctccttagcttcagctctgtgcccacgtgccttggctttggatacaaggtactacagcactttgtccactctccaggcttacctgtgtcattccacatgcacatcttagaaaatgccagccttagagaattctccctagccccaaaatgtctttgcccagtgcaattccttcttcctgtattacccctttccctccttcacactatctgcctggctaattcttatttatccttagttcaagtatggccttttctgggaaggtgaccctccttggccaccccttgcatatactttgatgccctagggcacaccccctttatttccctcatagaaacagccttctgtaaattgttccatgacaacctgtatttcaatttgtaagaaatttgcatgtactgtgagctccccaacgtcaggagactgacccttttgatatcattgctaagcctcattaaatgaatgaatgaaaa

SEQ ID NO: 119247 - DNA, 2230 bp, Homo sapiens
  Payload ID: 3364
  Gene Symbol: C6orf25
  Gene Name: chromosome 6 open reading frame 25
  Uniprot ID: O95866
  ENST ID: ENST00000449633
  CDS Start-End: 1-594
atggctgtgtttctgcagctgctaccgctgctgctctcgagggcccaagggaaccctggggcttctctggacggccgccctggggaccgggtgaatctctcctgcggaggagtctctcatcccatccgctgggtctgggcacccagcttcccggcctgcaagggcctgtccaaaggacgccgaccgatcctgtgggcctcttcgagcgggacccccaccgtgcctcccctccagcctttcgtcggccgcctacgctccctggactctggtatccggcggctggagctcctcttgagcgcgggggactcgggcacttttttctgcaagggccgccacgaggacgagagccgtacagtgcttcacgtgctgggggacaggacctattgcaaggcccccgggcctacccatgctccacttgtgaaaaccgagccccagaggccagtaaaggaggaagagcccaagattccaggggacctggaccaggaaccgagcctgctctatgcggatctggaccatctagccctcagcaggccccgccggctgtccacagcggaccctgctgatgcctccaccatctatgcagttgtagtttgaagggaagcccttactccaaacctcccaagctaggggatcccagctccccataatccctctcccctccttggttcctcacctggaagaggaaggcaccatggtatagaaataagtgctagactgggagttgggagacctgggttccaggctgtctctgccactggtcttacttctaaacttactcccatctctcctataacctccatgtctccctcaccaccagtgtcctctctatacccaatcaagccctagctccttttttttttttttttgagacggagtctcgctctgttgcccaggctggagtgcagtgacaccatctccctcactgcaagctccgcctgccgggttcacaccattctcctgcctcaggctcctgagtagctgggactacaggcgcccgccaccacgcccagctaattttttgtatttttagtagagacggggtttcactgtgttagccaggatggtcttgatctgctaacctcgtgatccacccgccccggcctcccaaagtgctaggattacaggtgtgagccaccgcgcccggcctgattctttaagctgtttttctttgttgctggtgttttctttttggactcctcttccttgctccatatccctacagtatttcccaccattctaggtttgtccctttctcttcttctgggacactctcatcaacagtcagtcctcagccccctcctctgcaaatgacactcagaactctctctggctcagatctcagatttgggattaacaaacttccacttagacattctgcctgactgacctcaggcatttcgcactctgaatgtcaaacccaactcattgtcatctctgaagctgctcacttaattctcctctgtattctctttaacaacccagttgcccaacccagaaactgggagtcacgcagacctcctttctctcttactcccacacaatgagccatgaagtccagtctttctatcttaacatcactgtcaaacccacactgtattccatgcccagcgctgccacgtgaatgtactctgctcacttccttcctggattacccatagccccacctcatcctcctacccttgctttcctccctgaagtcagagagatcctactcaagagataactgctcctgacagcccttattacagaactgaagtactctccttagcttcagctctgtgcccacgtgccttggctttggatacaaggtactacagcactttgtccactctccaggcttacctgtgtcattccacatgcacatcttagaaaatgccagccttagagaattctccctagccccaaaatgtctttgcccagtgcaattccttcttcctgtattacccctttccctccttcacactatctgcctggctaattcttatttatccttagttcaagtatggccttttctgggaaggtgaccctccttggccaccccttgcatatactttgatgccctagggcacaccccctttatttccctcatagaaacagccttctgtaaattgttccatgacaacctgtatttcaatttgtaagaaatttgcatgtactgtgagctccccaacgtcaggagactgacccttttgatatcattgctaagcctcattaaatgaatgaatgaaaa

SEQ ID NO: 119248 - DNA, 2249 bp, Homo sapiens
  Payload ID: 3364
  Gene Symbol: C6orf25
  Gene Name: chromosome 6 open reading frame 25
  Uniprot ID: O95866
  ENST ID: ENST00000440063
  CDS Start-End: 1-582
atggctgtgtttctgcagctgctaccgctgctgctctcgagggcccaagggaaccctggggcttctctggacggccgccctggggaccgggtgaatctctcctgcggaggagtctctcatcccatccgctgggtctgggcacccagcttcccggcctgcaagggcctgtccaaaggacgccgaccgatcctgtgggcctcttcgagcgggacccccaccgtgcctcccctccagcctttcgtcggccgcctacgctccctggactctggtatccggcggctggagctcctcttgagcgcgggggactcgggcacttttttctgcaagggccgccacgaggacgagagccgtacagtgcttcacgtgctgggggacaggacctattgcaaggcccccgggcctacccatgctctgtcccccccacatagctccacttgtgaaaaccgagccccagaggccagtaaaggaggaagagcccaagattccaggggacctggaccaggaaccgagcctgctctatgcggatctggaccatctagccctcagcaggccccgccggctgtccacagcggaccctgctgatgcctccaccatctatgcagttgtagtttgaagggaagcccttactccaaacctcccaagctaggggatcccagctccccataatccctctcccctccttggttcctcacctggaagaggaaggcaccatggtatagaaataagtgctagactgggagttgggagacctgggttccaggctgtctctgccactggtcttacttctaaacttactcccatctctcctataacctccatgtctccctcaccaccagtgtcctctctatacccaatcaagccctagctccttttttttttttttttgagacggagtctcgctctgttgcccaggctggagtgcagtgacaccatctccctcactgcaagctccgcctgccgggttcacaccattctcctgcctcaggctcctgagtagctgggactacaggcgcccgccaccacgcccagctaattttttgtatttttagtagagacggggtttcactgtgttagccaggatggtcttgatctgctaacctcgtgatccacccgccccggcctcccaaagtgctaggattacaggtgtgagccaccgcgcccggcctgattctttaagctgtttttctttgttgctggtgttttctttttggactcctcttccttgctccatatccctacagtatttcccaccattctaggtttgtccctttctcttcttctgggacactctcatcaacagtcagtcctcagccccctcctctgcaaatgacactcagaactctctctggctcagatctcagatttgggattaacaaacttccacttagacattctgcctgactgacctcaggcatttcgcactctgaatgtcaaacccaactcattgtcatctctgaagctgctcacttaattctcctctgtattctctttaacaacccagttgcccaacccagaaactgggagtcacgcagacctcctttctctcttactcccacacaatgagccatgaagtccagtctttctatcttaacatcactgtcaaacccacactgtattccatgcccagcgctgccacgtgaatgtactctgctcacttccttcctggattacccatagccccacctcatcctcctacccttgctttcctccctgaagtcagagagatcctactcaagagataactgctcctgacagcccttattacagaactgaagtactctccttagcttcagctctgtgcccacgtgccttggctttggatacaaggtactacagcactttgtccactctccaggcttacctgtgtcattccacatgcacatcttagaaaatgccagccttagagaattctccctagccccaaaatgtctttgcccagtgcaattccttcttcctgtattacccctttccctccttcacactatctgcctggctaattcttatttatccttagttcaagtatggccttttctgggaaggtgaccctccttggccaccccttgcatatactttgatgccctagggcacaccccctttatttccctcatagaaacagccttctgtaaattgttccatgacaacctgtatttcaatttgtaagaaatttgcatgtactgtgagctccccaacgtcaggagactgacccttttgatatcattgctaagcctcattaaatgaatgaatgaaaa

SEQ ID NO: 119249 - DNA, 2392 bp, Homo sapiens
  Payload ID: 3364
  Gene Symbol: C6orf25
  Gene Name: chromosome 6 open reading frame 25
  Uniprot ID: O95866
  ENST ID: ENST00000426729
  CDS Start-End: 12-725
acatcctaaccatggctgtgtttctgcagctgctaccgctgctgctctcgagggcccaagggaaccctggggcttctctggacggccgccctggggaccgggtgaatctctcctgcggaggagtctctcatcccatccgctgggtctgggcacccagcttcccggcctgcaagggcctgtccaaaggacgccgaccgatcctgtgggcctcttcgagcgggacccccaccgtgcctcccctccagcctttcgtcggccgcctacgctccctggactctggtatccggcggctggagctcctcttgagcgcgggggactcgggcacttttttctgcaagggccgccacgaggacgagagccgtacagtgcttcacgtgctgggggacaggacctattgcaaggcccccgggcctacccatgggtccgtgtatccccagctcctgatcccgctgctgggcgctgggttggtgctcggactgggagctttgggcctggtctggtggctgcacaggcgcctgcccccgcaaccgattcgaccactccctagatttgctctgtcccccccacatagctccacttgtgaaaaccgagccccagaggccagtaaaggaggaagagcccaagattccaggggacctggaccaggaaccgagcctgctctatgcggatctggaccatctagccctcagcaggccccgccggctgtccacagcggaccctgctgatgcctccaccatctatgcagttgtagtttgaagggaagcccttactccaaacctcccaagctaggggatcccagctccccataatccctctcccctccttggttcctcacctggaagaggaaggcaccatggtatagaaataagtgctagactgggagttgggagacctgggttccaggctgtctctgccactggtcttacttctaaacttactcccatctctcctataacctccatgtctccctcaccaccagtgtcctctctatacccaatcaagccctagctccttttttttttttttttgagacggagtctcgctctgttgcccaggctggagtgcagtgacaccatctccctcactgcaagctccgcctgccgggttcacaccattctcctgcctcaggctcctgagtagctgggactacaggcgcccgccaccacgcccagctaattttttgtatttttagtagagacggggtttcactgtgttagccaggatggtcttgatctgctaacctcgtgatccacccgccccggcctcccaaagtgctaggattacaggtgtgagccaccgcgcccggcctgattctttaagctgtttttctttgttgctggtgttttctttttggactcctcttccttgctccatatccctacagtatttcccaccattctaggtttgtccctttctcttcttctgggacactctcatcaacagtcagtcctcagccccctcctctgcaaatgacactcagaactctctctggctcagatctcagatttgggattaacaaacttccacttagacattctgcctgactgacctcaggcatttcgcactctgaatgtcaaacccaactcattgtcatctctgaagctgctcacttaattctcctctgtattctctttaacaacccagttgcccaacccagaaactgggagtcacgcagacctcctttctctcttactcccacacaatgagccatgaagtccagtctttctatcttaacatcactgtcaaacccacactgtattccatgcccagcgctgccacgtgaatgtactctgctcacttccttcctggattacccatagccccacctcatcctcctacccttgctttcctccctgaagtcagagagatcctactcaagagataactgctcctgacagcccttattacagaactgaagtactctccttagcttcagctctgtgcccacgtgccttggctttggatacaaggtactacagcactttgtccactctccaggcttacctgtgtcattccacatgcacatcttagaaaatgccagccttagagaattctccctagccccaaaatgtctttgcccagtgcaattccttcttcctgtattacccctttccctccttcacactatctgcctggctaattcttatttatccttagttcaagtatggccttttctgggaaggtgaccctccttggccaccccttgcatatactttgatgccctagggcacaccccctttatttccctcatagaaacagccttctgtaaattgttccatgacaacctgtatttcaatttgtaagaaatttgcatgtactgtgagctccccaacgtcaggagactgacccttttgatatcattgctaagcctcattaaatgaatgaatgaaaa

SEQ ID NO: 119250 - DNA, 2230 bp, Homo sapiens; identical to SEQ ID NO: 119247
  Payload ID: 3364
  Gene Symbol: C6orf25
  Gene Name: chromosome 6 open reading frame 25
  Uniprot ID: O95866
  ENST ID: ENST00000431888
  CDS Start-End: 1-594

SEQ ID NO: 119251 - DNA, 2362 bp, Homo sapiens
  Payload ID: 3364
  Gene Symbol: C6orf25
  Gene Name: chromosome 6 open reading frame 25
  Uniprot ID: O95866
  ENST ID: ENST00000457884
  CDS Start-End: 1-726
atggctgtgtttctgcagctgctaccgctgctgctctcgagggcccaagggaaccctggggcttctctggacggccgccctggggaccgggtgaatctctcctgcggaggagtctctcatcccatccgctgggtctgggcacccagcttcccggcctgcaagggcctgtccaaaggacgccgaccgatcctgtgggcctcttcgagcgggacccccaccgtgcctcccctccagcctttcgtcggccgcctacgctccctggactctggtatccggcggctggagctcctcttgagcgcgggggactcgggcacttttttctgcaagggccgccacgaggacgagagccgtacagtgcttcacgtgctgggggacaggacctattgcaaggcccccgggcctacccatgggtccgtgtatccccagctcctgatcccgctgctgggcgctgggttggtgctcggactgggagctttgggcctggtctggtggctgcacaggcgcctgcccccgcaaccgattcgaccactccctagatttgctccacttgtgaaaaccgagccccagaggccagtaaaggaggaagagcccaagattccaggggacctggaccaggaaccgagcctgctctatgcggatctggaccatctagccctcagcaggccccgccggctgtccacagcggaccctgctgatgcctccaccatctatgcagttgtagtttgaagggaagcccttactccaaacctcccaagctaggggatcccagctccccataatccctctcccctccttggttcctcacctggaagaggaaggcaccatggtatagaaataagtgctagactgggagttgggagacctgggttccaggctgtctctgccactggtcttacttctaaacttactcccatctctcctataacctccatgtctccctcaccaccagtgtcctctctatacccaatcaagccctagctccttttttttttttttttgagacggagtctcgctctgttgcccaggctggagtgcagtgacaccatctccctcactgcaagctccgcctgccgggttcacaccattctcctgcctcaggctcctgagtagctgggactacaggcgcccgccaccacgcccagctaattttttgtatttttagtagagacggggtttcactgtgttagccaggatggtcttgatctgctaacctcgtgatccacccgccccggcctcccaaagtgctaggattacaggtgtgagccaccgcgcccggcctgattctttaagctgtttttctttgttgctggtgttttctttttggactcctcttccttgctccatatccctacagtatttcccaccattctaggtttgtccctttctcttcttctgggacactctcatcaacagtcagtcctcagccccctcctctgcaaatgacactcagaactctctctggctcagatctcagatttgggattaacaaacttccacttagacattctgcctgactgacctcaggcatttcgcactctgaatgtcaaacccaactcattgtcatctctgaagctgctcacttaattctcctctgtattctctttaacaacccagttgcccaacccagaaactgggagtcacgcagacctcctttctctcttactcccacacaatgagccatgaagtccagtctttctatcttaacatcactgtcaaacccacactgtattccatgcccagcgctgccacgtgaatgtactctgctcacttccttcctggattacccatagccccacctcatcctcctacccttgctttcctccctgaagtcagagagatcctactcaagagataactgctcctgacagcccttattacagaactgaagtactctccttagcttcagctctgtgcccacgtgccttggctttggatacaaggtactacagcactttgtccactctccaggcttacctgtgtcattccacatgcacatcttagaaaatgccagccttagagaattctccctagccccaaaatgtctttgcccagtgcaattccttcttcctgtattacccctttccctccttcacactatctgcctggctaattcttatttatccttagttcaagtatggccttttctgggaaggtgaccctccttggccaccccttgcatatactttgatgccctagggcacaccccctttatttccctcatagaaacagccttctgtaaattgttccatgacaacctgtatttcaatttgtaagaaatttgcatgtactgtgagctccccaacgtcaggagactgacccttttgatatcattgctaagcctcattaaatgaatgaatgaaaa

SEQ ID NO: 119252 - DNA, 2249 bp, Homo sapiens; identical to SEQ ID NO: 119248
  Payload ID: 3364
  Gene Symbol: C6orf25
  Gene Name: chromosome 6 open reading frame 25
  Uniprot ID: O95866
  ENST ID: ENST00000425998
  CDS Start-End: 1-582

SEQ ID NO: 119253 - DNA, 2249 bp, Homo sapiens; identical to SEQ ID NO: 119248
  Payload ID: 3364
  Gene Symbol: C6orf25
  Gene Name: chromosome 6 open reading frame 25
  Uniprot ID: O95866
  ENST ID: ENST00000411608
  CDS Start-End: 1-582

SEQ ID NO: 119254 - DNA, 2230 bp, Homo sapiens; identical to SEQ ID NO: 119247
  Payload ID: 3364
  Gene Symbol: C6orf25
  Gene Name: chromosome 6 open reading frame 25
  Uniprot ID: O95866
  ENST ID: ENST00000415984
  CDS Start-End: 1-594

SEQ ID NO: 119255 - DNA, 2290 bp, Homo sapiens
  Payload ID: 3364
  Gene Symbol: C6orf25
  Gene Name: chromosome 6 open reading frame 25
  Uniprot ID: O95866
  ENST ID: ENST00000457450
  CDS Start-End: 1-654
atggctgtgtttctgcagctgctaccgctgctgctctcgagggcccaagggaaccctggggcttctctggacggccgccctggggaccgggtgaatctctcctgcggaggagtctctcatcccatccgctgggtctgggcacccagcttcccggcctgcaagggcctgtccaaaggacgccgaccgatcctgtgggcctcttcgagcgggacccccaccgtgcctcccctccagcctttcgtcggccgcctacgctccctggactctggtatccggcggctggagctcctcttgagcgcgggggactcgggcacttttttctgcaagggccgccacgaggacgagagccgtacagtgcttcacgtgctgggggacaggacctattgcaaggcccccgggcctacccatggcgcctgcccccgcaaccgattcgaccactccctagatttgctctgtcccccccacatagctccacttgtgaaaaccgagccccagaggccagtaaaggaggaagagcccaagattccaggggacctggaccaggaaccgagcctgctctatgcggatctggaccatctagccctcagcaggccccgccggctgtccacagcggaccctgctgatgcctccaccatctatgcagttgtagtttgaagggaagcccttactccaaacctcccaagctaggggatcccagctccccataatccctctcccctccttggttcctcacctggaagaggaaggcaccatggtatagaaataagtgctagactgggagttgggagacctgggttccaggctgtctctgccactggtcttacttctaaacttactcccatctctcctataacctccatgtctccctcaccaccagtgtcctctctatacccaatcaagccctagctccttttttttttttttttgagacggagtctcgctctgttgcccaggctggagtgcagtgacaccatctccctcactgcaagctccgcctgccgggttcacaccattctcctgcctcaggctcctgagtagctgggactacaggcgcccgccaccacgcccagctaattttttgtatttttagtagagacggggtttcactgtgttagccaggatggtcttgatctgctaacctcgtgatccacccgccccggcctcccaaagtgctaggattacaggtgtgagccaccgcgcccggcctgattctttaagctgtttttctttgttgctggtgttttctttttggactcctcttccttgctccatatccctacagtatttcccaccattctaggtttgtccctttctcttcttctgggacactctcatcaacagtcagtcctcagccccctcctctgcaaatgacactcagaactctctctggctcagatctcagatttgggattaacaaacttccacttagacattctgcctgactgacctcaggcatttcgcactctgaatgtcaaacccaactcattgtcatctctgaagctgctcacttaattctcctctgtattctctttaacaacccagttgcccaacccagaaactgggagtcacgcagacctcctttctctcttactcccacacaatgagccatgaagtccagtctttctatcttaacatcactgtcaaacccacactgtattccatgcccagcgctgccacgtgaatgtactctgctcacttccttcctggattacccatagccccacctcatcctcctacccttgctttcctccctgaagtcagagagatcctactcaagagataactgctcctgacagcccttattacagaactgaagtactctccttagcttcagctctgtgcccacgtgccttggctttggatacaaggtactacagcactttgtccactctccaggcttacctgtgtcattccacatgcacatcttagaaaatgccagccttagagaattctccctagccccaaaatgtctttgcccagtgcaattccttcttcctgtattacccctttccctccttcacactatctgcctggctaattcttatttatccttagttcaagtatggccttttctgggaaggtgaccctccttggccaccccttgcatatactttgatgccctagggcacaccccctttatttccctcatagaaacagccttctgtaaattgttccatgacaacctgtatttcaatttgtaagaaatttgcatgtactgtgagctccccaacgtcaggagactgacccttttgatatcattgctaagcctcattaaatgaatgaatgaaaa

SEQ ID NO: 119256 - DNA, 2392 bp, Homo sapiens; identical to SEQ ID NO: 119249
  Payload ID: 3364
  Gene Symbol: C6orf25
  Gene Name: chromosome 6 open reading frame 25
  Uniprot ID: O95866
  ENST ID: ENST00000451549
  CDS Start-End: 12-725

SEQ ID NO: 119257 - DNA, 2290 bp, Homo sapiens; identical to SEQ ID NO: 119255
  Payload ID: 3364
  Gene Symbol: C6orf25
  Gene Name: chromosome 6 open reading frame 25
  Uniprot ID: O95866
  ENST ID: ENST00000445381
  CDS Start-End: 1-654

SEQ ID NO: 119258 - DNA, 2290 bp, Homo sapiens; identical to SEQ ID NO: 119255
  Payload ID: 3364
  Gene Symbol: C6orf25
  Gene Name: chromosome 6 open reading frame 25
  Uniprot ID: O95866
  ENST ID: ENST00000422012
  CDS Start-End: 1-654

SEQ ID NO: 119259 - DNA, 2290 bp, Homo sapiens; identical to SEQ ID NO: 119255
  Payload ID: 3364
  Gene Symbol: C6orf25
  Gene Name: chromosome 6 open reading frame 25
  Uniprot ID: O95866
  ENST ID: ENST00000435007
  CDS Start-End: 1-654

SEQ ID NO: 119260 - DNA, 2392 bp, Homo sapiens; identical to SEQ ID NO: 119249
  Payload ID: 3364
  Gene Symbol: C6orf25
  Gene Name: chromosome 6 open reading frame 25
  Uniprot ID: O95866
  ENST ID: ENST00000428302
  CDS Start-End: 12-725

SEQ ID NO: 119261 - DNA, 2362 bp, Homo sapiens; identical to SEQ ID NO: 119251
  Payload ID: 3364
  Gene Symbol: C6orf25
  Gene Name: chromosome 6 open reading frame 25
  Uniprot ID: O95866
  ENST ID: ENST00000436030
  CDS Start-End: 1-726

SEQ ID NO: 119262 - DNA, 2362 bp, Homo sapiens
  Payload ID: 3364
  Gene Symbol: C6orf25
  Gene Name: chromosome 6 open reading frame 25
  ENST ID: ENST00000441161
  CDS Start-End: 1-726
atggctgtgtttctgcagctgctaccgctgctgctctcgagggcccaagggaaccctggggcttctctggacggccgccctggggaccgggtgaatctctcctgcggaggagtctctcatcccatccgctgggtctgggcacccagcttcccggcctgcaagggcctgtccaaaggacgccgaccgatcctgtgggcctcttcgagcgggacccccaccgtgcctcccctccagcctttcgtcggccgcctacgctccctggactctggtatccggcggctggagctcctcttgagcgcgggggactcgggcacttttttctgcaagggccgccacgaggacgagagccgtacagtgcttcacgtgctgggggacaggacctattgcaaggcccccgggcctacccatgggtccgtgtatccccagctcctgatcccgctgctgggcgctgggttggtgctcggactgggagctttgggcctggtctggtggctgcacaggcgcctgcccccgcaaccgattggaccactccctagatttgctccacttgtgaaaaccgagccccagaggccagtaaaggaggaagagcccaagattccaggggacctggaccaggaaccgagcctgctctatgcggatctggaccatctagccctcagcaggccccgccggctgtccacagcggaccctgctgatgcctccaccatctatgcagttgtagtttgaagggaagcccttactccaaacctcccaagctaggggatcccagctccccataatccctctcccctccttggttcctcacctggaagaggaaggcaccatggtatagaaataagtgctagactgggagttgggagacctgggttccaggctgtctctgccactggtcttacttctaaacttactcccatctctcctataacctccatgtctccctcaccaccagtgtcctctctatacccaatcaagccctagctccttttttttttttttttgagacggagtctcgctctgttgcccaggctggagtgcagtgacaccatctccctcactgcaagctccgcctgccgggttcacaccattctcctgcctcaggctcctgagtagctgggactacaggcgcccgccaccacgcccagctaattttttgtatttttagtagagacggggtttcactgtgttagccaggatggtcttgatctgctaacctcgtgatccacccgccccggcctcccaaagtgctaggattacaggtgtgagccaccgcgcccggcctgattctttaagctgtttttctttgttgctggtgttttctttttggactcctcttccttgctccatatccctacagtatttcccaccattctaggtttgtccctttctcttcttctgggacactctcatcaacagtcagtcctcagccccctcctctgcaaatgacactcagaactctctctggctcagatctcagatttgggattaacaaacttccacttagacattctgcctgactgacctcaggcatttcgcactctgaatgtcaaacccaactcattgtcatctctgaagctgctcacttaattctcctctgtattctctttaacaacccagttgcccaacccagaaactgggagtcacgcagacctcctttctctcttactcccacacaatgagccatgaagtccagtctttctatcttaacatcactgtcaaacccacactgtattccatgcccagcgctgccacgtgaatgtactctgctcacttccttcctggattacccatagccccacctcatcctcctacccttgctttcctccctgaagtcagagagatcctactcaagagataactgctcctgacagcccttattacagaactgaagtactctccttagcttcagctctgtgcccacgtgccttggctttggatacaaggtactacagcactttgtccactctccaggcttacctgtgtcattccacatgcacatcttagaaaatgccagccttagagaattctccctagccccaaaatgtctttgcccagtgcaattccttcttcctgtattacccctttccctccttcacactatctgcctggctaattcttatttatccttagttcaagtatggccttttctgggaaggtgaccctccttggccaccccttgcatatactttgatgccctagggcacaccccctttatttccctcatagaaacagccttctgtaaattgttccatgacaacctgtatttcaatttgtaagaaatttgcatgtactgtgagctccccaacgtcaggagactgacccttttgatatcattgctaagcctcattaaatgaatgaatgaaaa

SEQ ID NO: 119263 - DNA, 2392 bp, Homo sapiens
  Payload ID: 3364
  Gene Symbol: C6orf25
  Gene Name: chromosome 6 open reading frame 25
  ENST ID: ENST00000438769
  CDS Start-End: 12-725
acatcctaaccatggctgtgtttctgcagctgctaccgctgctgctctcgagggcccaagggaaccctggggcttctctggacggccgccctggggaccgggtgaatctctcctgcggaggagtctctcatcccatccgctgggtctgggcacccagcttcccggcctgcaagggcctgtccaaaggacgccgaccgatcctgtgggcctcttcgagcgggacccccaccgtgcctcccctccagcctttcgtcggccgcctacgctccctggactctggtatccggcggctggagctcctcttgagcgcgggggactcgggcacttttttctgcaagggccgccacgaggacgagagccgtacagtgcttcacgtgctgggggacaggacctattgcaaggcccccgggcctacccatgggtccgtgtatccccagctcctgatcccgctgctgggcgctgggttggtgctcggactgggagctttgggcctggtctggtggctgcacaggcgcctgcccccgcaaccgattggaccactccctagatttgctctgtcccccccacatagctccacttgtgaaaaccgagccccagaggccagtaaaggaggaagagcccaagattccaggggacctggaccaggaaccgagcctgctctatgcggatctggaccatctagccctcagcaggccccgccggctgtccacagcggaccctgctgatgcctccaccatctatgcagttgtagtttgaagggaagcccttactccaaacctcccaagctaggggatcccagctccccataatccctctcccctccttggttcctcacctggaagaggaaggcaccatggtatagaaataagtgctagactgggagttgggagacctgggttccaggctgtctctgccactggtcttacttctaaacttactcccatctctcctataacctccatgtctccctcaccaccagtgtcctctctatacccaatcaagccctagctccttttttttttttttttgagacggagtctcgctctgttgcccaggctggagtgcagtgacaccatctccctcactgcaagctccgcctgccgggttcacaccattctcctgcctcaggctcctgagtagctgggactacaggcgcccgccaccacgcccagctaattttttgtatttttagtagagacggggtttcactgtgttagccaggatggtcttgatctgctaacctcgtgatccacccgccccggcctcccaaagtgctaggattacaggtgtgagccaccgcgcccggcctgattctttaagctgtttttctttgttgctggtgttttctttttggactcctcttccttgctccatatccctacagtatttcccaccattctaggtttgtccctttctcttcttctgggacactctcatcaacagtcagtcctcagccccctcctctgcaaatgacactcagaactctctctggctcagatctcagatttgggattaacaaacttccacttagacattctgcctgactgacctcaggcatttcgcactctgaatgtcaaacccaactcattgtcatctctgaagctgctcacttaattctcctctgtattctctttaacaacccagttgcccaacccagaaactgggagtcacgcagacctcctttctctcttactcccacacaatgagccatgaagtccagtctttctatcttaacatcactgtcaaacccacactgtattccatgcccagcgctgccacgtgaatgtactctgctcacttccttcctggattacccatagccccacctcatcctcctacccttgctttcctccctgaagtcagagagatcctactcaagagataactgctcctgacagcccttattacagaactgaagtactctccttagcttcagctctgtgcccacgtgccttggctttggatacaaggtactacagcactttgtccactctccaggcttacctgtgtcattccacatgcacatcttagaaaatgccagccttagagaattctccctagccccaaaatgtctttgcccagtgcaattccttcttcctgtattacccctttccctccttcacactatctgcctggctaattcttatttatccttagttcaagtatggccttttctgggaaggtgaccctccttggccaccccttgcatatactttgatgccctagggcacaccccctttatttccctcatagaaacagccttctgtaaattgttccatgacaacctgtatttcaatttgtaagaaatttgcatgtactgtgagctccccaacgtcaggagactgacccttttgatatcattgctaagcctcattaaatgaatgaatgaaaa

SEQ ID NO: 119264 - DNA, 2362 bp, Homo sapiens; identical to SEQ ID NO: 119251
  Payload ID: 3364
  Gene Symbol: C6orf25
  Gene Name: chromosome 6 open reading frame 25
  Uniprot ID: O95866
  ENST ID: ENST00000415728
  CDS Start-End: 1-726

SEQ ID NO: 119265 - DNA, 2249 bp, Homo sapiens; identical to SEQ ID NO: 119248
  Payload ID: 3364
  Gene Symbol: C6orf25
  Gene Name: chromosome 6 open reading frame 25
  Uniprot ID: O95866
  ENST ID: ENST00000417610
  CDS Start-End: 1-582

SEQ ID NO: 119266 - DNA, 2249 bp, Homo sapiens; identical to SEQ ID NO: 119248
  Payload ID: 3364
  Gene Symbol: C6orf25
  Gene Name: chromosome 6 open reading frame 25
  Uniprot ID: O95866
  ENST ID: ENST00000437153
  CDS Start-End: 1-582

SEQ ID NO: 119267 - DNA, 2230 bp, Homo sapiens; identical to SEQ ID NO: 119247
  Payload ID: 3364
  Gene Symbol: C6orf25
  Gene Name: chromosome 6 open reading frame 25
  Uniprot ID: O95866
  ENST ID: ENST00000433769
  CDS Start-End: 1-594

SEQ ID NO: 119268 - DNA, 2290 bp, Homo sapiens
  Payload ID: 3364
  Gene Symbol: C6orf25
  Gene Name: chromosome 6 open reading frame 25
  ENST ID: ENST00000442871
  CDS Start-End: 1-654
atggctgtgtttctgcagctgctaccgctgctgctctcgagggcccaagggaaccctggggcttctctggacggccgccctggggaccgggtgaatctctcctgcggaggagtctctcatcccatccgctgggtctgggcacccagcttcccggcctgcaagggcctgtccaaaggacgccgaccgatcctgtgggcctcttcgagcgggacccccaccgtgcctcccctccagcctttcgtcggccgcctacgctccctggactctggtatccggcggctggagctcctcttgagcgcgggggactcgggcacttttttctgcaagggccgccacgaggacgagagccgtacagtgcttcacgtgctgggggacaggacctattgcaaggcccccgggcctacccatggcgcctgcccccgcaaccgattggaccactccctagatttgctctgtcccccccacatagctccacttgtgaaaaccgagccccagaggccagtaaaggaggaagagcccaagattccaggggacctggaccaggaaccgagcctgctctatgcggatctggaccatctagccctcagcaggccccgccggctgtccacagcggaccctgctgatgcctccaccatctatgcagttgtagtttgaagggaagcccttactccaaacctcccaagctaggggatcccagctccccataatccctctcccctccttggttcctcacctggaagaggaaggcaccatggtatagaaataagtgctagactgggagttgggagacctgggttccaggctgtctctgccactggtcttacttctaaacttactcccatctctcctataacctccatgtctccctcaccaccagtgtcctctctatacccaatcaagccctagctccttttttttttttttttgagacggagtctcgctctgttgcccaggctggagtgcagtgacaccatctccctcactgcaagctccgcctgccgggttcacaccattctcctgcctcaggctcctgagtagctgggactacaggcgcccgccaccacgcccagctaattttttgtatttttagtagagacggggtttcactgtgttagccaggatggtcttgatctgctaacctcgtgatccacccgccccggcctcccaaagtgctaggattacaggtgtgagccaccgcgcccggcctgattctttaagctgtttttctttgttgctggtgttttctttttggactcctcttccttgctccatatccctacagtatttcccaccattctaggtttgtccctttctcttcttctgggacactctcatcaacagtcagtcctcagccccctcctctgcaaatgacactcagaactctctctggctcagatctcagatttgggattaacaaacttccacttagacattctgcctgactgacctcaggcatttcgcactctgaatgtcaaacccaactcattgtcatctctgaagctgctcacttaattctcctctgtattctctttaacaacccagttgcccaacccagaaactgggagtcacgcagacctcctttctctcttactcccacacaatgagccatgaagtccagtctttctatcttaacatcactgtcaaacccacactgtattccatgcccagcgctgccacgtgaatgtactctgctcacttccttcctggattacccatagccccacctcatcctcctacccttgctttcctccctgaagtcagagagatcctactcaagagataactgctcctgacagcccttattacagaactgaagtactctccttagcttcagctctgtgcccacgtgccttggctttggatacaaggtactacagcactttgtccactctccaggcttacctgtgtcattccacatgcacatcttagaaaatgccagccttagagaattctccctagccccaaaatgtctttgcccagtgcaattccttcttcctgtattacccctttccctccttcacactatctgcctggctaattcttatttatccttagttcaagtatggccttttctgggaaggtgaccctccttggccaccccttgcatatactttgatgccctagggcacaccccctttatttccctcatagaaacagccttctgtaaattgttccatgacaacctgtatttcaatttgtaagaaatttgcatgtactgtgagctccccaacgtcaggagactgacccttttgatatcattgctaagcctcattaaatgaatgaatgaaaa

SEQ ID NO: 119269 - DNA, 2230 bp, Homo sapiens; identical to SEQ ID NO: 119247
  Payload ID: 3364
  Gene Symbol: C6orf25
  Gene Name: chromosome 6 open reading frame 25
  Uniprot ID: O95866
  ENST ID: ENST00000455185
  CDS Start-End: 1-594

SEQ ID NO: 119270 - DNA, 2392 bp, Homo sapiens; identical to SEQ ID NO: 119249
  Payload ID: 3364
  Gene Symbol: C6orf25
  Gene Name: chromosome 6 open reading frame 25
  Uniprot ID: O95866
  ENST ID: ENST00000444404
  CDS Start-End: 12-725

SEQ ID NO: 119271 - DNA, 2362 bp, Homo sapiens; identical to SEQ ID NO: 119251
  Payload ID: 3364
  Gene Symbol: C6orf25
  Gene Name: chromosome 6 open reading frame 25
  Uniprot ID: O95866
  ENST ID: ENST00000447587
  CDS Start-End: 1-726

SEQ ID NO: 119272 - DNA, 790 bp, Homo sapiens
  Payload ID: 3364
  Gene Symbol: C6orf25
  Gene Name: chromosome 6 open reading frame 25
  ENST ID: ENST00000480039
  CDS Start-End: 41-703
cgctgattcgctcgcagcttctcctcaccacatcctaaccatggctgtgtttctgcagctgctaccgctgctgctctcgagggcccaagggaaccctggggcttctctggacggccgccctggggaccgggtgaatctctcctgcggaggagtctctcatcccatccgctgggtctgggcacccagcttcccggcctgcaagggcctgtccaaaggacgccgaccgatcctgtgggcctcttcgagcgggacccccaccgtgcctcccctccagcctttcgtcggccgcctacgctccctggactctggtatccggcggctggagctcctcttgagcgcgggggactcgggcacttttttctgcaagggccgccacgaggacgagagccgtacagtgcttcacgtgctgggggacaggacctattgcaaggcccccgggcctacccatgggtccgtgtatccccagctcctgatcccgctgctgggcgctgggttggtgctcggactgggagctttgggcctggtctggtggctgcacaggcgcctgcccccgcaaccgattcgaccactccctagatttgctccacttgtgaaaaccgagccccagaggccagtaaaggaggaagagcccaagattccaggggacctggaccaggaaccggtaagggcatggggatgggaaggggatagccagaatctctgaggaaaatggaccaaaaaaaaaaaggcctgaaccccaaggaagactgtggagaccatcttgtcttcctccccttcctcctccagagcc

SEQ ID NO: 119273 - DNA, 558 bp, Homo sapiens
  Payload ID: 3364
  Gene Symbol: C6orf25
  Gene Name: chromosome 6 open reading frame 25
  ENST ID: ENST00000485548
  CDS Start-End: 12-389
acatcctaaccatggctgtgtttctgcagctgctaccgctgctgctctcgagggcccaagggaaccctggggcttctctggacggccgccctggggaccgggtgaatctctcctgcggaggagtctctcatcccatccgctgggtctgggcacccagcttcccggcctgcaagggcctgtccaaaggacgccgaccgatcctgtgggcctcttcgagcgggacccccaccgtgcctcccctccagcctttcgtcggccgcctacgctccctggactctgctcctgatcccgctgctgggcgctgggttggtgctcggactgggagctttgggcctggtctggtggctgcacaggcgcctgcccccgcaaccgattcgaccactccctagatttgctctgtcccccccacatagctccacttgtgaaaaccgagccccagaggccagtaaaggaggaagagcccaagattccaggggacctggaccaggaaccgagcctgctctatgcggatctggaccatctagccctcagcaggccccgccggctgtccacagcgga

SEQ ID NO: 119274 - DNA, 2475 bp, Homo sapiens
  Payload ID: 3365
  Gene Symbol: C6orf47
  Gene Name: chromosome 6 open reading frame 47
  Uniprot ID: O95873
  ENST ID: ENST00000375911
  CDS Start-End: 826-1710
ggtgcagctgcttccgggcttcgcggctcccggcggctccccaaggccgcggccccgacgctgggcccgggagcggtccccgcgcacagcgcccggacgcgtaggtcccgaagtaggcccgcgctttgcttcgtaactggggatctctgaggacatcttagttctgaccttgtggaggccgcgtctctgctgcgtgttcgcgggccagtcgggccactttgtagaaatcatagccctctaaatcaagggacgaacgctgctggctggagtttgctggacactttcattccacctcctaacaaagagaattcctattccttgaggtcccttggggcagcagttaaagactacacgatccaggagcacctaggacctggggccaccttcctgcccgctttattggatggagcactgcctccccagtttctgggacaccttggggtgtggccttggtgagtgaaacttggggtgctgcctgctgggaaggaaatccggaaacgcagagaggactctctggtggtgacccaggccttgtcagatctgagattcttggaatctcagattgtgggggtgtggatggtgaatgaatttgggtatgcccccctttaccccagaactgaagaggaagcaaactacttgccacacttgaggctgcatgactattcagagaagggaggagccacttctgaattcagagtaggactgcatcaccaggcaaatacctgttctgagccagaaagactctggcttctgaggagatcctgagagtctgagtagtgccaggaagcagcctcagaatttgggggcccattacacaccccagccatgttcctgcgacggcttggtggctggctacctcgcccttggggccgccggaaaccaatgaggcctgacccgccttacccagaacccagacgggtggacagctcctcggagaattcaggaagtgactgggatagtgccccagaaaccatggaagatgtggggcatcccaagactaaggactcgggggcattgagggtttctggggctgcttccgaaccaagcaaggaggagccccaagttgagcagctagggagcaaaagaatggattccctcaagtgggaccagcctatctctagcactcaagagtctgggagactggaggctggaggggccagtcccaaactcagatgggatcatgtggattcaggtggcaccaggagaccaggggtgtcccctgaagggggactgagcgtccctgggccaggagccccattggagaaacctggtaggcgtgagaagctgttgggctggctgcggggggaaccaggagctccctcccggtacttggggggcccagaagagtgtctgcagatctccaccaacctgaccctgcatcttctggagctgctggcctctgccctgctggccctgtgctcacgaccactgcgggcagccttggacacactgggcctgcgtggaccgctgggcctctggctacatggcctactgtccttcctggctgccctgcatgggctccatgctgttctgagcctacttactgcccaccctttgcacttcgcctgcctctttggtctcctgcaggccttggtgctggctgtcagcctccgggagcccaatggggatgaggcggccactgactgggagagtgaggggttggagagggaaggtgaggagcagaggggagacccgggaaaggggctgtgaccgtggggtgggggcaaagggtgaagagagtgtgggctttaggagaaaagtgtgaggcatgacccaaattgtaagcatagggacctcagggatggggaagaaacccgagtacgagggtgcagggccccccttcatacacaggagagaacagaactatttagggtgtttgtgtttatggacagtgagggcactgctcttggattcaccagctgttatttttgcttttacttttctcccaccttcagttttttttttttttccacctccactttttaaaagcaaaaaaaaaaaaaagtatgatggtggtgaataaagaccaaagggtcctctctacctttgaaaactctcctggggtggaggagaccagggcaggatagacagacctctgcagtaagagagtggttgggaaacccagggtgttccttggatctcaggatctgagccatcgagggaagagtggggctgctaggcaagtggattagggggtctggatagggccccacaggtgacagggagcctgcagggcggatctggtgatcatgggagccagagggagtggggacagtgcaggcagtattggcaggagggccagtgcagaagggctggtagctcaggcagtgtgggggaagcactgaagcctgtagtccccacttgggggctaggggtttgctcactcagcaataaataactgtgtcacatcaaatcctaaatataccactacaaagtgagagttactgccactctgttcttactgacaccgtccag

SEQ ID NO: 119275 - DNA, 2473 bp, Homo sapiens
  Payload ID: 3365
  Gene Symbol: C6orf47
  Gene Name: chromosome 6 open reading frame 47
  Uniprot ID: O95873
  ENST ID: ENST00000366431
  CDS Start-End: 823-1707
gcagctgcttccgggcttcgcggctcccggcggctccccaaggccgcggccccgacgctgggcccgggagcggtccccgcgcacagcgcccggacgcgtaggtcccgaagtaggcccgcgctttgcttcgtaactggggatctctgaggacatcttagttctgaccttgtggaggccgcgtctctgctgcgtgttcgcgggccagtcgggccactttgtagaaatcatagccctctaaatcaagggacgaacgctgctggctggagtttgctggacactttcattccacctcctaacaaagagaattcctattccttgaggtcccttggggcagcagttaaagactacacgatccaggagcacctaggacctggggccaccttcctgcccgctttattggatggagcactgcctccccagtttctgggacaccttggggtgtggccttggtgagtgaaacttggggtgctgcctgctgggaaggaaatccggaaacgcagagaggactctctggtggtgacccaggccttgtcagatctgagattcttggaatctcagattgtgggggtgtggatggtgaatgaatttgggtatgcccccctttaccccagaactgaagaggaagcaaactacttgccacacttgaggctgcatgactattcagagaagggaggagccacttctgaattcagagtaggactgcatcaccaggcaaatacctgttctgagccagaaagactctggcttctgaggagatcctgagagtctgagtagtgccaggaagcagcctcagaatttgggggcccattacacaccccagccatgttcctgcgacggcttggtggctggctacctcgcccttggggccgccggaaaccaatgaggcctgacccgccttacccagaacccagacgggtggacagctcctcggagaattcaggaagtgactgggatagtgccccagaaaccatggaagatgtggggcatcccaagactaaggactcgggggcattgagggtttctagggctgcttccgaaccaagcaaggaggagccccaagttgagcagctagggagcaaaagaatggattccctcaagtgggaccagcctatctctagcactcaagagtctgggagactggaggctggaggggccagtcccaaactcagatgggatcatgtggattcaggtggcaccaggagaccaggggtgtcccctgaagggggactgagcgtccctgggccaggagccccattggagaaacctggtaggcgtgagaagctgttgggctggctgcggggggaaccaggagctccctcccggtacttggggggcccagaagagtgtctgcagatctccaccaacctgaccctgcatcttctggagctgctggcctctgccctgctggccctgtgctcacgaccactgcgggcagccttggacacactgggcctgcgtggaccgctgggcctctggctacatggcctactgtccttcctggctgccctgcatgggctccatgctgttctgagcctacttactgcccaccctttgcacttcgcctgcctctttggtctcctgcaggccttggtgctggctgtcagcctccgggagcccaatggggatgaggcggccactgactgggagagtgaggggttggagagggaaggtgaggagcagaggggagacccgggaaaggggctgtgaccgtggggtgggggcaaagggtgaagagagtgtgggctttaggagaaaagtgtgaggcatgacccaaattgtaagcatagggacctcagggatggggaagaaacccgagtacgagggtgcagggccccccttcatacacaggagagaacagaactatttagggtgtttgtgtttatggacagtgagggcactgctcttggattcaccagctgttatttttgcttttacttttctcccaccttcagttttttttttttttccacctccactttttaaaagcaaaaaaaaaaaaaaagtatgatggtggtgaataaagaccaaagggtcctctctacctttgaaaactctcctggggtggaggagaccagggcaggatagacagacctctgcagtaagagagtggttgggaaacccagggtgttccttggatctcaggatctgagccatcgagggaagagtggggctgctaggcaagtggattagggggtctggatagggccccacaggtgacagggagcctgcagggcggatctggtgatcatgggagccagagggagtggggacagtgcaggcagtattggcaggagggccagtgcagaagggctggtagctcaggcagtgtgggggaagcactgaagcctgtagtccccacttgggggctaggggtttgctcactcagcaataaataactgtgtcacatcaaatcctaaatataccactacaaagtgagagttactgccactctgttcttactgacaccgtccag

SEQ ID NO: 119276 - DNA, 2475 bp, Homo sapiens
  Payload ID: 3365
  Gene Symbol: C6orf47
  Gene Name: chromosome 6 open reading frame 47
  Uniprot ID: O95873
  ENST ID: ENST00000366432
  CDS Start-End: 826-1710
ggtgcagctgcttccgggcttcgcggctcccggcggctccccaaggccgcggccccgacgctgggcccgggagcggtccccgcgcacagcgcccggacgcgtaggtcccgaagtaggcccgcgctttgcttcgtaactggggatctctgaggacatcttagttctgaccttgtggaggccgcgtctctgctgcgtgttcgcgggccagtcgggccactttgtagaaatcatagccctctaaatcaagggacgaacgctgctggctggagtttgctggacactttcattccacctcctaacaaagagaattcctattccttgaggtcccttggggcagcagttaaagactacacgatccaggagcacctaggacctggggccaccttcctgcccgctttattggatggagcactgcctccccagtttctgggacaccttggggtgtggccttggtgagtgaaacttggggtgctgcctgctgggaaggaaatccggaaacgcagagaggactctctggtggtgacccaggccttgtcagatctgagattcttggaatctcagattgtgggggtgtggatggtgaatgaatttgggtatgcccccctttaccccagaactgaagaggaagcaaactacttgccacacttgaggctgcatgactattcagagaagggaggagccacttctgaattcagagtaggactgcatcaccaggcaaatacctgttctgagccagaaagactctggcttctgaggagatcctgagagtctgagtagtgccaggaagcagcctcagaatttgggggcccattacacaccccagccatgttcctgcgacggcttggtggctggctacctcgcccttggggccgccggaaaccaatgaggcctgacccgccttacccagaacccagacgggtggacagctcctcggagaattcaggaagtgactgggatagtgccccagaaaccatggaagatgtggggcatcccaagactaaggactcgggggcattgagggtttctagggctgcttccgaaccaagcaaggaggagccccaagttgagcagctagggagcaaaagaatggattccctcaagtgggaccagcctatctctagcactcaagagtctgggagactggaggctggaggggccagtcccaaactcagatgggatcatgtggattcaggtggcaccaggagaccaggggtgtcccctgaagggggactgagcgtccctgggccaggagccccattggagaaacctggtaggcgtgagaagctgttgggctggctgcggggggaaccaggagctccctcccggtacttggggggcccagaagagtgtctgcagatctccaccaacctgaccctgcatcttctggagctgctggcctctgccctgctggccctgtgctcacgaccactgcgggcagccttggacacactgggcctgcgtggaccgctgggcctctggctacatggcctactgtccttcctggctgccctgcatgggctccatgctgttctgagcctacttactgcccaccctttgcacttcgcctgcctctttggtctcctgcaggccttggtgctggctgtcagcctccgggagcccaatggggatgaggcggccactgactgggagagtgaggggttggagagggaaggtgaggagcagaggggagacccgggaaaggggctgtgaccgtggggtgggggcaaagggtgaagagagtgtgggctttaggagaaaagtgtgaggcatgacccaaattgtaagcatagggacctcagggatggggaagaaacccgagtacgagggtgcagggccccccttcatacacaggagagaacagaactatttagggtgtttgtgtttatggacagtgagggcactgctcttggattcaccagctgttatttttgcttttacttttctcccaccttcagttttttttttttttccacctccactttttaaaagcaaaaaaaaaaaaaagtatgatggtggtgaataaagaccaaagggtcctctctacctttgaaaactctcctggggtggaggagaccagggcaggatagacagacctctgcagtaagagagtggttgggaaacccagggtgttccttggatctcaggatctgagccatcgagggaagagtggggctgctaggcaagtggattagggggtctggatagggccccacaggtgacagggagcctgcagggcggatctggtgatcatgggagccagagggagtggggacagtgcaggcagtattggcaggagggccagtgcagaagggctggtagctcaggcagtgtgggggaagcactgaagcctgtagtccccacttgggggctaggggtttgctcactcagcaataaataactgtgtcacatcaaatcctaaatataccactacaaagtgagagttactgccactctgttcttactgacaccgtccag

SEQ ID NO: 119277 - DNA, 2475 bp, Homo sapiens; identical to SEQ ID NO: 119276
  Payload ID: 3365
  Gene Symbol: C6orf47
  Gene Name: chromosome 6 open reading frame 47
  Uniprot ID: O95873
  ENST ID: ENST00000413113
  CDS Start-End: 826-1710

SEQ ID NO: 119278 - DNA, 2475 bp, Homo sapiens; identical to SEQ ID NO: 119276
  Payload ID: 3365
  Gene Symbol: C6orf47
  Gene Name: chromosome 6 open reading frame 47
  Uniprot ID: O95873
  ENST ID: ENST00000418357
  CDS Start-End: 826-1710

SEQ ID NO: 119279 - DNA, 2475 bp, Homo sapiens
  Payload ID: 3365
  Gene Symbol: C6orf47
  Gene Name: chromosome 6 open reading frame 47
  Uniprot ID: O95873
  ENST ID: ENST00000431256
  CDS Start-End: 826-1710
ggtgcagctgcttccgggcttcgcggctcccggcggctccccaaggccgcggccccgacgctgggcccgggagcggtccccgcgcacagcgcccggacgcgtaggtcccgaagtaggcccgcgctttgcttcgtaactggggatctctgaggacatcttagttctgaccttgtggaggccgcgtctctgctgcgtgttcgcgggccagtcgggccactttgtagaaatcatagccctctaaatcaagggacgaacgctgctggctggagtttgctggacactttcattccacctcctaacaaagagaattcctattccttgaggtcccttgggacagcagttaaagactacacgatccaggagcacctaggacctggggccaccttcctgcccgctttattggatggagcactgcctccccagtttctgggacaccttggggtgtggccttggtgagtgaaacttggggtgctgcctgctgggaaggaaatccggaaacgcagagaggactctctggtggtgacccaggccttgtcagatctgagattcttggaatctcagattgtgggggtgtggatggtgaatgaatttgggtatgcccccctttaccccagaactgaagaggaagcaaactacttgccacacttgaggctgcatgactattcagagaagggaggagccacttctgaattcagagtaggactgcatcaccaggcaaatacctgttctgagccagaaagactctggcttctgaggagatcctgagagtctgagtagtgccaggaagcagcctcagaatttgggggcccattacacaccccagccatgttcctgcgacggcttggtggctggctacctcgcccttggggccgccggaaaccaatgaggcctgacccgccttacccagaacccagacgggtggacagctcctcggagaattcaggaagtgactgggatagtgccccagaaaccatggaagatgtggggcatcccaagactaaggactcgggggcattgagggtttctagggctgcttccgaaccaagcaaggaggagccccaagttgagcagctagggagcaaaagaatggattccctcaagtgggaccagcctatctctagcactcaagagtctgggagactggaggctggaggggccagtcccaaactcagatgggatcatgtggattcaggtggcaccaggagaccaggggtgtcccctgaagggggactgagcgtccctgggccaggagccccattggagaaacctggtaggcgtgagaagctgttgggctggctgcggggggaaccaggagctccctcccggtacttggggggcccagaagagtgtctgcagatctccaccaacctgaccctgcatcttctggagctgctggcctctgccctgctggccctgtgctcacgaccactgcgggcagccttggacacactgggcctgcgtggaccgctgggcctctggctacatggcctactgtccttcctggctgccctgcatgggctccatgctgttctgagcctacttactgcccaccctttgcacttcgcctgcctctttggtctcctgcaggccttggtgctggctgtcagcctccgggagcccaatggggatgaggcggccactgactgggagagtgaggggttggagagggaaggtgaggagcagaggggagacccgggaaaggggctgtgaccgtggggtgggggcaaagggtgaagagagtgtgggctttaggagaaaagtgtgaggcatgacccaaattgtaagcatagggacctcagggatggggaagaaacccgagtacgagggtgcagggccccccttcatacacaggagagaacagaactatttagggtgtttgtgtttatggacagtgagggcactgctcttggattcaccagctgttatttttgcttttacttttctcccaccttcagttttttttttttttccacctccactttttaaaagcaaaaaaaaaaaaaagtatgatggtggtgaataaagaccaaagggtcctctctacctttgaaaactctcctggggtggaggagaccagggcaggatagacagacctctgcagtaagagagtggttgggaaacccagggtgttccttggatctcaggatctgagccatcgagggaagagtggggctgctaggcaagtggattagggggtctggatagggccccacaggtgacagggagcctgcagggcggatctggtgatcatgggagccagagggagtggggacagtgcaggcagtattggcaggagggccagtgcagaagggctggtagctcaggcagtgtgggggaagcactgaagcctgtagtccccacttgggggctaggggtttgctcactcagcaataaataactgtgtcacatcaaatcctaaatataccactacaaagtgagagttactgccactctgttcttactgacaccgtccag

SEQ ID NO: 119280 - DNA, 2476 bp, Homo sapiens
  Payload ID: 3365
  Gene Symbol: C6orf47
  Gene Name: chromosome 6 open reading frame 47
  Uniprot ID: O95873
  ENST ID: ENST00000442972
  CDS Start-End: 826-1710
ggtgcagctgcttccgggcttcgcggctcccggcggctccccaaggccgcggccccgacgctgggcccgggagcggtccccgcgcacagcgcccggacgcgtaggtcccgaagtaggcccgcgctttgcttcgtaactggggatctctgaggacatcttagttctgaccttgtggaggccgcgtctctgctgcgtgttcgcgggccagtcgggccactttgtagaaatcatagccctctaaatcaagggacgaacgctgctggctggagtttgctggacactttcattccacctcctaacaaagagaattcctattccttgaggtcccttggggcagcagttaaagactacacgatccaggagcacctaggacctggggccaccttcctgcccgctttattggatggagcactgcctccccagtttctgggacaccttggggtgtggccttggtgagtgaaacttggggtgctgcctgctgggaaggaaatccggaaacgcagagaggactctctggtggtgacccaggccttgtcagatctgagattcttggaatctcagattgtgggggtgtggatggtgaatgaatttgggtatgcccccctttaccccagaactgaagaggaagcaaactacttgccacacttgaggctgcatgactattcagagaagggaggagccacttctgaattcagagtaggactgcatcaccaggcaaatacctgttctgagccagaaagactctggcttctgaggagatcctgagagtctgagtagtgccaggaagcagcctcagaatttgggggcccattacacaccccagccatgttcctgcgacggcttggtggctggctacctcgcccttggggccgccggaaaccaatgaggcctgacccgccttacccagaacccagacgggtggacagctcctcggagaattcaggaagtgactgggatagtgccccagaaaccatggaagatgtggggcatcccaagactaaggactcgggggcattgagggtttctggggctgcttccgaaccaagcaaggaggagccccaagttgagcagctagggagcaaaagaatggattccctcaagtgggaccagcctatctctagcactcaagagtctgggagactggaggctggaggggccagtcccaaactcagatgggatcatgtggattcaggtggcaccaggagaccaggggtgtcccctgaagggggactgagcgtccctgggccaggagccccattggagaaacctggtaggcgtgagaagctgttgggctggctgcggggggaaccaggagctccctcccggtacttggggggcccagaagagtgtctgcagatctccaccaacctgaccctgcatcttctggagctgctggcctctgccctgctggccctgtgctcacgaccactgcgggcagccttggacacactgggcctgcgtggaccgctgggcctctggctacatggcctactgtccttcctggctgccctgcatgggctccatgctgttctgagcctacttactgcccaccctttgcacttcgcctgcctctttggtctcctgcaggccttggtgctggctgtcagcctccgggagcccaatggggatgaggcggccactgactgggagagtgaggggttggagagggaaggtgaggagcagaggggagacccgggaaaggggctgtgaccgtggggtgggggcaaagggtgaagagagtgtgggctttaggagaaaagtgtgaggcatgacccaaattgtaagcatagggacctcagggatggggaagaaacccgagtacgagggtgcagggccccccttcatacacaggagagaacagaactatttagggtgtttgtgtttatggacagtgagggcactgctcttggattcaccagctgttatttttgcttttacttttctcccaccttcagttttttttttttttccacctccactttttaaaagcaaaaaaaaaaaaaaagtatgatggtggtgaataaagaccaaagggtcctctctacctttgaaaactctcctggggtggaggagaccagggcaggatagacagacctctgcagtaagagagtggttgggaaacccagggtgttccttggatctcaggatctgagccatcgagggaagagtggggctgctaggcaagtggattagggggtctggatagggccccacaggtgacagggagcctgcagggcggatctggtgatcatgggagccagagggagtggggacagtgcaggcagtattggcaggagggccagtgcagaagggctggtagctcaggcagtgtgggggaagcactgaagcctgtagtccccacttgggggctaggggtttgctcactcagcaataaataactgtgtcacatcaaatcctaaatataccactacaaagtgagagttactgccactctgttcttactgacaccgtccag

SEQ ID NO: 119281 - DNA, 586 bp, Homo sapiens
  Payload ID: 3366
  Gene Symbol: C6orf48
  Gene Name: chromosome 6 open reading frame 48
  Uniprot ID: Q9UBA6
  ENST ID: ENST00000375633
  CDS Start-End: 258-485
tgagtgtgtcgctgatgccatcaccgcagcgctctgaccgccccctcggtccagcatttctcaggctcaacgagttcatggccaagattcctaatcttttgttctgtttcatttccccgttaggagttgtaagacgttcatcgccgtgttatccttgagtaaagaatgaactctggaagcccagccagggacaatgcaccttcacagagattctgcactaatctgagtgaaggtctaaggtttggaatctccccctcatggagagaagctttgtatggctgtcatgcttagacagtgattcctgcaacttgaccttcaggctgggagaggtggagagccatgcctgttctccttccttgctatggaatttgctgacacaatatcttccgcctggtgctgggcatatcctaagaacttacaactttcctgtattatcctgtgtgagcagctgtcaccttattgggggaaaaatgcctgaaaattagggggcacttcaagtagatagcttctatttcctatatttgtcttatatacaagtatttgcttttatcaaaataattccaataaagcattttaaagtaaagaa

SEQ ID NO: 119282 - DNA, 610 bp, Homo sapiens
  Payload ID: 3366
  Gene Symbol: C6orf48
  Gene Name: chromosome 6 open reading frame 48
  Uniprot ID: Q9UBA6
  ENST ID: ENST00000375635
  CDS Start-End: 285-512
ttttagttctttttgcgaagtgggctcgtgggttggcagtatgagagttgtaatggcccgactgttgagtgagggggagcaggggatcccaacggcttgcgctgcctttgcgcagcagccggcgggcggccacgtcgcggcctggctggggagttgtaagacgttcatcgccgtgttatccttgagtaaagaatgaactctggaagcccagccagggacaatgcaccttcacagagattctgcactaatctgagtgaaggtctaaggtttggaatctccccctcatggagagaagctttgtatggctgtcatgcttagacagtgattcctgcaacttgaccttcaggctgggagaggtggagagccatgcctgttctccttccttgctatggaatttgctgacacaatatcttccgcctggtgctgggcatatcctaagaacttacaactttcctgtattatcctgtgtgagcagctgtcaccttattgggggaaaaatgcctgaaaattagggggcacttcaagtagatagcttctatttcctatatttgtcttatatacaagtatttgcttttatcaaaataattccaataaagcattttaaagtaaa

SEQ ID NO: 119283 - DNA, 847 bp, Homo sapiens
  Payload ID: 3366
  Gene Symbol: C6orf48
  Gene Name: chromosome 6 open reading frame 48
  Uniprot ID: Q9UBA6
  ENST ID: ENST00000375638
  CDS Start-End: 522-749
ttttagttctttttgcgaagtgggctcgtgggttggcagtatgagagttgtaatggcccgactgttgagtgagggggagcaggggatcccaacggcttgcgctgcctttgcgcagcagccggcgggcggccacgtcgcggcctggctggggtaggagagggcggtccccagtgcagttgggtgaactaccgttgcacactggagtttctggtgtctttgcttggaactgacctagctcgtggcagggggaactcggctagcggccccacagcccctgctgactcaaaacaactgagttgtaagacgttcatcgccgtgttatccttgagtaaagaagcgggcttttgccatgttgtccaggctggtctctactcctgggctcaagcagtcctcctgcctcagtctcccaaagtgctggaattacagggaatgaactctggaagcccagccagggacaatgcaccttcacagagattctgcactaatctgagtgaaggtctaaggtttggaatctccccctcatggagagaagctttgtatggctgtcatgcttagacagtgattcctgcaacttgaccttcaggctgggagaggtggagagccatgcctgttctccttccttgctatggaatttgctgacacaatatcttccgcctggtgctgggcatatcctaagaacttacaactttcctgtattatcctgtgtgagcagctgtcaccttattgggggaaaaatgcctgaaaattagggggcacttcaagtagatagcttctatttcctatatttgtcttatatacaagtatttgcttttatcaaaataattccaataaagcattttaaagtaaa

SEQ ID NO: 119284 - DNA, 712 bp, Homo sapiens
  Payload ID: 3366
  Gene Symbol: C6orf48
  Gene Name: chromosome 6 open reading frame 48
  Uniprot ID: Q9UBA6
  ENST ID: ENST00000375639
  CDS Start-End: 387-614
ttttagttctttttgcgaagtgggctcgtgggttggcagtatgagagttgtaatggcccgactgttgagtgagggggagcaggggatcccaacggcttgcgctgcctttgcgcagcagccggcgggcggccacgtcgcggcctggctggggtaggagagggcggtccccagtgcagttgggtgaactaccgttgcacactggagtttctggtgtctttgcttggaactgacctagctcgtggcagggggaactcggctagcggccccacagcccctgctgactcaaaacaactaatgaactctggaagcccagccagggacaatgcaccttcacagagattctgcactaatctgagtgaaggtctaaggtttggaatctccccctcatggagagaagctttgtatggctgtcatgcttagacagtgattcctgcaacttgaccttcaggctgggagaggtggagagccatgcctgttctccttccttgctatggaatttgctgacacaatatcttccgcctggtgctgggcatatcctaagaacttacaactttcctgtattatcctgtgtgagcagctgtcaccttattgggggaaaaatgcctgaaaattagggggcacttcaagtagatagcttctatttcctatatttgtcttatatacaagtatttgcttttatcaaaataattccaataaagcattttaaagtaaa

SEQ ID NO: 119285 - DNA, 1053 bp, Homo sapiens
  Payload ID: 3366
  Gene Symbol: C6orf48
  Gene Name: chromosome 6 open reading frame 48
  Uniprot ID: Q9UBA6
  ENST ID: ENST00000375640
  CDS Start-End: 728-955
gctgctgggaaacggcttaggagcagcacccggctggcgctggccggccggcgccggggactttcttccgcctggccagacagatccctgttttttgtttttcaaaattcagaaagcatctccgaatatttgcccagaggagtgtgaaacatactttcctggtctttctttcactttgttttatttctgtgtggacaaacaatggggaaaatgccgcgcgtctagccaggcagataagaaaacaactatacccgtcaggcccccaacccggcgccgccataaatggccccggcctcgccattttagttctttttgcgaagtgggctcgtgggttggcagtatgagagttgtaatggcccgactgttgagtgagggggagcaggggatcccaacggcttgcgctgcctttgcgcagcagccggcgggcggccacgtcgcggcctggctggggtaggagagggcggtccccagtgcagttgggtgaactaccgttgcacactggagtttctggtgtctttgcttggaactgacctagctcgtggcagggggaactcggctagcggccccacagcccctgctgactcaaaacaactgagttgtaagacgttcatcgccgtgttatccttgagtaaagaatgaactctggaagcccagccagggacaatgcaccttcacagagattctgcactaatctgagtgaaggtctaaggtttggaatctccccctcatggagagaagctttgtatggctgtcatgcttagacagtgattcctgcaacttgaccttcaggctgggagaggtggagagccatgcctgttctccttccttgctatggaatttgctgacacaatatcttccgcctggtgctgggcatatcctaagaacttacaactttcctgtattatcctgtgtgagcagctgtcaccttattgggggaaaaatgcctgaaaattagggggcacttcaagtagatagcttctatttcctatatttgtcttatatacaagtatttgcttttatcaaaataattccaataaagcattttaaagtaaa

SEQ ID NO: 119286 - DNA, 602 bp, Homo sapiens
  Payload ID: 3366
  Gene Symbol: C6orf48
  Gene Name: chromosome 6 open reading frame 48
  Uniprot ID: Q9UBA6
  ENST ID: ENST00000375641
  CDS Start-End: 277-504
ggagcagcacccggctggcgctggccggccggcgccggggactttcttccgcctggccagacagatccctgttttttgtttttcaaaattcagaaagcatctccgaatatttgcccagaggagtgtgaaacatactttcctggagttgtaagacgttcatcgccgtgttatccttgagtaaagaatgaactctggaagcccagccagggacaatgcaccttcacagagattctgcactaatctgagtgaaggtctaaggtttggaatctccccctcatggagagaagctttgtatggctgtcatgcttagacagtgattcctgcaacttgaccttcaggctgggagaggtggagagccatgcctgttctccttccttgctatggaatttgctgacacaatatcttccgcctggtgctgggcatatcctaagaacttacaactttcctgtattatcctgtgtgagcagctgtcaccttattgggggaaaaatgcctgaaaattagggggcacttcaagtagatagcttctatttcctatatttgtcttatatacaagtatttgcttttatcaaaataattccaataaagcattttaaagtaaa

SEQ ID NO: 119287 - DNA, 962 bp, Homo sapiens
  Payload ID: 3366
  Gene Symbol: C6orf48
  Gene Name: chromosome 6 open reading frame 48
  Uniprot ID: Q9UBA6
  ENST ID: ENST00000375642
  CDS Start-End: 637-864
ttttgcgaagtgggctcgtgggttggcagtatgagagttgtaatggcccgactgttgagtgagggggagcaggggatcccaacggcttgcgctgcctttgcgcagcagccggcgggcggccacgtcgcggcctggctggggtaggagagggcggtccccagtgcagttgggtgaactaccgttgcacactggagtttctggtgtctttgcttggaactgacctagctcgtggcagggggaactcggctagcggccccacagcccctgctgactcaaaacaactgagttgtaagacgttcatcgccgtgttatccttgagtaaagggcgcaatgccaggatctccctgcaacatccaccgtcagggctcaagtggtctttccacctcagcttcctgggactgcaggcacgtgctaccaccacgcctggctaatttttagtttttttacagaagcgggcttttgccatgttgtccaggctggtctctactcctgggctcaagcagtcctcctgcctcagtctcccaaagtgctggaattacagggaatgaactctggaagcccagccagggacaatgcaccttcacagagattctgcactaatctgagtgaaggtctaaggtttggaatctccccctcatggagagaagctttgtatggctgtcatgcttagacagtgattcctgcaacttgaccttcaggctgggagaggtggagagccatgcctgttctccttccttgctatggaatttgctgacacaatatcttccgcctggtgctgggcatatcctaagaacttacaactttcctgtattatcctgtgtgagcagctgtcaccttattgggggaaaaatgcctgaaaattagggggcacttcaagtagatagcttctatttcctatatttgtcttatatacaagtatttgcttttatcaaaataattccaataaagcattttaaagtaaa

SEQ ID NO: 119288 - DNA, 847 bp, Homo sapiens; identical to SEQ ID NO: 119283
  Payload ID: 3366
  Gene Symbol: C6orf48
  Gene Name: chromosome 6 open reading frame 48
  Uniprot ID: Q9UBA6
  ENST ID: ENST00000383383
  CDS Start-End: 522-749

SEQ ID NO: 119289 - DNA, 610 bp, Homo sapiens; identical to SEQ ID NO: 119282
  Payload ID: 3366
  Gene Symbol: C6orf48
  Gene Name: chromosome 6 open reading frame 48
  Uniprot ID: Q9UBA6
  ENST ID: ENST00000383384
  CDS Start-End: 285-512

SEQ ID NO: 119290 - DNA, 712 bp, Homo sapiens; identical to SEQ ID NO: 119284
  Payload ID: 3366
  Gene Symbol: C6orf48
  Gene Name: chromosome 6 open reading frame 48
  Uniprot ID: Q9UBA6
  ENST ID: ENST00000383385
  CDS Start-End: 387-614

SEQ ID NO: 119291 - DNA, 815 bp, Homo sapiens
  Payload ID: 3366
  Gene Symbol: C6orf48
  Gene Name: chromosome 6 open reading frame 48
  Uniprot ID: Q9UBA6
  ENST ID: ENST00000395788
  CDS Start-End: 487-714
taaaggctgggtaacctgactcctcccctcatttctactgcaaaataggagtacactggggcctcccagtggagctgttctctgctgttttaaattactttctactcctccctttctaacgtccactcctggactcatttgttagatcaatatatactgggactgttgtgttttctttgagtgtactagatctctttccagaagagcttcccttgatccagatctccctaattgggaatgatgatttcacagactagagtctccgatgctggtcatgatgtcaaaactaagttctgactcatttagggaactggatacttgggtctccagaagggccaatgggagggccataattctgtttattttcaaattgtcttgttttcaccttgttagaatgaactctggaagcccagccagggacaatgcaccttcacagagattctgcactaatctgagtgaaggtctaaggtttggaatctccccctcatggagagaagctttgtatggctgtcatgcttagacagtgattcctgcaacttgaccttcaggctgggagaggtggagagccatgcctgttctccttccttgctatggaatttgctgacacaatatcttccgcctggtgctgggcatatcctaagaacttacaactttcctgtattatcctgtgtgagcagctgtcaccttattgggggaaaaatgcctgaaaattagggggcacttcaagtagatagcttctatttcctatatttgtcttatatacaagtatttgcttttatcaaaataattccaataaagcattttaaagtaaagaa

SEQ ID NO: 119292 - DNA, 952 bp, Homo sapiens
  Payload ID: 3366
  Gene Symbol: C6orf48
  Gene Name: chromosome 6 open reading frame 48
  Uniprot ID: Q9UBA6
  ENST ID: ENST00000395789
  CDS Start-End: 627-854
ctcgtgggttggcagtatgagagttgtaatggcccgactgttgagtgagggggagcaggggatcccaacggcttgcgctgcctttgcgcagcagccggcgggcggccacgtcgcggcctggctggggtaggagagggcggtccccagtgcagttgggtgaactaccgttgcacactggagtttctggtgtctttgcttggaactgacctagctcgtggcagggggaactcggctagcggccccacagcccctgctgactcaaaacaactgagttgtaagacgttcatcgccgtgttatccttgagtaaagacagggcgcaatgccaggatctccctgcaacatccaccgtcagggctcaagtggtctttccacctcagcttcctgggactgcaggcacgtgctaccaccacgcctggctaatttttagtttttttacagaagcgggcttttgccatgttgtccaggctggtctctactcctgggctcaagcagtcctcctgcctcagtctcccaaagtgctggaattacagggaatgaactctggaagcccagccagggacaatgcaccttcacagagattctgcactaatctgagtgaaggtctaaggtttggaatctccccctcatggagagaagctttgtatggctgtcatgcttagacagtgattcctgcaacttgaccttcaggctgggagaggtggagagccatgcctgttctccttccttgctatggaatttgctgacacaatatcttccgcctggtgctgggcatatcctaagaacttacaactttcctgtattatcctgtgtgagcagctgtcaccttattgggggaaaaatgcctgaaaattagggggcacttcaagtagatagcttctatttcctatatttgtcttatatacaagtatttgcttttatcaaaataattccaataaagcattttaaagtaaa

SEQ ID NO: 119293 - DNA, 585 bp, Homo sapiens
  Payload ID: 3366
  Gene Symbol: C6orf48
  Gene Name: chromosome 6 open reading frame 48
  Uniprot ID: Q9UBA6
  ENST ID: ENST00000400034
  CDS Start-End: 260-487
tctgagtgtgtcgctgatgccatcaccgcagcgctctgaccgccccctcggtccagcatttctcaggctcaacgagttcatggccaagattcctaatcttttgttctgtttcatttccccgttaggagttgtaagacgttcatcgccgtgttatccttgagtaaagaatgaactctggaagcccagccagggacaatgcaccttcacagagattctgcactaatctgagtgaaggtctaaggtttggaatctccccctcatggagagaagctttgtatggctgtcatgcttagacagtgattcctgcaacttgaccttcaggctgggagaggtggagagccatgcctgttctccttccttgctatggaatttgctgacacaatatcttccgcctggtgctgggcatatcctaagaacttacaactttcctgtattatcctgtgtgagcagctgtcaccttattgggggaaaaatgcctgaaaattagggggcacttcaagtagatagcttctatttcctatatttgtcttatatacaagtatttgcttttatcaaaataattccaataaagcattttaaagtaaa

SEQ ID NO: 119294 - DNA, 952 bp, Homo sapiens; identical to SEQ ID NO: 119292
  Payload ID: 3366
  Gene Symbol: C6orf48
  Gene Name: chromosome 6 open reading frame 48
  Uniprot ID: Q9UBA6
  ENST ID: ENST00000400035
  CDS Start-End: 627-854

SEQ ID NO: 119295 - DNA, 962 bp, Homo sapiens; identical to SEQ ID NO: 119287
  Payload ID: 3366
  Gene Symbol: C6orf48
  Gene Name: chromosome 6 open reading frame 48
  Uniprot ID: Q9UBA6
  ENST ID: ENST00000400037
  CDS Start-End: 637-864

SEQ ID NO: 119296 - DNA, 602 bp, Homo sapiens; identical to SEQ ID NO: 119286
  Payload ID: 3366
  Gene Symbol: C6orf48
  Gene Name: chromosome 6 open reading frame 48
  Uniprot ID: Q9UBA6
  ENST ID: ENST00000400038
  CDS Start-End: 277-504

SEQ ID NO: 119297 - DNA, 815 bp, Homo sapiens; identical to SEQ ID NO: 119291
  Payload ID: 3366
  Gene Symbol: C6orf48
  Gene Name: chromosome 6 open reading frame 48
  Uniprot ID: Q9UBA6
  ENST ID: ENST00000400039
  CDS Start-End: 487-714

SEQ ID NO: 119298 - DNA, 815 bp, Homo sapiens; identical to SEQ ID NO: 119291
  Payload ID: 3366
  Gene Symbol: C6orf48
  Gene Name: chromosome 6 open reading frame 48
  Uniprot ID: Q9UBA6
  ENST ID: ENST00000439907
  CDS Start-End: 487-714

SEQ ID NO: 119299 - DNA, 1053 bp, Homo sapiens; identical to SEQ ID NO: 119285
  Payload ID: 3366
  Gene Symbol: C6orf48
  Gene Name: chromosome 6 open reading frame 48
  Uniprot ID: Q9UBA6
  ENST ID: ENST00000414536
  CDS Start-End: 728-955

SEQ ID NO: 119300 - DNA, 602 bp, Homo sapiens; identical to SEQ ID NO: 119286
  Payload ID: 3366
  Gene Symbol: C6orf48
  Gene Name: chromosome 6 open reading frame 48
  Uniprot ID: Q9UBA6
  ENST ID: ENST00000456268
  CDS Start-End: 277-504

SEQ ID NO: 119301 - DNA, 952 bp, Homo sapiens; identical to SEQ ID NO: 119292
  Payload ID: 3366
  Gene Symbol: C6orf48
  Gene Name: chromosome 6 open reading frame 48
  Uniprot ID: Q9UBA6
  ENST ID: ENST00000436558
  CDS Start-End: 627-854

SEQ ID NO: 119302 - DNA, 847 bp, Homo sapiens; identical to SEQ ID NO: 119283
  Payload ID: 3366
  Gene Symbol: C6orf48
  Gene Name: chromosome 6 open reading frame 48
  Uniprot ID: Q9UBA6
  ENST ID: ENST00000423640
  CDS Start-End: 522-749

SEQ ID NO: 119303 - DNA, 847 bp, Homo sapiens; identical to SEQ ID NO: 119283
  Payload ID: 3366
  Gene Symbol: C6orf48
  Gene Name: chromosome 6 open reading frame 48
  Uniprot ID: Q9UBA6
  ENST ID: ENST00000414434
  CDS Start-End: 522-749

SEQ ID NO: 119304 - DNA, 815 bp, Homo sapiens; identical to SEQ ID NO: 119291
  Payload ID: 3366
  Gene Symbol: C6orf48
  Gene Name: chromosome 6 open reading frame 48
  Uniprot ID: Q9UBA6
  ENST ID: ENST00000421039
  CDS Start-End: 487-714

SEQ ID NO: 119305 - DNA, 1053 bp, Homo sapiens
  Payload ID: 3366
  Gene Symbol: C6orf48
  Gene Name: chromosome 6 open reading frame 48
  Uniprot ID: Q9UBA6
  ENST ID: ENST00000450610
  CDS Start-End: 728-955
gctgctgggaaacggcttaggagcagcacccggctggcgctggccggccggcgccggggactttcttccgcctggccagacagatccctgttttttgtttttcaaaattcagaaagcatctccgaatatttgcccagaggagtgtgaaacatacttccctggtctttctttcactttgttttatttctgtgtggacaaacaatggggaaaatgccgcgcgtctagccaggcagataagaaaacaactatacccgtcaggcccccaacccggcgccgccataaatggccccggcctcgccattttagttctttttgcgaagtgggctcgtgggttggcagtatgagagttgtaatggcccgactgttgagtgagggggagcaggggatcccaacggcttgcgctgcctttgcgcagcagccggcgggcggccacgtcgcggcctggctggggtaggagagggcggtccccagtgcagttgggtgaactaccgttgcacactggagtttctggtgtctttgcttggaactgacctagctcgtggcagggggaactcggctagcggccccacagcccctgctgactcaaaacaactgagttgtaagacgttcatcgccgtgttatccttgagtaaagaatgaactctggaagcccagccagggacaatgcaccttcacagagattctgcactaatctgagtgaaggtctaaggtttggaatctccccctcatggagagaagctttgtatggctgtcatgcttagacagtgattcctgcaacttgaccttcaggctgggagaggtggagagccatgcctgttctccttccttgctatggaatttgctgacacaatatcttccgcctggtgctgggcatatcctaagaacttacaactttcctgtattatcctgtgtgagcagctgtcaccttattgggggaaaaatgcctgaaaattagggggcacttcaagtagatagcttctatttcctatatttgtcttatatacaagtatttgcttttatcaaaataattccaataaagcattttaaagtaaa

SEQ ID NO: 119306 - DNA, 962 bp, Homo sapiens; identical to SEQ ID NO: 119287
  Payload ID: 3366
  Gene Symbol: C6orf48
  Gene Name: chromosome 6 open reading frame 48
  Uniprot ID: Q9UBA6
  ENST ID: ENST00000440361
  CDS Start-End: 637-864

SEQ ID NO: 119307 - DNA, 712 bp, Homo sapiens; identical to SEQ ID NO: 119284
  Payload ID: 3366
  Gene Symbol: C6orf48
  Gene Name: chromosome 6 open reading frame 48
  Uniprot ID: Q9UBA6
  ENST ID: ENST00000444331
  CDS Start-End: 387-614

SEQ ID NO: 119308 - DNA, 585 bp, Homo sapiens; identical to SEQ ID NO: 119293
  Payload ID: 3366
  Gene Symbol: C6orf48
  Gene Name: chromosome 6 open reading frame 48
  Uniprot ID: Q9UBA6
  ENST ID: ENST00000426843
  CDS Start-End: 260-487

SEQ ID NO: 119309 - DNA, 712 bp, Homo sapiens; identical to SEQ ID NO: 119284
  Payload ID: 3366
  Gene Symbol: C6orf48
  Gene Name: chromosome 6 open reading frame 48
  Uniprot ID: Q9UBA6
  ENST ID: ENST00000413638
  CDS Start-End: 387-614

SEQ ID NO: 119310 - DNA, 712 bp, Homo sapiens; identical to SEQ ID NO: 119284
  Payload ID: 3366
  Gene Symbol: C6orf48
  Gene Name: chromosome 6 open reading frame 48
  Uniprot ID: Q9UBA6
  ENST ID: ENST00000435938
  CDS Start-End: 387-614

SEQ ID NO: 119311 - DNA, 952 bp, Homo sapiens; identical to SEQ ID NO: 119292
  Payload ID: 3366
  Gene Symbol: C6orf48
  Gene Name: chromosome 6 open reading frame 48
  Uniprot ID: Q9UBA6
  ENST ID: ENST00000436495
  CDS Start-End: 627-854

SEQ ID NO: 119312 - DNA, 962 bp, Homo sapiens; identical to SEQ ID NO: 119287
  Payload ID: 3366
  Gene Symbol: C6orf48
  Gene Name: chromosome 6 open reading frame 48
  Uniprot ID: Q9UBA6
  ENST ID: ENST00000423916
  CDS Start-End: 637-864

SEQ ID NO: 119313 - DNA, 602 bp, Homo sapiens; identical to SEQ ID NO: 119286
  Payload ID: 3366
  Gene Symbol: C6orf48
  Gene Name: chromosome 6 open reading frame 48
  Uniprot ID: Q9UBA6
  ENST ID: ENST00000439865
  CDS Start-End: 277-504

SEQ ID NO: 119314 - DNA, 585 bp, Homo sapiens; identical to SEQ ID NO: 119293
  Payload ID: 3366
  Gene Symbol: C6orf48
  Gene Name: chromosome 6 open reading frame 48
  Uniprot ID: Q9UBA6
  ENST ID: ENST00000416886
  CDS Start-End: 260-487

SEQ ID NO: 119315 - DNA, 602 bp, Homo sapiens
  Payload ID: 3366
  Gene Symbol: C6orf48
  Gene Name: chromosome 6 open reading frame 48
  Uniprot ID: Q9UBA6
  ENST ID: ENST00000433697
  CDS Start-End: 277-504
ggagcagcacccggctggcgctggccggccggcgccggggactttcttccgcctggccagacagatccctgttttttgtttttcaaaattcagaaagcatctccgaatatttgcccagaggagtgtgaaacatacttccctggagttgtaagacgttcatcgccgtgttatccttgagtaaagaatgaactctggaagcccagccagggacaatgcaccttcacagagattctgcactaatctgagtgaaggtctaaggtttggaatctccccctcatggagagaagctttgtatggctgtcatgcttagacagtgattcctgcaacttgaccttcaggctgggagaggtggagagccatgcctgttctccttccttgctatggaatttgctgacacaatatcttccgcctggtgctgggcatatcctaagaacttacaactttcctgtattatcctgtgtgagcagctgtcaccttattgggggaaaaatgcctgaaaattagggggcacttcaagtagatagcttctatttcctatatttgtcttatatacaagtatttgcttttatcaaaataattccaataaagcattttaaagtaaa

SEQ ID NO: 119316 - DNA, 952 bp, Homo sapiens; identical to SEQ ID NO: 119292
  Payload ID: 3366
  Gene Symbol: C6orf48
  Gene Name: chromosome 6 open reading frame 48
  Uniprot ID: Q9UBA6
  ENST ID: ENST00000443974
  CDS Start-End: 627-854

SEQ ID NO: 119317 - DNA, 1053 bp, Homo sapiens; identical to SEQ ID NO: 119285
  Payload ID: 3366
  Gene Symbol: C6orf48
  Gene Name: chromosome 6 open reading frame 48
  Uniprot ID: Q9UBA6
  ENST ID: ENST00000444974
  CDS Start-End: 728-955

SEQ ID NO: 119318 - DNA, 610 bp, Homo sapiens; identical to SEQ ID NO: 119282
  Payload ID: 3366
  Gene Symbol: C6orf48
  Gene Name: chromosome 6 open reading frame 48
  Uniprot ID: Q9UBA6
  ENST ID: ENST00000421605
  CDS Start-End: 285-512

SEQ ID NO: 119319 - DNA, 610 bp, Homo sapiens; identical to SEQ ID NO: 119282
  Payload ID: 3366
  Gene Symbol: C6orf48
  Gene Name: chromosome 6 open reading frame 48
  Uniprot ID: Q9UBA6
  ENST ID: ENST00000458514
  CDS Start-End: 285-512

SEQ ID NO: 119320 - DNA, 815 bp, Homo sapiens
  Payload ID: 3366
  Gene Symbol: C6orf48
  Gene Name: chromosome 6 open reading frame 48
  Uniprot ID: Q9UBA6
  ENST ID: ENST00000436205
  CDS Start-End: 487-714
taaaggctgggtaacctgactcctcccctcatttctactgcaaaataggagtacactggggcctcccagtggagctgttctctgctgttttaaattactttctactcctccctttctaacgtccactcctggactcatttgttagatcaatatatactgggactgttgtgttttctttgagtgtactagatctctttccagaagagcttcccttgatccagatctccctaattgggaatgatgatttcacagactagagtctccgatgctggtcatgatgtcaaaactaagttctgactcatttagggaactggatacttgggtctccagaagggccaatgggagggccataattctgtttattttcaaattgtcttgttttcaccttgttagaatgaactctggaagcccagccagggacaatgcaccttcacagagattctgcactaatctgagtgaaggtctaaggtttggaatctccccctcatggagagaagctttgtatggctgtcatgcttagacagtgattcctgcaacttgaccttcaggctgggagaggtggagagccatgcctgttctccttccttgctatggaatttgctgacacaatatcttccgcctggtgctgggcatatcctaagaacttacaactttcctgtattatcctgtgtgagcagctgtcaccttattgggggaaaaatgcctgaaaattagggggcacttcaagtagatagcttctatttcctatatttgtcttatatacaagtatttgcttttatcaaaataattccaataaagcattttaaagtaaagga

SEQ ID NO: 119321 - DNA, 962 bp, Homo sapiens; identical to SEQ ID NO: 119287
  Payload ID: 3366
  Gene Symbol: C6orf48
  Gene Name: chromosome 6 open reading frame 48
  Uniprot ID: Q9UBA6
  ENST ID: ENST00000430690
  CDS Start-End: 637-864

SEQ ID NO: 119322 - DNA, 847 bp, Homo sapiens; identical to SEQ ID NO: 119283
  Payload ID: 3366
  Gene Symbol: C6orf48
  Gene Name: chromosome 6 open reading frame 48
  Uniprot ID: Q9UBA6
  ENST ID: ENST00000433752
  CDS Start-End: 522-749

SEQ ID NO: 119323 - DNA, 585 bp, Homo sapiens; identical to SEQ ID NO: 119293
  Payload ID: 3366
  Gene Symbol: C6orf48
  Gene Name: chromosome 6 open reading frame 48
  Uniprot ID: Q9UBA6
  ENST ID: ENST00000456690
  CDS Start-End: 260-487

SEQ ID NO: 119324 - DNA, 1053 bp, Homo sapiens; identical to SEQ ID NO: 119285
  Payload ID: 3366
  Gene Symbol: C6orf48
  Gene Name: chromosome 6 open reading frame 48
  Uniprot ID: Q9UBA6
  ENST ID: ENST00000424962
  CDS Start-End: 728-955

SEQ ID NO: 119325 - DNA, 610 bp, Homo sapiens; identical to SEQ ID NO: 119282
  Payload ID: 3366
  Gene Symbol: C6orf48
  Gene Name: chromosome 6 open reading frame 48
  Uniprot ID: Q9UBA6
  ENST ID: ENST00000444192
  CDS Start-End: 285-512

SEQ ID NO: 119326 - DNA, 748 bp, Homo sapiens
  Payload ID: 3366
  Gene Symbol: C6orf48
  Gene Name: chromosome 6 open reading frame 48
  Uniprot ID: Q9UBA6
  ENST ID: ENST00000550492
  CDS Start-End: 418-645
gcgaagtgggctcgtgggttggcagtatgagagttgtaatggcccgactgttgagtgagggggagcaggggatcccaacggcttgcgctgcctttgcgcagcagccggcgggcggccacgtcgcggcctggctggggtaggagagggcggtccccagtgcagttgggtgaactaccgttgcacactggagtttctggtgtctttgcttggaactgacctagctcgtggcagggggaactcggctagcggccccacagcccctgctgactcaaaacaactgagttgtaagacgttcatcgccgtgttatccttgagtaaaggtgaaatgaactctggaagcccagccagggacaatgcaccttcacagagattctgcactaatctgagtgaaggtctaaggtttggaatctccccctcatggagagaagctttgtatggctgtcatgcttagacagtgattcctgcaacttgaccttcaggctgggagaggtggagagccatgcctgttctccttccttgctatggaatttgctgacacaatatcttccgcctggtgctgggcatatcctaagaacttacaactttcctgtattatcctgtgtgagcagctgtcaccttattgggggaaaaatgcctgaaaattagggggcacttcaagtagatagcttctatttcctatatttgtcttatatacaagtatttgcttttatcaaaataattccaataaagcattttaaagtaaagaaga

SEQ ID NO: 119327 - DNA, 748 bp, Homo sapiens; identical to SEQ ID NO: 119326
  Payload ID: 3366
  Gene Symbol: C6orf48
  Gene Name: chromosome 6 open reading frame 48
  Uniprot ID: Q9UBA6
  ENST ID: ENST00000550685
  CDS Start-End: 418-645

SEQ ID NO: 119328 - DNA, 748 bp, Homo sapiens; identical to SEQ ID NO: 119326
  Payload ID: 3366
  Gene Symbol: C6orf48
  Gene Name: chromosome 6 open reading frame 48
  Uniprot ID: Q9UBA6
  ENST ID: ENST00000549426
  CDS Start-End: 418-645

SEQ ID NO: 119329 - DNA, 748 bp, Homo sapiens
  Payload ID: 3366
  Gene Symbol: C6orf48
  Gene Name: chromosome 6 open reading frame 48
  Uniprot ID: Q9UBA6
  ENST ID: ENST00000552514
  CDS Start-End: 418-645
gcgaagtgggctcgtgggttggcagtatgagagttgtaatggcccgactgttgagtgagggggagcaggggatcccaacggcttgcgctgcctttgcgcagcagccggcgggcggccacgtcgcggcctggctggggtaggagagggcggtccccagtgcagttgggtgaactaccgttgcacactggagtttctggtgtctttgcttggaactgacctagctcgtggcagggggaactcggctagcggccccacagcccctgctgactcaaaacaactgagttgtaagacgttcatcgccgtgttatccttgagtaaaggtgaaatgaactctggaagcccagccagggacaatgcaccttcacagagattctgcactaatctgagtgaaggtctaaggtttggaatctccccctcatggagagaagctttgtatggctgtcatgcttagacagtgattcctgcaacttgaccttcaggctgggagaggtggagagccatgcctgttctccttccttgctatggaatttgctgacacaatatcttccgcctggtgctgggcatatcctaagaacttacaactttcctgtattatcctgtgtgagcagctgtcaccttattgggggaaaaatgcctgaaaattagggggcacttcaagtagatagcttctatttcctatatttgtcttatatacaagtatttgcttttatcaaaataattccaataaagcattttaaagtaaaggaga

SEQ ID NO: 119330 - DNA, 748 bp, Homo sapiens; identical to SEQ ID NO: 119326
  Payload ID: 3366
  Gene Symbol: C6orf48
  Gene Name: chromosome 6 open reading frame 48
  Uniprot ID: Q9UBA6
  ENST ID: ENST00000614363
  CDS Start-End: 418-645

SEQ ID NO: 119331 - DNA, 619 bp, Homo sapiens
  Payload ID: 3367
  Gene Symbol: C6orf52
  Gene Name: chromosome 6 open reading frame 52
  Uniprot ID: Q5T4I8
  ENST ID: ENST00000259983
  CDS Start-End: 125-583
cggttgcttaggggctgtagcgccggcagcgtgcattgttgtgggctgtgtactagtagggtaggagtttttgttcagggaccagcggaacgaggctttctgtcgttaataggtttctgggtaaatggcccaaccagagagttctgcagattttggcatagctcaacaaaataactattactgctactggcaaagtctcccctctgctattagagtgaagcaggagttccagcccagccagagttaccgctatggcaactggtatgcgcgacagcacggctcttaccttctttctggctacagctatggctgtgcagtggatggaaatggaaaggactgtttttctgcgcatgagacccctgaacacacagctggaactctggttatgcctaaggaaaccacacctctagctgaaaaccaagatgaagacccactagaagatccacatcttcatttgaatattgaggaatcaaaccaagagtttatggtgaaaagtgaagaactctacgactccctcatgaattgccactggcagcctctggacacagttcactccgaaatcccagatgagaccccgaagtgaagcaaggtgttcattaaactccgcaattatcatact

SEQ ID NO: 119332 - DNA, 430 bp, Homo sapiens
  Payload ID: 3367
  Gene Symbol: C6orf52
  Gene Name: chromosome 6 open reading frame 52
  Uniprot ID: Q5T4I8
  ENST ID: ENST00000379586
  CDS Start-End: 199-396
ggccggttgcttaggggctgtagcgccggcagcgtgcattgttgtgggctgtgtactagtagggtaggagtttttgttcagggaccagcggaacgaggctttctgtcgttaataggctatggctgtgcagtggatggaaatggaaaggactgtttttctgcgcatgagacccctgaacacacagctggaactctggttatgcctaaggaaaccacacctctagctgaaaaccaagatgaagacccactagaagatccacatcttcatttgaatattgaggaatcaaaccaagagtttatggtgaaaagtgaagaactctacgactccctcatgaattgccactggcagcctctggacacagttcactccgaaatcccagatgagaccccgaagtgaagcaaggtgttcattaaactccgcaattatcata

SEQ ID NO: 119333 - DNA, 493 bp, Homo sapiens
  Payload ID: 3367
  Gene Symbol: C6orf52
  Gene Name: chromosome 6 open reading frame 52
  Uniprot ID: Q5T4I8
  ENST ID: ENST00000426700
  CDS Start-End: 1-459
atggcccaaccagagagttctgcagattttggcatagctcaacaaaataactattactgctactggcaaagtctcccctctgctattagagtgaagcaggagttccagcccagccagagttaccgctatggcaactggtatgcgcgacagcacggctcttaccttctttctggctacagctatggctgtgcagtggatggaaatggaaaggactgtttttctgcgcatgagacccctgaacacacagctggaactctggttatgcctaaggaaaccacacctctagctgaaaaccaagatgaagacccactagaagatccacatcttcatttgaatattgaggaatcaaaccaagagtttatggtgaaaagtgaagaactctacgactccctcatgaattgccactggcagcctctggacacagttcactccgaaatcccagatgagaccccgaagtgaagcaaggtgttcattaaactccgcaattatcata

SEQ ID NO: 119334 - DNA, 541 bp, Homo sapiens
  Payload ID: 3367
  Gene Symbol: C6orf52
  Gene Name: chromosome 6 open reading frame 52
  ENST ID: ENST00000460742
  CDS Start-End: 312-503
ttcagggaccagcggaacgaggctttctgtcgttaataggtctcccctctgctattagagtgaagcaggagttccagcccagccagagttaccgctatggcaactggtatgcgcgacagcacggctcttaccttctttctggctacagctatggctgtgcagtggatggaaatggaaaggactgtttttctgcgcatgagacccctgaacacacagctggaactctggttatgcctaagtgaccccctgtgccatctgcctgccatcctgctgggtgtcccctgttgggaagctgctgagtgaaattaaagatggaaaccacacctctagctgaaaaccaagatgaagacccactagaagatccacatcttcatttgaatattgaggaatcaaaccaagagtttatggtgaaaagtgaagaactctacgactccctcatgaattgccactggcagcctctggacacagttcactccgaaatcccagatgagaccccgaagtgaagcaaggtgttcattaaactccgcaattatcatactaa

SEQ ID NO: 119335 - DNA, 682 bp, Homo sapiens
  Payload ID: 3367
  Gene Symbol: C6orf52
  Gene Name: chromosome 6 open reading frame 52
  ENST ID: ENST00000503680
  CDS Start-End: 367-648
gattttccaagaagagaataagtaaagatgccacatgaggaggttctcactgcaaggagaaaaaaatcgggggcaagcaggcatatctcaggaagtctcccctctgctattagagtgaagcaggagttccagcccagccagagttaccgctatggcaactggtatgcgcgacagcacggctcttaccttctttctggctacagctatggctgtgcagtggatggaaatggaaaggactgtttttctgcgcatgagacccctgaacacacagctggaactctggttatgcctaagtgaccccctgtgccatctgcctgccatcctgctgggtgtcccctgttgggaagctgctgagtgaaattaaagatggaaaccacacctctagctgaaaaccaagatgaagacccactagaagtgacgtctcagtatgttgcccaggctgatctcaaactcccagatttaagcaattcactggtctcagcttcccaaagtgttggggttacagatccacatcttcatttgaatattgaggaatcaaaccaagagtttatggtgaaaagtgaagaactctacgactccctcatgaattgccactggcagcctctggacacagttcactccgaaatcccagatgagaccccgaagtgaagcaaggtgttcattaaactccgcaattatcata

SEQ ID NO: 119336 - DNA, 1200 bp, Homo sapiens
  Payload ID: 3368
  Gene Symbol: C6orf58
  Gene Name: chromosome 6 open reading frame 58
  Uniprot ID: Q6P5S2
  ENST ID: ENST00000329722
  CDS Start-End: 13-1005
agctctggcacaatggcttttcttccttcctgggtttgtgtactagttggttccttttctgcttccttagcagggacttccaatctctcagagacagagccccctctgtggaaggagagtcctggtcagctcagtgactacagggtggagaacagcatgtacattattaatccctgggtataccttgagagaatggggatgtataaaatcatattgaatcagacagccaggtattttgcaaaatttgcaccagataatgaacagaatattttatgggggttgcctctgcagtatggctggcaatataggacaggcagattagctgatccaacccgaaggacaaactgtggctatgaatctggagatcatatgtgcatctctgtggacagttggtgggctgatttgaattattttctgtcttcattaccctttcttgctgcggttgattctggtgtaatggggatatcatcagaccaagtcaggcttttgcccccacccaagaatgagaggaagttttgttatgatgtttctagctgtcgttcatccttccctgagacaatgaacaagtggaacaccttttaccagtatttgcagtcaccttttagtaagtttgatgatctgttgaagtacttatgggctgcacacacttcaaccttggcagataatatcaaaagttttgaagacagatatgattattattctaaagcagaagcgcattttgagagaagttgggtactggctgtggatcatttagctgcagtcctctttcctacaaccttgattagatcatataagttccagaagggcatgccaccacgaattcttcttaatactgatgtagcccctttcatcagtgactttactgcttttcagaatgtagtcctggttcttctaaatatgcttgacaatgtggataaatctataggttatctttgtacagaaaaatctaatgtatatagagatcattcggaatctagctctagaagttatggaaataactcctgaaacatttaacttcaaacttcaggaaatgattaatgaattaaaaatgaaaaactcgaacttgacaatcagtaatttcaaaaaattaatgtcatcatgaccatgtagtttattctttctgatatttttgatttatgcttatttgttaagatcttgtacatgtattaaaaacttaaattaaatgcattcaagttaaaa

SEQ ID NO: 119337 - DNA, 741 bp, Homo sapiens
  Payload ID: 3369
  Gene Symbol: C6orf62
  Gene Name: chromosome 6 open reading frame 62
  Uniprot ID: Q9GZU0
  ENST ID: ENST00000378102
  CDS Start-End: 98-700
atattaacacaattattttctttttttcccccactgaaccttcccatttaccctctcccgcccactccacccgggcgggaattgtttccacgatgaaatgagtgaaaacctgagtgatcctgtgtctcccgtggtgcgaaagaaaaagtcagcactttttgaagtgtctgaggttataccagtcatgacaaataattatgaagaaaatatcctgaaaggtgtgcgagattccagctattccttggaaagttccctagagcttttacagaaggatgtggtacagctccatgctcctcgatatcagtctatgagaagggatgtaattggctgtactcaggagatggatttcattctttggcctcggaatgatattgaaaaaatcgtctgtctcctgttttctaggtggaaagaatctgatgagccttttaggcctgttcaggccaaatttgagtttcatcatggtgactatgaaaaacagtttctgcatgtactgagccgcaaggacaagactggaatcgttgtcaacaatcctaaccagtcagtgtttctcttcattgacagacagcacttgcagactccaaaaaacaaagctacaatcttcaagttatgcagcatctgcctctacctgccacaggaacagctcacccactgggcagttggcaccatagaggatcacctccgtccttatatgccagagtagagtactgaccagcaaaatggagaagatcagagaatgcagca

SEQ ID NO: 119338 - DNA, 4134 bp, Homo sapiens
  Payload ID: 3369
  Gene Symbol: C6orf62
  Gene Name: chromosome 6 open reading frame 62
  Uniprot ID: Q9GZU0
  ENST ID: ENST00000378119
  CDS Start-End: 2169-2858
aaacgcgactctgccccggacccgcgaggcgcccgaggccttcgccgcttctgcagccaccggcgggggggggaacgaggcagtactgccgcggacgctcaccaaccgcttcggcttttcccccctccgggtctcctcgacctttcctgagagccggaatccgactgtagggggaagaaagactcaagagcagatgcttgaactgaaataactttattttggggggttactttgctgacccttagcgcagggcttcctttcccttccccctccgccgccagtaccaatccaactccccatctttctctttgtttttcctctttttctttttctctccctgttgccgctgtctccgcgtccttcccctccgttgccgcccagggcgccgagccagactatgggtcccaggtgggggctgagcggcggcagcagcgcgggcggtccagtcacggtgcgcactgcagcggggatggaggggctcagttggctggtggttttctcttgacatggctcctgcccgtgctaccagcagcgcccccgccgccgccgcctcttccgccgccgccaccgctccgcccgcaggctgcggctagagggcccaaaccccgccctagagtcggtccgtgagtcccgggctccgcggggacagggaggggatttccccgtcacccaccccgccctagctgcctcaattccaccccctgcccctcgggaaacaactaacgaccccaccctaaacaatccaaactctggaaacatggtctgttcaacgtgagagagagctaatccgggaacttaattttttggggggagggtgggtgggcttactttagaagtaatattaacacaattattttctttttttcccccactgaaccttcccatttaccctctcccgcccactccacccgggcgggaattgtttccacgatgaaatgagtgaaaacctgagtgatcctgtgtctcccgtggtgcgagtgagtcgctgccgctgaaggcaaggggtgggggtgggacctgcgggggtggaaggcaggtggtctccgggcaccgcctgggatttgggagaagaacccgccacctttgcctcggcaatgctcacaagaagataaatcgcactccccaccattttgaacgggggcagatccacagggaagtctcccttggggaatgtaggactagttgcaggctgggggtgttgggaacccgggcattaatcaggtctaaccacagagccggaataattaataccgtattatataccccttttccttctgccgtcatgattctccttggcagcagcgttagcagccgcctgagggtgaaaatgtgggtgatggggaagttggtaatgactccgctgttttttctcatggctcctttgggccacagctgcccgcccccggtatacactgtagttgattgcagggaaaccctgtacctctccctttccttctctaccgattttgcacttttctctatgctcaccaccaagtgtaatcaataacaagcactgacaatacatagcaatagtgaaatctgaaataactaagaattaggtactacagccatggagctggctgggtaaaatctaattggatatttcagtttcattcacctaccctgttttggtgtttggttttggttttggttttggtgagttttttttttttttttttttggaaagcaaggatcacacttccccctccctgttccttaatcccttttctaaaaaggggggaaaatccggatggattttagggattggtctggtgtcagctgtgttttattgcacacctaaatcctgattataggcttttcatttctccgcaaagcctttattttggcagttaagccaaatgtgttttccagaaagttagttattttctcctctttctttcctttctttcctccctttttcccgtctgaccccaaacgttattgtccaaacatgactggacagcagcttttgtttcttgaccctgtaatatgacagtctgctaatattgacagaaggtgcagtttttgggttatagtcgtgattttcgctaatcaatcatattagcaggaaaaaaaatgacttgtttctgttgtacttgagtcttaagaaaaagtgcccatagtttagtgacaatttccaaaggctttagtaccacctgtatttcaaaatgggggacccaaactcccggaagaaacaagctctgaacagactacgtgctcagcttagaaagaaaaaagaatctctagctgaccagtttgacttcaagatgtatattgcctttgtattcaaggagaagaagaaaaagtcagcactttttgaagtgtctgaggttataccagtcatgacaaataattatgaagaaaatatcctgaaaggtgtgcgagattccagctattccttggaaagttccctagagcttttacagaaggatgtggtacagctccatgctcctcgatatcagtctatgagaagggatgtaattggctgtactcaggagatggatttcattctttggcctcggaatgatattgaaaaaatcgtctgtctcctgttttctaggtggaaagaatctgatgagccttttaggcctgttcaggccaaatttgagtttcatcatggtgactatgaaaaacagtttctgcatgtactgagccgcaaggacaagactggaatcgttgtcaacaatcctaaccagtcagtgtttctcttcattgacagacagcacttgcagactccaaaaaacaaagctacaatcttcaagttatgcagcatctgcctctacctgccacaggaacagctcacccactgggcagttggcaccatagaggatcacctccgtccttatatgccagagtagagtactgaccagcaaaatggagaagatcagagaatgcagcagcagttttttttcttgttttcttaccactttattctttcagagtttaaagaaaatggactcatgcacagaacactatgcattttgaaacttgttcatcctggatttttttaaatcatttttatctcagaacttaaacaaaaattagatgtcgtgcacggactgtgtgaaagaagatgctttgcatatttgctgcactgcatcagtatcttactaaaaatgtgaaatgaaaggactattgtacactgaaatgcttaaatgtatctgaaagcacaaggtgatactcatttttatggtcttcccatttgtgctggtttttgcctctttgacatctgtcatcagtatttagagggtgagaagtgaatgtaacaggtataaataacatttttaaaaacaataactttgctataatcacagttgttccagagcactgtcagatacattctaatgaccagaactggtttaaaaaaagaaaatacaaccatgggaaagaaatcttaaatgaaaaacgcatctcattgtaggcatttttgcctcatattttactgggccatgtttgtttcctggtactcatgtattttttttttccagatctctttccccaagttgctattgtaagagtattctgctgcgtgtggatgcagttatacacattaaagcagatctggagtctgaagtagctataaagcagctataaaacagaaatacatgcatagctgcagaaaccatgataggtagaggacttttcttttggttttgttttgttttgttttgttttgtttttggttttacagagaagagatttttattacaaagaaaaaaattccagtgaattgtgcagaaatgctggtttttacaccatcctaaagaaaaactttacaagggtgttttggagtagaaaaaaggttataaagttggaatcttaaattgtaaaattaaccattgagtgtcaaagttctaaaagcagaactcattttgtgcaatgaacataaggaaagactactgtataggtttttttttttttctccttttaaatgaagaaaagctttgcttaagggttgcatacttttattggagtaaatctgaatgatcctactcctttggagtaaaactagtgcttaccagtttccaattgtatttagcttctggttggaatttgaaaaaaaaagaaaaaaagaaaaagaaaacctaaataaaataggtgaaagttccctgactattcaggtgaatacacaaa

SEQ ID NO: 119339 - DNA, 1309 bp, Homo sapiens
  Payload ID: 3370
  Gene Symbol: C6orf89
  Gene Name: chromosome 6 open reading frame 89
  Uniprot ID: Q6UWU4
  ENST ID: ENST00000355190
  CDS Start-End: 164-1228
gaagcgctggacgagaggaggaattactctagggtacaaggcctcgcccaggagtggggggttgcttccgggtcgcgctcccggaaacaggaagttgcccatcctcctcgcccggcggcagctgtccccgaggcgggaggagcccgaggggcgcgagccccgcatggattttatattggaagacatggatcttgctgccaacgagatcagcatttatgacaaactttcagagactgttgatttggtgagacagaccggccatcagtgtggcatgtcagagaaggcaattgaaaaatttatcagacagctgctggaaaagaatgaacctcagagaccccccccgcagtatcctctccttatagttgtgtataaggttctcgcaaccttgggattaatcttgctcactgcctactttgtgattcaacctttcagcccattagcacctgagccagtgctttctggagctcacacctggcgctcactcatccatcacattaggctgatgtccttgcccattgccaagaagtacatgtcagaaaataagggagttcctctgcatgggggtgatgaagacagaccctttccagactttgacccctggtggacaaacgactgtgagcagaatgagtcagagcccattcctgccaactgcactggctgtgcccagaaacacctgaaggtgatgctcctggaagacgccccaaggaaatttgagaggctccatccactggtgatcaagacgggaaagcccctgttggaggaagagattcagcattttttgtgccagtaccctgaggcgacagaaggcttctctgaagggtttttcgccaagtggtggcgctgctttcctgagcggtggttcccatttccttatccatggaggagacctctgaacagatcacaaatgttacgtgagctttttcctgttttcactcacctgccatttccaaaagatgcctctttaaacaagtgctcctttcttcacccagaacctgttgtggggagtaagatgcataagatgcctgacctatttatcattggcagcggtgaggccatgttgcagctcatccctcccttccagtgccgaagacattgtcagtctgtggccatgccaatagagccaggggatatcggctatgtcgacaccacccactggaaggtctacgttatagccagaggggtccagcctttggtcatctgcgatggaaccgctttctcagaactgtaggaaatagaactgtgcacaggaacagcttccagagccgaaaaccaggttgaaaggggaaaaataaaaacaaaaacgatgaaa

SEQ ID NO: 119340 - DNA, 2565 bp, Homo sapiens
  Payload ID: 3370
  Gene Symbol: C6orf89
  Gene Name: chromosome 6 open reading frame 89
  ENST ID: ENST00000359359
  CDS Start-End: 726-1451
atgctgcagagggagaggacaacagctccagtaaacaaaaaggtcagggcagacaggagtattatggaactgctccaggactcttgattttcaagcttatggtgtcaggaatgggatctaaagtggagcttctagcgacccccaggagcactgagtgaacatgcaaggtacctgcaggatccacttgtgtctattgatctctcacagcagctggggatcacagaacctgcagattggatcgtctgagaacaccagagaaagagaaagactgtccttgccatccacactacagcaaaactttggagctttaaaccttgggttcataatctcacagctgagaagggtccctccacactcctggaactgtacatccattggaacccttaagggattttatattggaagacatggatcttgctgccaacgagatcagcatttatgacaaactttcagagactgttgatttggtgagacagaccggccatcagtgtggcatgtcagagaaggcaattgaaaaatttatcagacagctgctggaaaagaatgaacctcagagaccccccccgcagtatcctctccttatagttgtgtataaggttctcgcaaccttgggattaatcttgctcactgcctactttgtgattcaacctttcagcccattagcacctgagccagtgctttctggagctcacacctggcgctcactcatccatcacattaggctgatgtccttgcccattgccaagaagtacatgtcagaaaataagggagttcctctgcatgggggtgatgaagacagaccctttccagactttgacccctggtggacaaacgactgtgagcagaatgagtcagagcccattcctgccaactgcactggctgtgcccagaaacacctgaaggtgatgctcctggaagacgccccaaggaaatttgagaggctccatccactggtgatcaagacgggaaagcccctgttggaggaagagattcagcattttttgtgccagtaccctgaggcgacagaaggcttctctgaagggtttttcgccaagtggtggcgctgctttcctgagcggtggttcccatttccttatccatggaggagacctctgaacagatcacaaatgttacgtgagctttttcctgttttcactcacctgccatttccaaaagatgcctctttaaacaagtgctcctttcttcacccagaacctgttgtggggagtaagatgcataagatgcctgacctatttatcattggcagcggtgaggccatgttgcagctcatccctcccttccagtgccgaagacattgtcagtctgtggccatgccaatagagccaggggatatcggctatgtcgacaccacccactggaaggtctacgttatagccagaggggtccagcctttggtcatctgcgatggaaccgctttctcagaactgtaggaaatagaactgtgcacaggaacagcttccagagccgaaaaccaggttgaaaggggaaaaataaaaacaaaaacgatgaaactgctttctgggggttggttacttagttacctgccctttgcatgcatgtgtgaaccagctgtgagctgcaaggcagtggccagagcctcgccctcctgactcttcctgcaggtggctcaggaaggattcagcctggccacttggctaggactctgccagcacccatctgagactgacctcttccgggcctttggacactatgaccttgatgctgcccttcaggcaggaaacagggctggtgcctttcttcacctgcatggccagcttccttccctggcagtggagagggcagccaacaggttctaatgtcagagccatcctttaccaggtgggcctgcttgtccctgtcttgcctgccacatcactctactttttggaaggccatggctgattaaagaagttcttgtagtttcccaagcaaagtggaatctagaaacagtgaaaaaagttcagataactttgaattgcattcaagaagtacacttctttcccattgtccgtggctcttggagtctccgtgatgccaggctagagtctgattatataataattcaaaatggtaactcccaaggtaatgctttcttccatttcatcaggttcttttatccccactgcaccccctccccttctcccttgcctatctggatggcttctcagaagctcggccctagtcctccctgccttggcggggccagagcccactactgctgaggcagcactgctctcgtcagctgtgttgcctttaccaagtgtcttcagagggttatgagttagagtagctggcctggggagagggtgcctccctgggtttgatctttagggtctgactttctgcagagaagatgttttacagatgtgtcaaagctgatgtaatgtggttgggggaggaaatccagacccaaagtgtttgtcagctgggtgtacaactgcctatgtgatcctctgtcttaaaatgatttctgtctgtgctgcgaaacaaagacaaggtgaggtgtttttcttttttgtaataatataaagctgtgtgtttctg

SEQ ID NO: 119341 - DNA, 1400 bp, Homo sapiens
  Payload ID: 3370
  Gene Symbol: C6orf89
  Gene Name: chromosome 6 open reading frame 89
  Uniprot ID: Q6UWU4
  ENST ID: ENST00000373685
  CDS Start-End: 276-1319
gaagcgctggacgagaggaggaattactctagggtacaaggcctcgcccaggagtggggggttgcttccgggtcgcgctcccggaaacaggaagttgcccatcctcctcgcccggcggcagctgtccccgaggcgggaggagcccgaggggcgcgagccccgcatgtctatgccactgttagaatcaggctaactcttcagaacttccccctgtagcaaagctcactttggccagagttggaactactttctgcagggattttatattggaagacatggatcttgctgccaacgagatcagcatttatgacaaactttcagagactgttgatttggtgagacagaccggccatcagtgtggcatgtcagagaaggcaattgaaaaatttatcagacagctgctggaaaagaatgaacctcagagaccccccccgcagtatcctctccttatagttgtgtataaggttctcgcaaccttgggattaatcttgctcactgcctactttgtgattcaacctttcagcccattagcacctgagccagtgctttctggagctcacacctggcgctcactcatccatcacattaggctgatgtccttgcccattgccaagaagtacatgtcagaaaataagggagttcctctgcatgggggtgatgaagacagaccctttccagactttgacccctggtggacaaacgactgtgagcagaatgagtcagagcccattcctgccaactgcactggctgtgcccagaaacacctgaaggtgatgctcctggaagacgccccaaggaaatttgagaggctccatccactggtgatcaagacgggaaagcccctgttggaggaagagattcagcattttttgtgccagtaccctgaggcgacagaaggcttctctgaagggtttttcgccaagtggtggcgctgctttcctgagcggtggttcccatttccttatccatggaggagacctctgaacagatcacaaatgttacgtgagctttttcctgttttcactcacctgccatttccaaaagatgcctctttaaacaagtgctcctttcttcacccagaacctgttgtggggagtaagatgcataagatgcctgacctatttatcattggcagcggtgaggccatgttgcagctcatccctcccttccagtgccgaagacattgtcagtctgtggccatgccaatagagccaggggatatcggctatgtcgacaccacccactggaaggtctacgttatagccagaggggtccagcctttggtcatctgcgatggaaccgctttctcagaactgtaggaaatagaactgtgcacaggaacagcttccagagccgaaaaccaggttgaaaggggaaaaataaaaacaaaaacgatgaaa

SEQ ID NO: 119342 - DNA, 6861 bp, Homo sapiens
  Payload ID: 3370
  Gene Symbol: C6orf89
  Gene Name: chromosome 6 open reading frame 89
  Uniprot ID: Q6UWU4
  ENST ID: ENST00000480824
  CDS Start-End: 295-1338
gttttgggcggaagcgctggacgagaggaggaattactctagggtacaaggcctcgcccaggagtggggggttgcttccgggtcgcgctcccggaaacaggaagttgcccatcctcctcgcccggcggcagctgtccccgaggcgggaggagcccgaggggcgcgagccccgcatgaatcattgtagtcaatcattttccagttctcagccgctcagttgtgatcaagggacacgtggtttccgaactgccagctcagaataggaaaataacttgggattttatattggaagacatggatcttgctgccaacgagatcagcatttatgacaaactttcagagactgttgatttggtgagacagaccggccatcagtgtggcatgtcagagaaggcaattgaaaaatttatcagacagctgctggaaaagaatgaacctcagagaccccccccgcagtatcctctccttatagttgtgtataaggttctcgcaaccttgggattaatcttgctcactgcctactttgtgattcaacctttcagcccattagcacctgagccagtgctttctggagctcacacctggcgctcactcatccatcacattaggctgatgtccttgcccattgccaagaagtacatgtcagaaaataagggagttcctctgcatgggggtgatgaagacagaccctttccagactttgacccctggtggacaaacgactgtgagcagaatgagtcagagcccattcctgccaactgcactggctgtgcccagaaacacctgaaggtgatgctcctggaagacgccccaaggaaatttgagaggctccatccactggtgatcaagacgggaaagcccctgttggaggaagagattcagcattttttgtgccagtaccctgaggcgacagaaggcttctctgaagggtttttcgccaagtggtggcgctgctttcctgagcggtggttcccatttccttatccatggaggagacctctgaacagatcacaaatgttacgtgagctttttcctgttttcactcacctgccatttccaaaagatgcctctttaaacaagtgctcctttcttcacccagaacctgttgtggggagtaagatgcataagatgcctgacctatttatcattggcagcggtgaggccatgttgcagctcatccctcccttccagtgccgaagacattgtcagtctgtggccatgccaatagagccaggggatatcggctatgtcgacaccacccactggaaggtctacgttatagccagaggggtccagcctttggtcatctgcgatggaaccgctttctcagaactgtaggaaatagaactgtgcacaggaacagcttccagagccgaaaaccaggttgaaaggggaaaaataaaaacaaaaacgatgaaactgctttctgggggttggttacttagttacctgccctttgcatgcatgtgtgaaccagctgtgagctgcaaggcagtggccagagcctcgccctcctgactcttcctgcaggtggctcaggaaggattcagcctggccacttggctaggactctgccagcacccatctgagactgacctcttccgggcctttggacactatgaccttgatgctgcccttcaggcaggaaacagggctggtgcctttcttcacctgcatggccagcttccttccctggcagtggagagggcagccaacaggttctaatgtcagagccatcctttaccaggtgggcctgcttgtccctgtcttgcctgccacatcactctactttttggaaggccatggctgattaaagaagttcttgtagtttcccaagcaaagtggaatctagaaacagtgaaaaaagttcagataactttgaattgcattcaagaagtacacttctttcccattgtccgtggctcttggagtctccgtgatgccaggctagagtctgattatataataattcaaaatggtaactcccaaggtaatgctttcttccatttcatcaggttcttttatccccactgcaccccctccccttctcccttgcctatctggatggcttctcagaagctcggccctagtcctccctgccttggcggggccagagcccactactgctgaggcagcactgctctcgtcagctgtgttgcctttaccaagtgtcttcagagggttatgagttagagtagctggcctggggagagggtgcctccctgggtttgatctttagggtctgactttctgcagagaagatgttttacagatgtgtcaaagctgatgtaatgtggttgggggaggaaatccagacccaaagtgtttgtcagctgggtgtacaactgcctatgtgatcctctgtcttaaaatgatttctgtctgtgctgcgaaacaaagacaaggtgaggtgtttttcttttttgtaataatataaagctgtgtgtttctgattggatgattcactatgtgcattgttttctcctaagtgcttttagtaggtagcaatcaaatggtgtaaataaggatgttcttttcctgttccttttatttttttctctctttattattcttttattgacaccactagatagctggccactggtcatgccattgccaagatgaagaaaaagcaaactacactttggcctctggttctgaattgcagaaatcaaaggatgcagtaggtgtctatgtcagaattatggatcagaggcagacaatgacgagtgaagatggttgtgaagccctcttcattcctggaggagcctgcatctcatctctcaggccctctttctctgtgggtctcatgaacagcagtggggaccattgagcacttgaatggcctgtttgtctatgggcttgcaaaggacaagcagagttcacagagctcaggatagaaacatcagagcctcctccacgggcttcagtgaaactccgatgaactgtacctgagggaattttttcttaatcaaccccttgtgtggatgaatacaggaacaacaaaacttgtgtacgtatgaaagtcatgttgttaagcagttatgatttaagaggttttaagtcagagggatcatctggaggccggctttgtgcaagcttttacagccttctgcagtgtccttaccctggctgtacatggggaagggctatgtgtaaacaagtgctttagaggcctctgagagtttttaaaaatcagacccattaacaaaagagagggtttcttaggaacaaagcaactattttgattactgagatctctgttttgtttctgtgagttactctgtattcctttccccatttcactcttgcccttcacatcttaaatgtccataagaaacccttgcatgtgttggtattctgaggcatcccgtgggaaagtcccctaagtcccattttgtacttcaacaaaaaatgactgtagcagaagataagtggagacttttatggatatactactcattttacttaaaatctacccagttcagacttgaatgtaaacttgtattaggggaaaattctccaaagagggttttctacatacacagaagcagttcaacttctcaagttaattttgataagcagaatctactactggccagagcgacaggagtggctaggggttgccagccagtccctttctgatgatcaaggccctgcacagcaggatgccacaggatgcccctgccatctagctggaagcatcaaaagtccctctgtatgacccggtgtgggaaagagggttgtcaggatgagaaagtggggctgcagggtgacgataagaccacctaaccaactccccacctccaccaccacaataagaacaaaactgtagggctctaaagagagggggtggtttacaagtttattgagcatttactaggaagtgacatggcgatgacctctgtacatgagttaggttcactttcatgtggcctcccactacagagatgcgtatgcccagaagtcagctctctgaggagacaggctactttggccccagtttgaagcattctgtccaaatgtcctgagctctccagcagtcaagtagtgaatggataccatacttattatggttgatgaaaaaaggcagagcttatcctcaattttttttagggaagagaaggaataaaataaaagtggttcaagctgggcatggtggctcacacctgtaattgcagcactttgggaggctgaggcaggcagatcacttgaggtcaggagttcaagaccagcctggccaacagggtgaaaccccatctctactaaaaatacaaaaattacccaggcgtgatggtgggcgcctgtaatcccagctacacaggaagctgaggcaggaaaattgcttgaaccggggaggcggagattgcagtgagccaagattgtgccacttcattccagcctgggcgacagagcgaaactctgtcaaaggaaaggaaagaaaagaaaaaaaaaaagagagagagaaaagaagaggggaggggagggaaagggaagggaggggaggggaggagaggagagcagattgggggggctcatgttctgagagaaaggaataatagcatttgtctagtacattccagtttacaaagtgcctgatatacatgatctcctttaatcttcacccaatcctgtaaagtaggtgttagatccccattttgcaagtaaataagtggaggcttagagcagttaaccgctggcaggtaggtagctggttccatagcacatcattttcctgcggcatcacggcatggtgccgaagaagacagctgtggatgtcgttgactcagatgtgcctccgttggggtgggagaacccagggatgggggtcagcaagccaggaactccgcagggtttgtttttaaaactctgctggacagaagtggaggaggaaagaatctaaccatatgacttttataaaaatcctttcacttttcccctccccatttgaaaactctttttaagagtgaatgtagctgaaacacaactgtgtccagccattttcctgtctccacattcttccagatgtgtgacagaggagggactctgctcaattccagttgtgggtccccttggagtttacatcacttgtttttcaattcttggttttctgttcccttctaccaaaacccagcataggactcagtgtacacttactttaaaacaaaaactcacatttcttagctgcaggtgatggcctcagtcattttaatacagcctggaatgagtttgcttattacccagtcactttcgtagtgaatgttcaaaccccaaagcaaatgtttgcatctccttgtccataaaggagaaagccaggttataggagaaagagagagaaaggcgcatgtctgtttgcacagagagaggcaattttgtctacctttcgagaatcagttataaacagaagggcctcttaggattttgagctctcctgacaatgaaggaaaagctctcttgagtatacaagttccacactcattacctttcagtggtgacccatcacccactacaatttgttgaaggaagggagtgtcagagatatgctttaaagttgtactttaggctgaaattctctctgtatttggacctgcagatgttgtgtacagaaccgatgcatggcagggtcaggaagctaggagagtgaaggcgcttgtggagacagctctgtagcaaatgaaacacggaagcctccgggaatgtgtttgtgtcaccagcagcaggcatttccctgtcctccccacccccagtctccacatccccagcagcctcttccagaagcatgtcagggagacggacaggtgctctccttctcgtgcaccacatccaagtccacccaccgtggacgcagtgtgactaaatgctggccttgaagagaaaccctcagccagcttgtctgttgtccaggtccctcagtgtctctggtttccctgccctgcataatttaagcattagtgccaaatacatctgtcatattcctctccctggagactgcgaaatgtccagactttttcagactagtggagggaaggaatgttacataactaagtggaggcctggaactgtcaggatttgacagggctggaccagagacccttccgcctctgcctagtgtgtctgtcaggcaggcagcagccatcaatccaagaatgagccatggcggcaagcactgtgtggagaaaggaacccagccgaggtctgagtttcagacagaaactggggagttgggacatcttctctgtgccaggcttcattgacaccatcgctccccacagcagctccttggggcagggggctcacctgtgcagccacccttactcacagtagcatcccattcttcacactgcaaccccccagcactgtggacccttccagggaggtgacaggagccagcagacacatgacattcccagaaagccccatcttatccagacaggcttccctccatacttctttccacagttttaccctcagaaaaatgttggctgcagtcttcccttccttcacctccaccctggggaagggtcagtaaccaatgccgagggtcggggaaggaggagtcacaggcaagacagggactcagcgcagtgctcccgccatcatcggggacaggtgccagggtcagctgcagctctccttccgggagcagggtgtggtggccctggatggtcccagggagcagagggaggcaggcagctgtcacagccacagcggctctgaatggcttgagcttttagtatgtgttcaagtgcaggatactacaaactggtaaagacttccaccatgtgaagaatgtatgtaaattaaagtttattgtaatgaaggtttttactttttgcaattaaaagtgttggttgataagaa

SEQ ID NO: 119343 - DNA, 2451 bp, Homo sapiens
  Payload ID: 3371
  Gene Symbol: C7orf25
  Gene Name: chromosome 7 open reading frame 25
  Uniprot ID: Q9BPX7
  ENST ID: ENST00000350427
  CDS Start-End: 277-1542
cctcaataaacatggccgccacgccagcgtcaacccggctcgggaggccgcgctgccgcttgggaatcgcaggtttggcgtcacccggcccggaaccacgtgatgcaggaggtgcccgaggcggcggggctcgcgcgggtggagccgcctcggcgttcgagcggggtgggggctgcccggttgagatttcccggcgggtcccggcctctgcgtgcacgcgcctgcgtgctcgcgctcgcggttctggcgctgccggaaaggaataatgctgacagcatgtctgcacattccatgctctgtgaacgaatcgccatagccaaggaactgatcaagagagcagaatcactttctagatcaagaaaaggtggcatagaaggtggtgcaaagctgtgcagcaaattgaaggcagaattaaaattcttgcagaaagtagaagctgggaaagtagctattaaagagtctcatttacagagcactaacctaacacacctgagagccattgtggaatcagcagaaaacctggaagaagttgttagtgttcttcatgtctttggttatacagataccttaggagaaaagcaaacccttgtggtagatgtagttgcaaatggtggtcatacttgggtgaaagccattggccggaaggctgaagctcttcataacatctggctgggcaggggccaatatggtgacaaaagcatcattgagcaggctgaagacttcctccaggccagtcaccagcagccagtgcagtatagcaaccctcacatcatctttgcattttacaacagtgtctccagccccatggcagagaagctgaaagaaatgggcatatctgtgagaggagacatagtagcagtcaacgctctgttagatcaccctgaagagcttcaaccaagtgagagtgaatcagatgatgagggccctgaacttttgcaggtgaccagagttgaccgagaaaatatactagcaagtgttgcgtttccaacagaaattaaggtcgatgtgtgcaaaagagtaaatctggacattactactttaatcacatatgtatctgccctcagctatggaggctgccactttattttcaaagagaaagtgctcacagaacaagcagagcaagagaggaaagagcaggttctacctcagctggaggcctttatgaaggacaaggagttgtttgcttgtgaatctgctgtcaaggactttcagtctattttagataccttaggaggacctggggagagagagagggccactgtgttaattaagcgaattaatgtggtaccagaccagccttctgagcgtgccttgagactagtggccagttcaaaaattaatagccgctcattaacaatttttgggacgggagacaccctaaaagccatcacaatgactgctaatagtggttttgtcagagctgcaaacaaccagggtgttaaatttagtgtgtttatccatcagcccagagcacttactgagagtaaagaggctctagccacccccttaccaaaagactacacaactgacagtgaacactaaagataccctttaaatatttttgtggaagtaagttatttataccaaaggctgggtcttcccatctaaactggtgggaaaaaaggtctatagtaaaagtaaaactgagaactcttaaaccagtagagtttctttgtctctcatctaaagtatataacctcccaaagtagaaaaagcacaagagagaagcttatctatcaaactgtctgcattagtgcaattaagaaccgaaatacgtctatataaagctttcagctgtattgtaatactttgattcgatagggctacaactcccctactgctaaccacatttcatggaatatggctacattgcatcttgcattaaatatctggagaaaattcaagcctgtttttcattgtattgctttatatggtttaggctgggaggtagtcgttggtaatcaattttagattctaaggttaaccattaatgaaaaacttatttgctgtatgtcaggtgcagtctgataggtgtttttacaaaaagtacataatacagaagaaatgagaaagtgaattatggttatttgagtgccatgaacccattggtagacctttgtgaaaagaaagccaacaatcttactactataagataaaaccaggacacttaaggtaaaatactaatttgaatgaattgaaaaaggattatgtaaaagattttaaaaattcaatacagaaagcccccatattataagtatttgaacaataaatactattttcatgtttcatttgcaagtggcaagtgacaactgcattaccttactttcatgagatggtgacagaatattccatgccaattccatgacacaagttgtagttaaaaatacacttctatggctacattgcgctagatactttatcagttttcaataaagcaaaactagcaaagtc

SEQ ID NO: 119344 - DNA, 1743 bp, Homo sapiens
  Payload ID: 3371
  Gene Symbol: C7orf25
  Gene Name: chromosome 7 open reading frame 25
  Uniprot ID: Q9BPX7
  ENST ID: ENST00000438029
  CDS Start-End: 465-1730
ggagccggggagcgaggcggggaggctgggagcggggcgcctcttctgaggccagagggggctgggcagggccggcccggcgggaagggggtcggccgcgcgctatcagcgcctggtccctgagccgcggcgctggcggtgggggcttttcggccccggcccctcctggcagggcccggctgtgcaggtggccgggcagggccgagggccccgcagcccaccgagaaggccccgccggcctctggcccgcccacccggcgacctgcgctggggccgcttgcacggccgccgcgggttgcagccttggagtttagtttcatcttcggattttccttcagagtcggagtgggagtgggacgcaagttggtggtcttcttcggtcttttaaaatagtctgggttgacgtcaaatgcagaaatgaggcagtgttgattttttttggcgaaaggaataatgctgacagcatgtctgcacattccatgctctgtgaacgaatcgccatagccaaggaactgatcaagagagcagaatcactttctagatcaagaaaaggtggcatagaaggtggtgcaaagctgtgcagcaaattgaaggcagaattaaaattcttgcagaaagtagaagctgggaaagtagctattaaagagtctcatttacagagcactaacctaacacacctgagagccattgtggaatcagcagaaaacctggaagaagttgttagtgttcttcatgtctttggttatacagataccttaggagaaaagcaaacccttgtggtagatgtagttgcaaatggtggtcatacttgggtgaaagccattggccggaaggctgaagctcttcataacatctggctgggcaggggccaatatggtgacaaaagcatcattgagcaggctgaagacttcctccaggccagtcaccagcagccagtgcagtatagcaaccctcacatcatctttgcattttacaacagtgtctccagccccatggcagagaagctgaaagaaatgggcatatctgtgagaggagacatagtagcagtcaacgctctgttagatcaccctgaagagcttcaaccaagtgagagtgaatcagatgatgagggccctgaacttttgcaggtgaccagagttgaccgagaaaatatactagcaagtgttgcgtttccaacagaaattaaggtcgatgtgtgcaaaagagtaaatctggacattactactttaatcacatatgtatctgccctcagctatggaggctgccactttattttcaaagagaaagtgctcacagaacaagcagagcaagagaggaaagagcaggttctacctcagctggaggcctttatgaaggacaaggagttgtttgcttgtgaatctgctgtcaaggactttcagtctattttagataccttaggaggacctggggagagagagagggccactgtgttaattaagcgaattaatgtggtaccagaccagccttctgagcgtgccttgagactagtggccagttcaaaaattaatagccgctcattaacaatttttgggacgggagacaccctaaaagccatcacaatgactgctaatagtggttttgtcagagctgcaaacaaccagggtgttaaatttagtgtgtttatccatcagcccagagcacttactgagagtaaagaggctctagccacccccttaccaaaagactacacaactgacagtgaacactaaagataccctttaa

SEQ ID NO: 119345 - DNA, 1823 bp, Homo sapiens
  Payload ID: 3371
  Gene Symbol: C7orf25
  Gene Name: chromosome 7 open reading frame 25
  Uniprot ID: Q9BPX7
  ENST ID: ENST00000447342
  CDS Start-End: 24-1463
gtcacccggcccggaaccacgtgatgcaggaggtgcccgaggcggcggggctcgcgcgggtggagccgcctcggcgttcgagcggggtgggggctgcccggttgagatttcccggcgggtcccggcctctgcgtgcacgcgcctgcgtgctcgcgctcgcggttctggcgctgccggaaaggaataatgctgacagcatgtctgcacattccatgctctgtgaacgaatcgccatagccaaggaactgatcaagagagcagaatcactttctagatcaagaaaaggtggcatagaaggtggtgcaaagctgtgcagcaaattgaaggcagaattaaaattcttgcagaaagtagaagctgggaaagtagctattaaagagtctcatttacagagcactaacctaacacacctgagagccattgtggaatcagcagaaaacctggaagaagttgttagtgttcttcatgtctttggttatacagataccttaggagaaaagcaaacccttgtggtagatgtagttgcaaatggtggtcatacttgggtgaaagccattggccggaaggctgaagctcttcataacatctggctgggcaggggccaatatggtgacaaaagcatcattgagcaggctgaagacttcctccaggccagtcaccagcagccagtgcagtatagcaaccctcacatcatctttgcattttacaacagtgtctccagccccatggcagagaagctgaaagaaatgggcatatctgtgagaggagacatagtagcagtcaacgctctgttagatcaccctgaagagcttcaaccaagtgagagtgaatcagatgatgagggccctgaacttttgcaggtgaccagagttgaccgagaaaatatactagcaagtgttgcgtttccaacagaaattaaggtcgatgtgtgcaaaagagtaaatctggacattactactttaatcacatatgtatctgccctcagctatggaggctgccactttattttcaaagagaaagtgctcacagaacaagcagagcaagagaggaaagagcaggttctacctcagctggaggcctttatgaaggacaaggagttgtttgcttgtgaatctgctgtcaaggactttcagtctattttagataccttaggaggacctggggagagagagagggccactgtgttaattaagcgaattaatgtggtaccagaccagccttctgagcgtgccttgagactagtggccagttcaaaaattaatagccgctcattaacaatttttgggacgggagacaccctaaaagccatcacaatgactgctaatagtggttttgtcagagctgcaaacaaccagggtgttaaatttagtgtgtttatccatcagcccagagcacttactgagagtaaagaggctctagccacccccttaccaaaagactacacaactgacagtgaacactaaagataccctttaaatatttttgtggaagtaagttatttataccaaaggctgggtcttcccatctaaactggtgggaaaaaaggtctatagtaaaagtaaaactgagaactcttaaaccagtagagtttctttgtctctcatctaaagtatataacctcccaaagtagaaaaagcacaagagagaagcttatctatcaaactgtctgcattagtgcaattaagaaccgaaatacgtctatataaagctttcagctgtattgtaatactttgattcgatagggctacaactcccctactgctaaccacatttcatggaatatggctacattgcatcttgcattaaatatctggagaaaattc

SEQ ID NO: 119346 - DNA, 637 bp, Homo sapiens
  Payload ID: 3371
  Gene Symbol: C7orf25
  Gene Name: chromosome 7 open reading frame 25
  ENST ID: ENST00000425683
  CDS Start-End: 104-637
gacccggttgcgatcgagtggccgacgcccccagtgggagtgaggcccagcacgcgagctcggtccctcttcctggagccaggaaaggaataatgctgacagcatgtctgcacattccatgctctgtgaacgaatcgccatagccaaggaactgatcaagagagcagaatcactttctagatcaagaaaaggtggcatagaaggtggtgcaaagctgtgcagcaaattgaaggcagaattaaaattcttgcagaaagtagaagctgggaaagtagctattaaagagtctcatttacagagcactaacctaacacacctgagagccattgtggaatcagcagaaaacctggaagaagttgttagtgttcttcatgtctttggttatacagataccttaggagaaaagcaaacccttgtggtagatgtagttgcaaatggtggtcatacttgggtgaaagccattggccggaaggctgaagctcttcataacatctggctgggcaggggccaatatggtgacaaaagcatcattgagcaggctgaagacttcctccaggccagtcaccagcagccagtgcagtatagcaaccctcacatcatctttgcattttacaacagtgtctccagccccatggca

SEQ ID NO: 119347 - DNA, 1645 bp, Homo sapiens
  Payload ID: 3371
  Gene Symbol: C7orf25
  Gene Name: chromosome 7 open reading frame 25
  Uniprot ID: Q9BPX7
  ENST ID: ENST00000431882
  CDS Start-End: 24-1463
gtcacccggcccggaaccacgtgatgcaggaggtgcccgaggcggcggggctcgcgcgggtggagccgcctcggcgttcgagcggggtgggggctgcccggttgagatttcccggcgggtcccggcctctgcgtgcacgcgcctgcgtgctcgcgctcgcggttctggcgctgccggaaaggaataatgctgacagcatgtctgcacattccatgctctgtgaacgaatcgccatagccaaggaactgatcaagagagcagaatcactttctagatcaagaaaaggtggcatagaaggtggtgcaaagctgtgcagcaaattgaaggcagaattaaaattcttgcagaaagtagaagctgggaaagtagctattaaagagtctcatttacagagcactaacctaacacacctgagagccattgtggaatcagcagaaaacctggaagaagttgttagtgttcttcatgtctttggttatacagataccttaggagaaaagcaaacccttgtggtagatgtagttgcaaatggtggtcatacttgggtgaaagccattggccggaaggctgaagctcttcataacatctggctgggcaggggccaatatggtgacaaaagcatcattgagcaggctgaagacttcctccaggccagtcaccagcagccagtgcagtatagcaaccctcacatcatctttgcattttacaacagtgtctccagccccatggcagagaagctgaaagaaatgggcatatctgtgagaggagacatagtagcagtcaacgctctgttagatcaccctgaagagcttcaaccaagtgagagtgaatcagatgatgagggccctgaacttttgcaggtgaccagagttgaccgagaaaatatactagcaagtgttgcgtttccaacagaaattaaggtcgatgtgtgcaaaagagtaaatctggacattactactttaatcacatatgtatctgccctcagctatggaggctgccactttattttcaaagagaaagtgctcacagaacaagcagagcaagagaggaaagagcaggttctacctcagctggaggcctttatgaaggacaaggagttgtttgcttgtgaatctgctgtcaaggactttcagtctattttagataccttaggaggacctggggagagagagagggccactgtgttaattaagcgaattaatgtggtaccagaccagccttctgagcgtgccttgagactagtggccagttcaaaaattaatagccgctcattaacaatttttgggacgggagacaccctaaaagccatcacaatgactgctaatagtggttttgtcagagctgcaaacaaccagggtgttaaatttagtgtgtttatccatcagcccagagcacttactgagagtaaagaggctctagccacccccttaccaaaagactacacaactgacagtgaacactaaagataccctttaaatatttttgtggaagtaagttatttataccaaaggctgggtcttcccatctaaactggtgggaaaaaaggtctatagtaaaagtaaaactgagaactcttaaaccagtagagtttctttgtctctcatctaaagtatataacctcccaaagtagaaaaagcacaagaga

SEQ ID NO: 119348 - DNA, 578 bp, Homo sapiens
  Payload ID: 3371
  Gene Symbol: C7orf25
  Gene Name: chromosome 7 open reading frame 25
  ENST ID: ENST00000432637
  CDS Start-End: 324-578
gtgctcgcgctcgcggttctggcgctgccggaccatgctgtgtccccatggctttcaagctgaagaaatgaaggtctaaagtgtgtcagacgtacctaaagaagagttcaaaagtgtagctgccatcctttccttagctatcagaggaagcagtcactccagaatgagacatacacaagcccgggttcatagactcaccctccataagctgtgttgctagattgaagtttttaatcaccagtgaagaattgattgtcataattttaggagactactgaagtttgccttgtttctttccctaggaaaggaataatgctgacagcatgtctgcacattccatgctctgtgaacgaatcgccatagccaaggaactgatcaagagagcagaatcactttctagatcaagaaaaggtggcatagaaggtggtgcaaagctgtgcagcaaattgaaggcagaattaaaattcttgcagaaagtagaagctgggaaagtagctattaaagagtctcatttacagagcactaacctaacacacctgagagccattgtggaatcagcagaaaacctggaagaagtt

SEQ ID NO: 119349 - DNA, 2182 bp, Homo sapiens
  Payload ID: 3372
  Gene Symbol: C7orf26
  Gene Name: chromosome 7 open reading frame 26
  Uniprot ID: Q96N11
  ENST ID: ENST00000344417
  CDS Start-End: 268-1617
cggcattcggccgctgttcggctgcgcggcggcagctcccggcggctcctggcggcgccgcagtcggaccttcgggcgcctgctggccggcggcagcagcgatggccccctgagcaggcagggagcaggcggcggcaggcgggcaagcgggcgggtgccgcagcccaggcccgggtcgcgcctctttgtttccacgggtagcggcgcagtcccgggccccgggcggaagtgagacgcgctcggcgcgggggccgcggcggccgcaccatgagcgacatccgccactcgctgctgcgccgcgatgcgctgagcgccgccaaggaggtgttgtaccacctggacatctacttcagcagccagctgcagagcgcgccgctgcccatcgtggacaagggccccgtggagctgctggaggagttcgtgttccaggtgcccaaggagcgcagcgcgcagcccaagagactgaattcccttcaggagcttcaacttcttgaaatcatgtgcaattatttccaggagcaaaccaaggactctgttcggcagattattttttcatcccttttcagccctcaagggaacaaagccgatgacagccggatgagcttgttgggaaaactggtctccatggcggtggctgtgtgtcgaatcccggtgttggagtgtgctgcctcctggcttcagcggacgcccgtggtttactgtgtgaggttagccaaggcccttgtagatgactactgctgtttggtgccgggatccattcagacgctgaagcagatattcagtgccagcccgagattctgctgccagttcatcacctccgttaccgcgctctatgacctgtcatcagatgacctcattccacctatggacttgcttgaaatgattgtcacctggatttttgaggacccaaggttgattctcatcacttttttaaatactccgattgcggccaatctgccaataggattcttagagctcaccccgctcgttggattgatccgctggtgcgtgaaggcacccctggcttataaaaggaaaaagaagccccccttatccaatggccatgtcagcaacaaggtcacaaaggacccgggcgtggggatggacagagactcccacctcttgtactcaaaactccacctcagcgtcctgcaagtgctcatgacgctgcagctgcacctgaccgagaagaatctgtatgggcgcctggggctgatcctcttcgaccacatggtcccgctggtagaggagatcaacaggttggcggatgaactgaaccccctcaacgcctcccaggagattgagctctcgctggaccggctggcgcaggctctgcaggtggccatggcctcaggagctctgctgtgcacgagagatgacctgagaaccttgtgctccaggctgccccataataacctcctccagctggtgatctcgggtcccgtgcagcagtcgcctcacgccgcgctccccccggggttctacccccacatccacacgcccccgctgggctacggggctgtcccggcccaccccgccgcccaccccgccctgcccacgcatcccggccacaccttcatctccggcgtgacctttcccttcaggcccatccgctaggctggcccgtgtgtgccttctgcgctctcgctggacgaagcctttcgagatggaaggggtggccggactcccagaagagaacctcggggaaggggtcgggcagcccctccccgccggcagaaccgtcttggtgtcacggagtccaggtgcttcccacccggtcgcattctttgacatgcagattggatggtggagggaagagtccagcctctgccgagagcctgctgcgtgcatttttaaaagatgccgatcctgggagcctctgttctctgcgcatttcagacacagcctgtgtggcgaggagtgtgacggcaggagccacgggtgcaagcccgtgtgtctggcctctttcctcgtgaagacgatgtgtccccgccagaaaaagtgggctccttctgcagccccgtgagctgagcccaggctgcgtagtgaccacaagcttatgtgcagcactgctcagggaggctgtcaggaattcccctcacctcggaaaggaacttctcagttttattgggggtgtctaaatttcctttcatatgttcaaataaatttttctaaacagtca

SEQ ID NO: 119350 - DNA, 1762 bp, Homo sapiens
  Payload ID: 3372
  Gene Symbol: C7orf26
  Gene Name: chromosome 7 open reading frame 26
  Uniprot ID: Q96N11
  ENST ID: ENST00000359073
  CDS Start-End: 141-1199
ggcggcggcaggcgggcaagcgggcgggtgccgcagcccaggcccgggtcgcgcctctttgtttccacgggtagcggcgcagtcccgggccccgggcggaagtgagacgcgctcggcgcgggggccgcggcggccgcaccatgagcgacatccgccactcgctgctgcgccgcgatgcgctgagcgccgccaaggaggtgttgtaccacctggacatctacttcagcagccagctgcagagcgcgccgctgcccatcgtggacaagggccccgtggagctgctggaggagttcgtgttccaggtgcccaaggagcgcagcgcgcagcccaaggagcaaaccaaggactctgttcggcagattattttttcatcccttttcagccctcaagggaacaaagccgatgacagccggatgagcttgttgggaaaactggtctccatggcggtggctgtgtgtcgaatcccggtgttggagtgtgctgcctcctggcttcagcggacgcccgtggtttactgtgtgaggttagccaaggcccttgtagatgactactgctgtttggtgccgggatccattcagacgctgaagcagatattcagtgccagcccgagattctgctgccagttcatcacctccgttaccgcgctctatgacctgtcatcagatgacctcattccacctatggacttgcttgaaatgattgtcacctggatttttgaggacccaagcgtcctgcaagtgctcatgacgctgcagctgcacctgaccgagaagaatctgtatgggcgcctggggctgatcctcttcgaccacatggtcccgctggtagaggagatcaacaggttggcggatgaactgaaccccctcaacgcctcccaggagattgagctctcgctggaccggctggcgcaggctctgcaggtggccatggcctcaggagctctgctgtgcacgagagatgacctgagaaccttgtgctccaggctgccccataataacctcctccagctggtgatctcgggtcccgtgcagcagtcgcctcacgccgcgctccccccggggttctacccccacatccacacgcccccgctgggctacggggctgtcccggcccaccccgccgcccaccccgccctgcccacgcatcccggccacaccttcatctccggcgtgacctttcccttcaggcccatccgctaggctggcccgtgtgtgccttctgcgctctcgctggacgaagcctttcgagatggaaggggtggccggactcccagaagagaacctcggggaaggggtcgggcagcccctccccgccggcagaaccgtcttggtgtcacggagtccaggtgcttcccacccggtcgcattctttgacatgcagattggatggtggagggaagagtccagcctctgccgagagcctgctgcgtgcatttttaaaagatgccgatcctgggagcctctgttctctgcgcatttcagacacagcctgtgtggcgaggagtgtgacggcaggagccacgggtgcaagcccgtgtgtctggcctctttcctcgtgaagacgatgtgtccccgccagaaaaagtgggctccttctgcagccccgtgagctgagcccaggctgcgtagtgaccacaagcttatgtgcagcactgctcagggaggctgtcaggaattcccctcacctcggaaaggaacttctcagttttattgggggtgtctaaatttcctttcatatgttcaaataaatttttctaaacagt

SEQ ID NO: 119351 - DNA, 675 bp, Homo sapiens
  Payload ID: 3372
  Gene Symbol: C7orf26
  Gene Name: chromosome 7 open reading frame 26
  ENST ID: ENST00000445375
  CDS Start-End: 1-448
caatggccatgtcagcaacaaggtcacaaaggacccgggcgtggggatggacagagactcccacctcttgtactcaaaactccacctcagcgtcctgcaagtgctcatgacgctgcagctgcacctgaccgagaagaatctgtatgggcgcctggggctgatcctcttcgaccacatggtcccgctggtagaggagatcaacaggttggcggatgaactgaaccccctcaacgcctcccaggagattgagctctcgctggaccggctggcgcaggctctgcaggtggccatggcctcaggagctctgctgtgcacgagagatgacctgagaaccttgtgctccaggctgccccataataagactctgaatttcggggtcgtttgcaaggccagcttcctggggcttctgcttggaattcaggtagggcgcggtcattctcggctctgaggagactgtggccagctgttctgtgtgtcccagcgcagcagagagccgcagaggctgacgtggaggccacctgtgtgggctgcgcgcccgggagtgctacggccggagctccgtgggccacaggccccgtgcagagcccactcccacgcatcctcgcctgtggggtcctggctctgccactgcttctccgtgtccaccgcctggacccccgggtggtccgtgcctgt

SEQ ID NO: 119352 - DNA, 458 bp, Homo sapiens
  Payload ID: 3372
  Gene Symbol: C7orf26
  Gene Name: chromosome 7 open reading frame 26
  ENST ID: ENST00000440409
  CDS Start-End: 1-294
ctcttcgaccacatggtcccgctggtagaggagatcaacaggttggcggatgaactgaaccccctcaacgcctcccaggagattgagctctcgctggaccggctggcgcaggctctgcaggtggccatggcctcaggagctctgctgtgcacgagagatgacctgagaaccttgtgctccaggctgccccataataagacggtagtgaggatgagacccagtggtgtttgtgaatttctcatcctactccttgccacgtggagacctccacaaacgcagtcatcaggactctgaatttcggggtcgtttgcaaggccagcttcctggggcttctgcttggaattcagcctcctccagctggtgatctcgggtcccgtgcagcagtcgcctcacgccgcgctccccccggggttctacccccacatccacacgcccccgctgggctacggggctgtccc

SEQ ID NO: 119353 - DNA, 2673 bp, Homo sapiens
  Payload ID: 3373
  Gene Symbol: C7orf31
  Gene Name: chromosome 7 open reading frame 31
  Uniprot ID: Q8N865
  ENST ID: ENST00000283905
  CDS Start-End: 664-2436
tcttcgcattcttgccagtcccgtagcgctgggctggtttcctccgaggtctctaagagcctcctactgcgccccgctcgccgcccggaagcccccagcccctcaaggacgcatcacctaatgccgcggtcacggccaccgtcacaagcgcccccagccccaccccaccccggcctgcccgccgtccttctcccgcccccgcccctgcctgccagctccaccgggccgtaggtgcggacgacctcaaaattcctcggcccgcgaaggccgccagctgcggggaggggaggggaggcgcggtcccgcagcgcccccaggctcatgtcccaggtatgtccagacccccgaggcaccgcttgcagggcagtgacagcccgtgaggctcggcctcgacccctggcacccttggtcccagctacgccggctcctggccttcccccaagtccgagagagaggtgggattctccccgacgcagttggaaaccgggaatcccctttagggtcccgttcgtgctgcactactgactccaccatctgcaaagggattcttgtccagaatccccgaaggctttaggacagcgcttattttgttgaatgaagagtctctaattttcggaaagaccacaggctaaaagtcaagttgtgcctttttagccaagaagcatggaagtcattcacggcaggccctactgttgcagggagcttgaaggagctgacatactgtccaacaccttttactctaatgaattgcacaaccccctccagacggttactcgcccaactgcctcagaggacaggtatcaggaattaagggagtcacttcaacaatgtaggcttccttggggcgctgaaagagagtatggtgggataataccgatttcactccccgaggaccacaggccaaagtatgagcctcctcgtgtcatgggcaaaggacatcagcattatggatttggtggagaaacctggccaagaaagcttcctgttgaacaattttattatttgacccagaacaaaaaaagtgatgtctatggaaatgattctttgatacccaagccgcctaattcaacagtaggagagatctgcttgccatatccaattgaacacccctaccacacacacatctgtcgcggcgccatgttccccaccttcacgtcacctgaggacctctacacgggcattaaagcccgcacccagcagccctttcctcccacggtgccaaccaaggcttatgattcaacagttttgaagacaagaggtaatccttatagatatgaactgattgatattcccatggattcaaagaagaaagcactgacttggccaggtcaaggtgtatattatgattttcccagaggtgttgagaaaaataagccagtattctacccaaaacctcctaaaaccttcgctcctaacacttctttaaattcatgggaccctatttgctctgccaaagaagccaacatacaaagaaatcttgagaggtcccactggctcacttcgtacactcatgattttacaggtctggggcccatggacccccttgaactggatgattaccatgaaaagatggtagcagagttaacacgaaagataggatttgacccagagccgcaagaaaaattccaccctgtcttcaaacctcccagaccgttggaaggacgaattgcccgattaattcagaaccgacgttctctggaggctatagtccagcaaagaccacgttcctgtccagattgtactcctagagttttgtgtaattttcatacctttgtacccagttctaaagaaatggtggcacttagtgataacataccagccggtgtgacccataaaaaccaggatattgaagagaagatcatagaagaacagagcttgctgtctacctatgaactcccatcttgttacccaacaaaagacctaactagcatttatgacataaagccatttccaaaaatcacagatactaaaaagacagaagatttatactggagacagcagtcactaaaaacccaacccacaccttactgtaaaccagaccactggattcactatgaaaatcttaaatctcccctacgtgatcagtataatatgtgtccagaccctgttagccttagtaaacctagtgttttacaaaataaacaagacacggaagctttcactttagaacattttttaagtaagccagaagaagagttgttcttgaatatggaaaacaatgaagaaacaagacctgttcttggttggattcctagagctggagtgaccaaacctcagaccaacctgctggagcttaagaactctttttcaaaaactggtgcacaaaagcgtttccataaatcaattctagaagaccataaagacctcagggataatgagcattcggggatgaagcaccaattctatggccataattcctattatttctataattgagatactcattcttcccttcaaaacccagcctcttgcaagaagctaaaaaatataacagaatttccttcgtattgctggattctgttttctagattaaaccacaaggaccttgttagtgaggtttacattttcaggaatttaagttagtatctggttggaggaacccagaaaaggtgatgttatgacttcttgaaaagtttaacaatttggcaataaaatattagaactagaaaaatt

SEQ ID NO: 119354 - DNA, 3357 bp, Homo sapiens
  Payload ID: 3373
  Gene Symbol: C7orf31
  Gene Name: chromosome 7 open reading frame 31
  Uniprot ID: Q8N865
  ENST ID: ENST00000409280
  CDS Start-End: 310-2082
agagcccctctcgcctccgacccggcgcctcgcactccgttcactctcggttcctcttcgcattcttgccagtcccgtagcgctgggctggtttcctccgaggtctctaagagcctcctactgcgccccgctcgccgcccggaagcccccagcccctcaaggacgcatcacctaatgccgcggtcacggccaccgtcacaagcgcccccagccccaccccaccccggcctgcccgccgtccttctcccgcccccgcccctgcctgccagctccaccgggccgtaggttgtgcctttttagccaagaagcatggaagtcattcacggcaggccctactgttgcagggagcttgaaggagctgacatactgtccaacaccttttactctaatgaattgcacaaccccctccagacggttactcgcccaactgcctcagaggacaggtatcaggaattaagggagtcacttcaacaatgtaggcttccttggggcgctgaaagagagtatggtgggataataccgatttcactccccgaggaccacaggccaaagtatgagcctcctcgtgtcatgggcaaaggacatcagcattatggatttggtggagaaacctggccaagaaagcttcctgttgaacaattttattatttgacccagaacaaaaaaagtgatgtctatggaaatgattctttgatacccaagccgcctaattcaacagtaggagagatctgcttgccatatccaattgaacacccctaccacacacacatctgtcgcggcgccatgttccccaccttcacgtcacctgaggacctctacacgggcattaaagcccgcacccagcagccctttcctcccacggtgccaaccaaggcttatgattcaacagttttgaagacaagaggtaatccttatagatatgaactgattgatattcccatggattcaaagaagaaagcactgacttggccaggtcaaggtgtatattatgattttcccagaggtgttgagaaaaataagccagtattctacccaaaacctcctaaaaccttcgctcctaacacttctttaaattcatgggaccctatttgctctgccaaagaagccaacatacaaagaaatcttgagaggtcccactggctcacttcgtacactcatgattttacaggtctggggcccatggacccccttgaactggatgattaccatgaaaagatggtagcagagttaacacgaaagataggatttgacccagagccgcaagaaaaattccaccctgtcttcaaacctcccagaccgttggaaggacgaattgcccgattaattcagaaccgacgttctctggaggctatagtccagcaaagaccacgttcctgtccagattgtactcctagagttttgtgtaattttcatacctttgtacccagttctaaagaaatggtggcacttagtgataacataccagccggtgtgacccataaaaaccaggatattgaagagaagatcatagaagaacagagcttgctgtctacctatgaactcccatcttgttacccaacaaaagacctaactagcatttatgacataaagccatttccaaaaatcacagatactaaaaagacagaagatttatactggagacagcagtcactaaaaacccaacccacaccttactgtaaaccagaccactggattcactatgaaaatcttaaatctcccctacgtgatcagtataatatgtgtccagaccctgttagccttagtaaacctagtgttttacaaaataaacaagacacggaagctttcactttagaacattttttaagtaagccagaagaagagttgttcttgaatatggaaaacaatgaagaaacaagacctgttcttggttggattcctagagctggagtgaccaaacctcagaccaacctgctggagcttaagaactctttttcaaaaactggtgcacaaaagcgtttccataaatcaattctagaagaccataaagacctcagggataatgagcattcggggatgaagcaccaattctatggccataattcctattatttctataattgagatactcattcttcccttcaaaacccagcctcttgcaagaagctaaaaaatataacagaatttccttcgtattgctggattctgttttctagattaaaccacaaggaccttgttagtgaggtttacattttcaggaatttaagttagtatctggttggaggaacccagaaaaggtgatgttatgacttcttgaaaagtttaacaatttggcaataaaatattagaactagaaaaatttatagtctttaatctctcatcttcagattatacaaggaaattttccaaaatcacaaaaagcaatgtgtacaacaaagtttacatcattgtttcaccaaaaaaaattgaaaagctggaaagaactcaaatgatcaataattaatgaatgactatacaaattatagtatcttaataaaaatgagaacactgtccctttatgtaaatttttgtacatagtagcattaggtagaaaagacaaaacccaaacacctagttaattgagggatggacacctctaaaaactatattgtcttaaaagtatgtggactctgttcctttatgtaaacatgtaaagaaaataagtcagcgaaaaaaatgaaacccaaaactctctgcatgtacacattacaaattgaattgtttgcttacccttaaccttctgattgagaaacataactgtttcttttatgcagataaaattattttactgaagatctagcaatggccttaattagcaactggtgagttctaattatagcaagaaaggatggcttggtatcagttattacagagccccaaatcttcatttctggagtgtgttctctaagagtttggctaactcccatatgcaagtcaattcatttaatgtgccaagaggtagattttaaacatagtctatcgtggaagttcaagaggaatttctttaagtattttgtgaatatttattttaattttatgaccaacatgtcatttggttgtaacctccttaaaactattctgggctaaagttagagaatttttttccaactgcattctgtacagcactagttacattatgacaggaagtaaaagtttacatggtgaaataatactggggaaatcggagcaacaatgtcagttgcatgccttggtcactgggttctctatagcctttaatatgtaatgcaattgggagtgtctgaagtgagggagatatagtgtacacactttttatcacagagtagatcactggaatggaattccaaataataaactttggaaggtgtaactctccagtat

SEQ ID NO: 119355 - DNA, 555 bp, Homo sapiens
  Payload ID: 3373
  Gene Symbol: C7orf31
  Gene Name: chromosome 7 open reading frame 31
  ENST ID: ENST00000443822
  CDS Start-End: 95-555
agcagtgtaaaatgtgttttctgcctgccttgactcgacaagccaaatgtgccctccttttcttttccaggttgtgcctttttagccaagaagcatggaagtcattcacggcaggccctactgttgcagggagcttgaaggagctgacatactgtccaacaccttttactctaatgaattgcacaaccccctccagacggttactcgcccaactgcctcagaggacaggtatcaggaattaagggagtcacttcaacaatgtaggcttccttggggcgctgaaagagagtatggtgggataataccgatttcactccccgaggaccacaggccaaagtatgagcctcctcgtgtcatgggcaaaggacatcagcattatggatttggtggagaaacctggccaagaaagcttcctgttgaacaattttattatttgacccagaacaaaaaaagtgatgtctatggaaatgattctttgatacccaagccgcctaattcaacagtaggagagatctgcttgccatatccaattgaacacccctaccacacacacat

SEQ ID NO: 119356 - DNA, 757 bp, Homo sapiens
  Payload ID: 3373
  Gene Symbol: C7orf31
  Gene Name: chromosome 7 open reading frame 31
  ENST ID: ENST00000415598
  CDS Start-End: 411-757
gaagagcccctctcgcctccgacccggcgcctcgcactccgttcactctcggttcctcttcgcattcttgccagtcccgtagcgctgggctggtttcctccgaggtctctaagagcctcctactgcgccccgctcgccgcccggaagcccccagcccctcaaggacgcatcacctaatgccgcggtcacggccaccgtcacaagcgcccccagccccaccccaccccggcctgcccgccgtccttctcccgcccccgcccctgcctgccagctccaccgggccgtaggtgcggacgacctcaaaattcctcggcccgcgaaggccgccagctgcggggaggggaggggaggcgcggtcccgcagcgcccccaggctcatgtcccaggttgtgcctttttagccaagaagcatggaagtcattcacggcaggccctactgttgcagggagcttgaaggagctgacatactgtccaacaccttttactctaatgaattgcacaaccccctccagacggttactcgcccaactgcctcagaggacaggtatcaggaattaagggagtcacttcaacaatgtaggcttccttggggcgctgaaagagagtatggtgggataataccgatttcactccccgaggaccacaggccaaagtatgagcctcctcgtgtcatgggcaaaggacatcagcattatggatttggtggagaaacctggccaagaaagcttcctgttgaacaattttattatttgaccca

SEQ ID NO: 119357 - DNA, 519 bp, Homo sapiens
  Payload ID: 3373
  Gene Symbol: C7orf31
  Gene Name: chromosome 7 open reading frame 31
  ENST ID: ENST00000444434
  CDS Start-End: 242-519
ctcggcccgcgaaggccgccagctgcggggaggggaggggaggcgcggtcccgcagcgcccccaggctcatgtcccagggtcccgttcgtgctgcactactgactccaccatctgcaaagggattcttgtccagaatccccgaaggctttaggacagcgcttattttgttgaatgaagagtctctaattttcggaaagaccacaggctaaaagtcaagttgtgcctttttagccaagaagcatggaagtcattcacggcaggccctactgttgcagggagcttgaaggagctgacatactgtccaacaccttttactctaatgaattgcacaaccccctccagacggttactcgcccaactgcctcagaggacaggtatcaggaattaagggagtcacttcaacaatgtaggcttccttggggcgctgaaagagagtatggtgggataataccgatttcactccccgaggaccacaggccaaagtatgagcctcctcgtgtcatgggcaaaggacatca

SEQ ID NO: 119358 - DNA, 1354 bp, Homo sapiens
  Payload ID: 3374
  Gene Symbol: C7orf33
  Gene Name: chromosome 7 open reading frame 33
  Uniprot ID: Q8WU49
  ENST ID: ENST00000307003
  CDS Start-End: 362-895
gagctgcaggcaacgtgatctgaattacatggaggacaagctccagctgactttccgtaaactcgcattaggattctaataggagacgacaggagcaggtggggataatgagctggcggaaggggctgcctatcacactgctcggtggcccctctttcacccccactttgcctcaggcattttctactcagctgtgaccttacttatggtgatgccaatccagtggtcaggagcgaggcgcccagcctgtgtctgaatcctcctactgaccctggggatccgtgcgacttgatcttagatattggtggtgaagcgccgctctccttgacagcatccaggaaaggtaattacctttgccaaaatgcaagtggaagttcaaagcctcagccttgaagagtgtccctggagacttccaggcccccaatgtgaatgtgaagccctcctgcccagtggggcaaggcgccggattgaccttcgcctgagtgggagggcagtcgctgtttgggtccacgttaggggcggtccaggtcaatttaacttgtcatatgccacgggaagacataagaagccaaacccacaccaaaacatgaaccgggggatggaatttattgctcctgtatcagctcccaccaaatctggtgccccgtggcattttctttctcaaggtcccacggatgcccagagagcagtcagaatcaggccaggcaccaggatgggcttgtcctcagatccagttgtcggcaccttgtcttccagttacctagatctgctaactctctcttacaagcctgggaggacagtgacaagttcatacctaaacgtacgtgggcatgaagtaagaaagctccagaattctgttgaggccacaaggatttccagaactgacagcagttaagaattttgcagaatctaagagtcacatctctaaatttgtgtagattgtgaaatctcttcttgcaagaaaaaagagaaatagctgaagttctggaaataacagttgatgaaaacttggtaatctgaagtctgaactttgaacaccagcagacaggctgagaattctctttgatcatgagcccaagttccacgtgtacctgcaggaatctgtgtggcatttgtgcactggtgtggggcccaggagaggaccacggagtgacaagccaccaggttctaaagggagacgaagatccccagaggacctggatagagatgtttccctgaccattgtctgctgtgtgctcccgatgatgagactctagagtttacaactgaaacacactgtcatttatgatattatttgtaatatctggtatgtctaagtaaaacatgcattcagtaaaactcgcgatgaaactta

SEQ ID NO: 119359 - DNA, 766 bp, Homo sapiens
  Payload ID: 3375
  Gene Symbol: C7orf34
  Gene Name: chromosome 7 open reading frame 34
  Uniprot ID: Q96L11
  ENST ID: ENST00000409607
  CDS Start-End: 42-485
ggagaaaatgcccctggaaagggttaagggccaggacaggaatggggcaggaggtgcacggatcctgctgggcactgggagcagggggcggccaaaggcagtgggtgggcaggtccatgcctcccctggccccccagctctgcagggcagtgttcctggttcctatcttgctgctgctgcaggtgaagcctctgaacgggagcccaggccccaaagatgggagccagacagagaaaacgccctctgcagaccagaatcaagaacagttcgaagagcactttgtggcctcctcagtgggtgagatgtggcaggtggtggacatggcccagcaggaagaagaccagtcgtccaagacggcagctgttcacaagcactctttccacctcagcttctgctttagtctggccagtgtcatggttttctcaggagggccattgaggcggacattcccaaatatccaactctgcttcatgctcactcactgaccctccctccctcctgggctccaggtcacaactcccaaaggagatgcaggcatggctctctgcctctgatcaccatcactgtatctcaaggttcagcagcagagataccagttgccatcagtgctaactgactgcctctccaggttcggagtttcatctcccagggccagagacagcagacccacatccttctctcccacacctctcctggttttgttcaggacagcagattagaggcaggaggcaatgacaataaaataacgataaaatcctgagaacaa

SEQ ID NO: 119360 - DNA, 717 bp, Homo sapiens
  Payload ID: 3375
  Gene Symbol: C7orf34
  Gene Name: chromosome 7 open reading frame 34
  Uniprot ID: Q96L11
  ENST ID: ENST00000458732
  CDS Start-End: 1-460
aatgacccactgtggtcatcttggaagcctcggccatccctgctggctgtgctccattcttgtgcctcgccattggaacgctctagtgagccggaatgaagttcaggcccatggctgtgatgtcacagaacatgtgaagtcagaggtcctatggaaggtgaagcctctgaacgggagcccaggccccaaagatgggagccagacagagaaaacgccctctgcagaccagaatcaagaacagttcgaagagcactttgtggcctcctcagtgggtgagatgtggcaggtggtggacatggcccagcaggaagaagaccagtcgtccaagacggcagctgttcacaagcactctttccacctcagcttctgctttagtctggccagtgtcatggttttctcaggagggccattgaggcggacattcccaaatatccaactctgcttcatgctcactcactgaccctccctccctcctgggctccaggtcacaactcccaaaggagatgcaggcatggctctctgcctctgatcaccatcactgtatctcaaggttcagcagcagagataccagttgccatcagtgctaactgactgcctctccaggttcggagtttcatctcccagggccagagacagcagacccacatccttctctcccacacctctcctggttttgttcaggacagcagattagaggcaggaggcaatgacaataaa

SEQ ID NO: 119361 - DNA, 763 bp, Homo sapiens
  Payload ID: 3375
  Gene Symbol: C7orf34
  Gene Name: chromosome 7 open reading frame 34
  ENST ID: ENST00000617608
  CDS Start-End: 42-485
ggagaaaatgcccctggaaagggttaagggccaggacaggaatggggcaggaggtgcacggatcctgctgggcactgggagcagggggcggccaaaggcagtgggtgggcaggtccatgcctcccctggccccccagctctgcagggcagtgttcctggttcctatcttgctgctgctgcaggtgaagcctctgaacgggagcccaggccccaaagatgggagccagacagagaaaacgccctctgcagaccagaatcaagaacagttcgaagagcactttgtggcctcctcagtgggtgagatgtggcaggtggtggacatggcccagcaggaagaagaccagtcgtccaagacggcagctgttcacaagcactctttccacctcagcttctgctttagtctggccagtgtcatggttttctcaggagggccattgaggcggacattcccaaatatccaactctgcttcatgctcactcactgaccctccctccctcctgggctccaggtcacaactcccaaaggagatgcaggcatggctctctgcctctgatcaccatcactgtatctcaaggttcagcagcagagataccagttgccatcagtgctaactgactgcctctccaggttcggagtttcatctcccagggccagagacagcagacccacatccttctctcccacacctctcctggttttgttcaggacagcagattagaggcaggaggcaatgacaataaaataacgataaaatcctgagaa

SEQ ID NO: 119362 - DNA, 717 bp, Homo sapiens; identical to SEQ ID NO: 119360
  Payload ID: 3375
  Gene Symbol: C7orf34
  Gene Name: chromosome 7 open reading frame 34
  ENST ID: ENST00000632848
  CDS Start-End: 2-460

SEQ ID NO: 119363 - DNA, 2520 bp, Homo sapiens
  Payload ID: 3376
  Gene Symbol: C7orf43
  Gene Name: chromosome 7 open reading frame 43
  Uniprot ID: Q8WVR3
  ENST ID: ENST00000316937
  CDS Start-End: 187-1929
ggttccggcgctgccgggtctcggttcgggttcgttgccccggtgccgggaccgggccggtctctccggccgccccagccgggcgcagcagccggaggtgtcgggaccctctggacccaccctagcgggccccgccggcggtcggcctccggtccgggctcccagtcgcgccgtcctcgccgccccatggagtcccagtgcgactactcgatgtacttcccggccgtgccgctgccgccgcgcgcggagctggcaggggatccgggccggtaccgggcgctgccccggcgcaaccatctgtacttgggggagactgtccgttttctgctggtgttgcgctgccggggcggtgcggggtccggcaccgggggcggcccgggcttgggctccagaggagcctgggcagaactggcaaccgccctggccgccctggcctcggtcagcgccggaggcgggatgccggggggcggcggcgccggcgaccaggattcggagcccccagggggaggggatcctgggggtgggggtttgttccgaggctgcagcccccttctcacccacggcccgggccctgctacctcagggggagcgaccacgctgcctgtggaggaaccgattgtgtccacagatgaggtcatcttcccactcaccgtttcactggatagactgcccccagggacacctaaggccaagattgtagtgactgtgtggaagcgggagattgaggcaccagaggtcagagatcaaggctacctgcgattgctgcagacccgatctcctggggagacattccggggcgagcagagcgctttcaaggcccaagtgagcacgctgctgactctgctgccccctccggttctgagatgccggcagttcactgtggctggaaaacacttgaccgtgctcaaggtgctgaacagctcctctcaggaggaaatctccatctgggatatccgaatcctccccaacttcaacgccagttatctacctgtcatgcccgatggctctgtgctgctggtggacaatgtctgtcaccagtctggggaagtctccatgggctccttctgccgcctacccgggacctctggctgcttcccctgcccgctgaatgccctggaggaacacaacttcctgtttcagctgagagggggtgagcagccccctccaggggccaaggagggcctggaagttcccctgattgctgtggttcagtggtctaccccaaagctgcccttcactcagagcatctacacccactaccgcctgcccagtgtccgcttggaccgcccgtgttttgtgatgaccgcttcttgtaagtcccctgttcggacctacgagcgtttcactgtcacctacacgctgcttaacaatctccaagacttccttgctgtgaggctcgtgtggaccccagagcatgcacaggctggaaagcagctgtgtgaggaggagcgccgggccatgcaggctgccctggactccgtcgtctgccacacgcccctcaacaaccttggcttttcccggaagggcagcgcgctcaccttcagtgtggccttccaggctctgaggacggggctcttcgagctaagccagcacatgaaactgaagctgcagttcaccgccagcgtgtcccaccctccacccgaggcccggcccctctcccgcaagagcagccccagcagccctgctgtccgggacttggtggagaggcatcaggctagcctgggccgctcccagtccttctcccaccagcagccttcccgaagccacctcatgaggtcgggcagtgtgatggagcgcagagccatcacgccccctgtggcctctcctgttggccgccccctctacctgcccccggacaaggctgtgttgtctctggacaagattgccaagcgcgagtgcaaggtcctggtggtggaacccgtcaagtagcaccgtgccagctctgttccctcttacactccagagacccaacgcccccagaggggatccctgctcccgggctgtgcctcccctgggatgcctcccagacgggggtgaagaggcctggcagagctgcctgtcttgtgtctgctgatgagggatgggggaagaagctgtgaagtgggcgggcatggctgggactaagccaccagtattccccgagttcctgtggggggggctggccccacccctaggccagggcaagggttcccagagctcccttgtccccggccctttaccctggttctgagtttacaaagtctcttcctcattcccgttgagttctttcccacctctgacattccctccctccctcccgcagggctgagattagagggtggtgatggctaagggcccctgacagtgaccttcctgtctcaggggttggggacagggccaggtagcctcctgccccttatgtttacgtttgcagcctgaagcactttaatttttttttttttggtctgttcctgtaacttattttccaactattgcttccaactgaaataagactattaaatgcctgttcaggagggagaa

SEQ ID NO: 119364 - DNA, 1255 bp, Homo sapiens
  Payload ID: 3376
  Gene Symbol: C7orf43
  Gene Name: chromosome 7 open reading frame 43
  ENST ID: ENST00000394035
  CDS Start-End: 1-78
ctccaagacttccttgctgtgaggctcgtgtggaccccagagcatgcacaggctgtttactccacagagtggctttgagaatcagatgagactgtgctggcgaaggccctgtgggaatgaggaacgctgtagtgtttgctggtccctgtttctgcccccaggaaagcagctgtgtgaggaggagcgccgggccatgcaggctgccctggactccgtcgtctgccacacgcccctcaacaaccttggcttttcccggaagggcagcgcgctcaccttcagtgtggccttccaggctctgaggacggggctcttcgagctaagccagcacatgaaactgaagctgcagttcaccgccagcgtgtcccaccctccacccgaggcccggcccctctcccgcaagagcagccccagcagccctgctgtccgggacttggtggagaggcatcaggctagcctgggccgctcccagtccttctcccaccagcagccttcccgaagccacctcatgaggtcgggcagtgtgatggagcgcagagccatcacgccccctgtggcctctcctgttggccgccccctctacctgcccccggacaaggctgtgttgtctctggacaagattgccaagcgcgagtgcaaggtcctggtggtggaacccgtcaagtagcaccgtgccagctctgttccctcttacactccagagacccaacgcccccagaggggatccctgctcccgggctgtgcctcccctgggatgcctcccagacgggggtgaagaggcctggcagagctgcctgtcttgtgtctgctgatgagggatgggggaagaagctgtgaagtgggcgggcatggctgggactaagccaccagtattccccgagttcctgtggggggggctggccccacccctaggccagggcaagggttcccagagctcccttgtccccggccctttaccctggttctgagtttacaaagtctcttcctcattcccgttgagttctttcccacctctgacattccctccctccctcccgcagggctgagattagagggtggtgatggctaagggcccctgacagtgaccttcctgtctcaggggttggggacagggccaggtagcctcctgccccttatgtttacgtttgcagcctgaagcactttaatttttttttttttggtctgttcctgtaacttattttccaactattgcttccaactgaaataagactattaaatgcctgttcaggagggagaa

SEQ ID NO: 119365 - DNA, 2046 bp, Homo sapiens
  Payload ID: 3376
  Gene Symbol: C7orf43
  Gene Name: chromosome 7 open reading frame 43
  ENST ID: ENST00000456769
  CDS Start-End: 524-1459
tttctctccagtcattcggctcagtaccccggttccggcgctgccgggtctcggttcgggttcgttgccccggtgccgggaccgggccggtctctccggccgccccagccgggcgcagcagccggagctgcctgtggaggaaccgattgtgtccacagatgaggtcatcttcccactcaccgtttcactggatagactgcccccagggacacctaaggccaagattgtagtgactgtgtggaagcgggagattgaggcaccagaggtcagagatcaaggctacctgcgattgctgcagacccgatctcctggggagacattccggggcgagcagagcgctttcaaggcccaagtgagcacgctgctgactctgctgccccctccggttctgagatgccggcagttcactgtggctggaaaacacttgaccgtgctcaaggtgctgaacagctcctctcaggaggaaatctccatctgggatatccgaatcctccccaacttcaacgccagttatctacctgtcatgcccgatggctctgtgctgctggtggacaatgtctgtcaccagtctggggaagtctccatgggctccttctgccgcctacccgggacctctggctgcttcccctgcccgctgaatgccctggaggaacacaacttcctgtttcagctgagagggggtgagcagccccctccaggggccaaggagggcctggaagttcccctgattgctgtggttcagtggtctaccccaaagctgcccttcactcagagcatctacacccactaccgcctgcccagtgtccgcttggaccgcccgtgttttgtgatgaccgcttcttgtaagtcccctgttcggacctacgagcgtttcactgtcacctacacgctgcttaacaatctccaagacttccttgctgtgaggctcgtgtggaccccagagcatgcacaggctggaaagcagctgtgtgaggaggagcgccgggccatgcaggctgccctggactccgtcgtctgccacacgcccctcaacaaccttggcttttcccggaagggcagcgcgctcaccttcagtgtggccttccaggctctgaggacggggctcttcgagctaagccagcacatgaaactgaagctgcagttcaccgccagcgtgtcccaccctccacccgaggcccggcccctctcccgcaagagcagccccagcagccctgctgtccgggacttggtggagaggcatcaggctagcctgggccgctcccagtccttctcccaccagcagccttcccgaagccacctcatgaggtcgggcagtgtgatggagcgcagagccatcacgccccctgtggcctctcctgttggccgccccctctacctgcccccggacaaggctgtgttgtctctggacaagattgccaagcgcgagtgcaaggtcctggtggtggaacccgtcaagtagcaccgtgccagctctgttccctcttacactccagagacccaacgcccccagaggggatccctgctcccgggctgtgcctcccctgggatgcctcccagacgggggtgaagaggcctggcagagctgcctgtcttgtgtctgctgatgagggatgggggaagaagctgtgaagtgggcgggcatggctgggactaagccaccagtattccccgagttcctgtggggggggctggccccacccctaggccagggcaagggttcccagagctcccttgtccccggccctttaccctggttctgagtttacaaagtctcttcctcattcccgttgagttctttcccacctctgacattccctccctccctcccgcagggctgagattagagggtggtgatggctaagggcccctgacagtgaccttcctgtctcaggggttggggacagggccaggtagcctcctgccccttatgtttacgtttgcagcctgaagcactttaatttttttttttttggtctgttcctgtaacttattttccaactattgcttccaactgaaataagactattaaatgcctgttcaggaggg

SEQ ID NO: 119366 - DNA, 2005 bp, Homo sapiens
  Payload ID: 3376
  Gene Symbol: C7orf43
  Gene Name: chromosome 7 open reading frame 43
  ENST ID: ENST00000457641
  CDS Start-End: 479-1414
gatgaactgccggtcttaaagggaaaggctgcaggctgcctctgacttgctcctgacctcttcacccctttcccaaccccagctgcctgtggaggaaccgattgtgtccacagatgaggtcatcttcccactcaccgtttcactggatagactgcccccagggacacctaaggccaagattgtagtgactgtgtggaagcgggagattgaggcaccagaggtcagagatcaaggctacctgcgattgctgcagacccgatctcctggggagacattccggggcgagcagagcgctttcaaggcccaagtgagcacgctgctgactctgctgccccctccggttctgagatgccggcagttcactgtggctggaaaacacttgaccgtgctcaaggtgctgaacagctcctctcaggaggaaatctccatctgggatatccgaatcctccccaacttcaacgccagttatctacctgtcatgcccgatggctctgtgctgctggtggacaatgtctgtcaccagtctggggaagtctccatgggctccttctgccgcctacccgggacctctggctgcttcccctgcccgctgaatgccctggaggaacacaacttcctgtttcagctgagagggggtgagcagccccctccaggggccaaggagggcctggaagttcccctgattgctgtggttcagtggtctaccccaaagctgcccttcactcagagcatctacacccactaccgcctgcccagtgtccgcttggaccgcccgtgttttgtgatgaccgcttcttgtaagtcccctgttcggacctacgagcgtttcactgtcacctacacgctgcttaacaatctccaagacttccttgctgtgaggctcgtgtggaccccagagcatgcacaggctggaaagcagctgtgtgaggaggagcgccgggccatgcaggctgccctggactccgtcgtctgccacacgcccctcaacaaccttggcttttcccggaagggcagcgcgctcaccttcagtgtggccttccaggctctgaggacggggctcttcgagctaagccagcacatgaaactgaagctgcagttcaccgccagcgtgtcccaccctccacccgaggcccggcccctctcccgcaagagcagccccagcagccctgctgtccgggacttggtggagaggcatcaggctagcctgggccgctcccagtccttctcccaccagcagccttcccgaagccacctcatgaggtcgggcagtgtgatggagcgcagagccatcacgccccctgtggcctctcctgttggccgccccctctacctgcccccggacaaggctgtgttgtctctggacaagattgccaagcgcgagtgcaaggtcctggtggtggaacccgtcaagtagcaccgtgccagctctgttccctcttacactccagagacccaacgcccccagaggggatccctgctcccgggctgtgcctcccctgggatgcctcccagacgggggtgaagaggcctggcagagctgcctgtcttgtgtctgctgatgagggatgggggaagaagctgtgaagtgggcgggcatggctgggactaagccaccagtattccccgagttcctgtggggggggctggccccacccctaggccagggcaagggttcccagagctcccttgtccccggccctttaccctggttctgagtttacaaagtctcttcctcattcccgttgagttctttcccacctctgacattccctccctccctcccgcagggctgagattagagggtggtgatggctaagggcccctgacagtgaccttcctgtctcaggggttggggacagggccaggtagcctcctgccccttatgtttacgtttgcagcctgaagcactttaatttttttttttttggtctgttcctgtaacttattttccaactattgcttccaactgaaataagactattaaatgcctgttcaggagggagaa

SEQ ID NO: 119367 - DNA, 2200 bp, Homo sapiens
  Payload ID: 3376
  Gene Symbol: C7orf43
  Gene Name: chromosome 7 open reading frame 43
  ENST ID: ENST00000419037
  CDS Start-End: 161-670
cgggttcgttgccccggtgccgggaccgggccggtctctccggccgccccagccgggcgcagcagccggaggtgtcgggaccctctggacccaccctagcgggccccgccggcggtcggcctccggtccgggctcccagtcgcgccgtcctcgccgccccatggagtcccagtgcgactactcgatgtacttcccggccgtgccgctgccgccgcgcgcggagctggcaggggatccgggccggtaccgggcgctgccccggcgcaaccatctgtacttgggggagactgtccgttttctgctggtgttgcgctgccggggcggtgcggggtccggcaccgggggcggcccgggcttgggctccagaggagcctgggcagaactggcaaccgccctggccgccctggcctcggtcagcgccggaggcgggatgccggggggcggcggcgccggcgaccaggattcggagcccccagggggaggggatcctgggggtgggggtttgttccgaggctgcagcccccttctcacccacggcccgggccctgctacctcagggggagcgaccacgctgcctgtggaggaaccgattgtgtccacagatgaggtcatcttcccactcaccgtttcactggatagactgcccccagggacacctaaggccaagtgagcacgctgctgactctgctgccccctccggttctgagatgccggcagttcactgtggctggaaaacacttgaccgtgctcaaggtgctgaacagctcctctcaggaggaaatctccatctgggatatccgaatcctccccaacttcaacgccagttatctacctgtcatgcccgatggctctgtgctgctggtggacaatgtctgtcaccagtctggggaagtctccatgggctccttctgccgcctacccgggacctctggctgcttcccctgcccgctgaatgccctggaggaacacaacttcctgtttcagctgagagggggtgagcagccccctccaggggccaaggagggcctggaagttcccctgattgctgtggttcagtggtctaccccaaagctgcccttcactcagagcatctacacccactaccggaaagcagctgtgtgaggaggagcgccgggccatgcaggctgccctggactccgtcgtctgccacacgcccctcaacaaccttggcttttcccggaagggcagcgcgctcaccttcagtgtggccttccaggctctgaggacggggctcttcgagctaagccagcacatgaaactgaagctgcagttcaccgccagcgtgtcccaccctccacccgaggcccggcccctctcccgcaagagcagccccagcagccctgctgtccgggacttggtggagaggcatcaggctagcctgggccgctcccagtccttctcccaccagcagccttcccgaagccacctcatgaggtcgggcagtgtgatggagcgcagagccatcacgccccctgtggcctctcctgttggccgccccctctacctgcccccggacaaggctgtgttgtctctggacaagattgccaagcgcgagtgcaaggtcctggtggtggaacccgtcaagtagcaccgtgccagctctgttccctcttacactccagagacccaacgcccccagaggggatccctgctcccgggctgtgcctcccctgggatgcctcccagacgggggtgaagaggcctggcagagctgcctgtcttgtgtctgctgatgagggatgggggaagaagctgtgaagtgggcgggcatggctgggactaagccaccagtattccccgagttcctgtggggggggctggccccacccctaggccagggcaagggttcccagagctcccttgtccccggccctttaccctggttctgagtttacaaagtctcttcctcattcccgttgagttctttcccacctctgacattccctccctccctcccgcagggctgagattagagggtggtgatggctaagggcccctgacagtgaccttcctgtctcaggggttggggacagggccaggtagcctcctgccccttatgtttacgtttgcagcctgaagcactttaatttttttttttttggtctgttcctgtaacttattttccaactattgcttccaactgaaataagactattaaatgcctgttcaggagggagaa

SEQ ID NO: 119368 - DNA, 1616 bp, Homo sapiens
  Payload ID: 3376
  Gene Symbol: C7orf43
  Gene Name: chromosome 7 open reading frame 43
  ENST ID: ENST00000448720
  CDS Start-End: 1-452
tacctgtcatgcccgatggctctgtgctgctggtggacaatgtctgtcaccagtctggggaagtctccatgggctccttctgccgcctacccgggacctctggctgcttcccctgcccgctgaatgccctggaggaacacaacttcctgtttcagctgagagggggtgagcagccccctccaggggccaaggagggcctggaagttcccctgattgctgtggttcagtggtctaccccaaagctgcccttcactcagagcatctacacccactaccgcctgcccagtgtccgcttggaccgcccgtgttttgtgatgaccgcttcttgtaagtcccctgttcggacctacgagcgtttcactgtcacctacacgctgcttaacaatctccaagacttccttgctgtgaggctcgtgtggaccccagagcatgcacaggctgagtggctttgagaatcagatgagactgtgctggcgaaggccctgtgggaatgaggaacgctgtagtgtttgctggtccctgtttctgcccccaggaaagcagctgtgtgaggaggagcgccgggccatgcaggctgccctggactccgtcgtctgccacacgcccctcaacaaccttggcttttcccggaagggcagcgcgctcaccttcagtgtggccttccaggctctgaggacggggctcttcgagcacatgaaactgaagctgcagttcaccgccagcgtgtcccaccctccacccgaggcccggcccctctcccgcaagagcagccccagcagccctgctgtccgggacttggtggagaggcatcaggctagcctgggccgctcccagtccttctcccaccagcagccttcccgaagccacctcatgaggtcgggcagtgtgatggagcgcagagccatcacgccccctgtggcctctcctgttggccgccccctctacctgcccccggacaaggctgtgttgtctctggacaagattgccaagcgcgagtgcaaggtcctggtggtggaacccgtcaagtagcaccgtgccagctctgttccctcttacactccagagacccaacgcccccagaggggatccctgctcccgggctgtgcctcccctgggatgcctcccagacgggggtgaagaggcctggcagagctgcctgtcttgtgtctgctgatgagggatgggggaagaagctgtgaagtgggcgggcatggctgggactaagccaccagtattccccgagttcctgtggggggggctggccccacccctaggccagggcaagggttcccagagctcccttgtccccggccctttaccctggttctgagtttacaaagtctcttcctcattcccgttgagttctttcccacctctgacattccctccctccctcccgcagggctgagattagagggtggtgatggctaagggcccctgacagtgaccttcctgtctcaggggttggggacagggccaggtagcctcctgccccttatgtttacgtttgcagcctgaagcactttaatttttttttttttggtctgttcctgtaacttattttccaactattgcttccaactgaaataagactattaaatgcctgttcaggaggg

SEQ ID NO: 119369 - DNA, 1500 bp, Homo sapiens
  Payload ID: 3376
  Gene Symbol: C7orf43
  Gene Name: chromosome 7 open reading frame 43
  ENST ID: ENST00000419841
  CDS Start-End: 1-300
gtagtgactgtgtggaagcgggagattgaggcaccagaggtcagagatcaaggctacctgcgattgctgcagacccgatctcctggggagacattccggggcgagcagagcgctttcaaggcccaagtgagcacgctgctgactctgctgccccctccggttctgagatgccggcagttcactgtggctggaaaacacttgaccgtgctcaagggtaagcagggctgccggctccagcctccgggagcaacaagggaactgattggatgcagttcctctgggcaggctggtgggtgctgaacagctcctctcaggaggaaatctccatctgggatatccgaatcctccccaacttcaacgccagttatctacctgtcatgcccgatggctctgtgctgctggtggacaatgtctgtcaccagtctggggaagtctccatgggctccttctgccgcctacccgggacctctggctgcttcccctgcccgctgaatgccctggaggaacacaacttcctgtttcagctgagagggggtgagcagccccctccaggggccaaggagggcctggaagttcccctgattgctgtggttcagtggtctaccccaaagctgcccttcactcagagcatctacacccactaccgcctgcccagtgtccgcttggaccgcccgtgttttgtgatgaccgcttcttgtaagtcccctgttcggacctacgagcgtttcactgtcacctacacgctgcttaacaatctccaagacttccttgctgtgaggctcgtgtggaccccagagcatgcacaggctggaaagcagctgtgtgaggaggagcgccgggccatgcaggctgccctggactccgtcgtctgccacacgcccctcaacaaccttggcttttcccggaagggcagcgcgctcaccttcagtgtggccttccaggctctgaggacggggctcttcgagctaagccagcacatgaaactgaagctgcagttcaccgccagcgtgtcccaccctccacccgaggcccggcccctctcccgcaagagcagccccagcagccctgctgtccgggacttggtggagaggcatcaggctagcctgggccgctcccagtccttctcccaccagcagccttcccgaagccacctcatgaggtcgggcagtgtgatggagcgcagagccatcacgccccctgtggcctctcctgttggccgccccctctacctgcccccggacaaggctgtgttgtctctggacaagattgccaagcgcgagtgcaaggtcctggtggtggaacccgtcaagtagcaccgtgccagctctgttccctcttacactccagagacccaacgcccccagaggggatccctgctcccgggctgtgcctcccctgggatgcctcccagacgggggtgaagaggcctggcagagctgcctgtcttgtgtctgctgatgagggatgggggaagaagctgtgaagtgggcgggcatggct

SEQ ID NO: 119370 - DNA, 1250 bp, Homo sapiens
  Payload ID: 3376
  Gene Symbol: C7orf43
  Gene Name: chromosome 7 open reading frame 43
  ENST ID: ENST00000612870
  CDS Start-End: 44-808
ctccaagacttccttgctgtgaggctcgtgtggaccccagagcatgcacaggctgtttactccacagagtggctttgagaatcagatgagactgtgctggcgaaggccctgtgggaatgaggaacgctgtagtgtttgctggtccctgtttctgcccccaggaaagcagctgtgtgaggaggagcgccgggccatgcaggctgccctggactccgtcgtctgccacacgcccctcaacaaccttggcttttcccggaagggcagcgcgctcaccttcagtgtggccttccaggctctgaggacggggctcttcgagctaagccagcacatgaaactgaagctgcagttcaccgccagcgtgtcccaccctccacccgaggcccggcccctctcccgcaagagcagccccagcagccctgctgtccgggacttggtggagaggcatcaggctagcctgggccgctcccagtccttctcccaccagcagccttcccgaagccacctcatgaggtcgggcagtgtgatggagcgcagagcctcacgccccctgtggcctctcctgttggccgccccctctacctgcccccggacaaggctgtgttgtctctggacaagattgccaagcgcgagtgcaaggtcctggtggtggaacccgtcaagtagcaccgtgccagctctgttccctcttacactccagagacccaacgcccccagaggggatccctgctcccgggctgtgcctcccctgggatgcctcccagacgggggtgaagaggcctggcagagctgcctgtcttgtgtctgctgatgagggatgggggaagaagctgtgaagtgggcgggcatggctgggactaagccaccagtattccccgagttcctgtggggggggctggccccacccctaggccagggcaagggttcccagagctcccttgtccccggccctttaccctggttctgagtttacaaagtctcttcctcattcccgttgagttctttcccacctctgacattccctccctccctcccgcagggctgagattagagggtggtgatggctaagggcccctgacagtgaccttcctgtctcaggggttggggacagggccaggtagcctcctgccccttatgtttacgtttgcagcctgaagcactttaatttttttttttttggtctgttcctgtaacttattttccaactattgcttccaactgaaataagactattaaatgcctgttcaggaggg

SEQ ID NO: 119371 - DNA, 1482 bp, Homo sapiens
  Payload ID: 3377
  Gene Symbol: C7orf49
  Gene Name: chromosome 7 open reading frame 49
  Uniprot ID: Q9BWK5
  ENST ID: ENST00000393114
  CDS Start-End: 183-656
cagagtttgggcgccaggcgagacggcagggcttaaagttccgggaatcaaagatcaactcccactgaggacaaatggacctgtaattccgggtgtgacgagagaacgagatttaccttcctgaattaaaaaacaggtcattaagcttgggccctgactcttctttgtgagaaggtacagagatggaaaccttacaatccgagactaaaacgagggtccttccctcatggctgacagcccaggtggctacaaagaatgtggcaccaatgaaggcccccaagaggatgagaatggcagcagtgccagtggcagcagcaagactccctgcgacaaggactgtgtactgcatgaatgaggctgagatagttgatgttgctctgggaatcctgattgagagccgcaaacaggaaaaggcctgcgagcagccggccctggcgggggctgataacccagagcactcccctccctgctccgtgtcgcctcacacaagttctgggagcagcagtgaggaagaggacagtgggaaacaggcactggctccaggcctcagcccttcccagaggccggggggttccagctctgcctgtagcaggagccctgaggaggaggaggaagaggatgtgctgaaatacgtccgggagatctttttcagctagggcataaactgtgcactgaactgtctgccgagagcagctggaggacagctgagcttccactggtgctgctgggccgcccgcctgtgggaatggggctctctgtgctcctacctttgtgccttcttgggcctggcagattcacctcaggccagaagcccctggacactccgggccttggggctgccgttctgagtgtgcggaaggcaggactcaaaatgagatcccatttgactccctctgtatgtactgtgccctctcctggctcttgaggctctggagtcccaattgtctgtgttagtcagtgaccaggttccagggaaaatgatgtcatgtggtggtccaacttactggaaccaaagagacagtactttgcaaagaaaaggatcactgccaggtgcactggaattgctacagtttagtccgcatgatctctcctgaaggaggaagcctgtttcaaaaatagtttccatcatgagtctatcaatgagctcccacctctccagccagcctagaaagcaaacgagctgcccacagttctctgccctgtctgggaggttgaggccacagtgtatagactggtaagccagacaggcctcctcccgcaagctgctaccttgctttcacctgtaccttggtccccgggcagctagctataaagcaagagggacaggagcccagaagagacactgaggacaagagatcacaccagagtacatgtctctgcctctgttttcagtgtggctttggacaggaatatatgaataaatcactgccatacaggttttccaatacacaagtgctagaaaatacacacaattccccaatg

SEQ ID NO: 119372 - DNA, 1579 bp, Homo sapiens
  Payload ID: 3377
  Gene Symbol: C7orf49
  Gene Name: chromosome 7 open reading frame 49
  ENST ID: ENST00000430372
  CDS Start-End: 327-797
ggccgggagttccccaagaccggaagtgtcccgaggccgggagcccgcgggaccccggagcgcgcggggccggaagaggcgggcggccagtggaggtccgcagagtttgggcgccaggcgagacggcagggcttaaagttccgggaatcaaagatcaactcccactgaggacaaatggacctgtaattccgggtgtgacgagagaacgagatttaccttcctgaattaaaaaacaggtcattaagcttgggccctgactcttctttgtgagaaggtacagagatggaaaccttacaatccgagactaaaacgagggtccttccctcatggctgacagcccaggtggctacaaagaatgtggcaccaatgaaggcccccaagaggatgagaatggcagcagtgccagtggcagcagcaaggtgcgacagctctggtcagaagactcctgcgaatctggcaaactccctgcgacaaggactgtgtactgcatgaatgaggctgagatagttgatgttgctctgggaatcctgattgagagccgcaaacaggaaaaggcctgcgagcagccggccctggcgggggctgataacccagagcactcccctccctgctccgtgtcgcctcacacaagttctgggagcagcagtgaggaagaggacagtgggaaacaggcactggctccaggcctcagcccttcccagaggccggggggttccagctctgcctgtagcaggagccctgaggaggaggaggaagaggatgtgctgaaatacgtccgggagatctttttcagctagggcataaactgtgcactgaactgtctgccgagagcagctggaggacagctgagcttccactggtgctgctgggccgcccgcctgtgggaatggggctctctgtgctcctacctttgtgccttcttgggcctggcagattcacctcaggccagaagcccctggacactccgggccttggggctgccgttctgagtgtgcggaaggcaggactcaaaatgagatcccatttgactccctctgtatgtactgtgccctctcctggctcttgaggctctggagtcccaattgtctgtgttagtcagtgaccaggttccagggaaaatgatgtcatgtggtggtccaacttactggaaccaaagagacagtactttgcaaagaaaaggatcactgccaggtgcactggaattgctacagtttagtccgcatgatctctcctgaaggaggaagcctgtttcaaaaatagtttccatcatgagtctatcaatgagctcccacctctccagccagcctagaaagcaaacgagctgcccacagttctctgccctgtctgggaggttgaggccacagtgtatagactggtaagccagacaggcctcctcccgcaagctgctaccttgctttcacctgtaccttggtccccgggcagctagctataaagcaagagggacaggagcccagaagagacactgaggacaagagatcacaccagagtacatgtctctgcctctgttttcagtgtggctttggacaggaatatatgaataaatcactgccatacaggt

SEQ ID NO: 119373 - DNA, 1738 bp, Homo sapiens
  Payload ID: 3377
  Gene Symbol: C7orf49
  Gene Name: chromosome 7 open reading frame 49
  Uniprot ID: Q9BWK5
  ENST ID: ENST00000424142
  CDS Start-End: 604-912
aaagttccgggtgaggcgtgggtcccacaaccgcttggaatttgcctcccggctccgctctggaagctaagaaggggcacgagagccggagacgggaacctgagagcagggaagccagtagccggccggaggagcgcgcggccgctccagtcggaaggagccgttgcagccctgcccggcgtgtggcggggtcagcgaggcccctgcggtgcttcgcccgcgccttccgctccgcactcacccgccctctgggcctcccacaggaatcaaagatcaactcccactgaggacaaatggacctgtaattccgggtgtgacgagagaacgagatttaccttcctgaattaaaaaacaggtcattaagcttgggccctgactcttctttgtgagaaggtacagagatggaaaccttacaatccgagactaaaacgagggtccttccctcatggctgacagcccaggtggctacaaagaatgtggcaccaatgaaggcccccaagaggatgagaatggcagcagtgccagtggcagcagcaaggtgcgacagctctggtcagaagactcctgcgaatctgactccctgcgacaaggactgtgtactgcatgaatgaggctgagatagttgatgttgctctgggaatcctgattgagagccgcaaacaggaaaaggcctgcgagcagccggccctggcgggggctgataacccagagcactcccctccctgctccgtgtcgcctcacacaagttctgggagcagcagtgaggaagaggacagtgggaaacaggcactggctccaggcctcagcccttcccagaggccggggggttccagctctgcctgtagcaggagccctgaggaggaggaggaagaggatgtgctgaaatacgtccgggagatctttttcagctagggcataaactgtgcactgaactgtctgccgagagcagctggaggacagctgagcttccactggtgctgctgggccgcccgcctgtgggaatggggctctctgtgctcctacctttgtgccttcttgggcctggcagattcacctcaggccagaagcccctggacactccgggccttggggctgccgttctgagtgtgcggaaggcaggactcaaaatgagatcccatttgactccctctgtatgtactgtgccctctcctggctcttgaggctctggagtcccaattgtctgtgttagtcagtgaccaggttccagggaaaatgatgtcatgtggtggtccaacttactggaaccaaagagacagtactttgcaaagaaaaggatcactgccaggtgcactggaattgctacagtttagtccgcatgatctctcctgaaggaggaagcctgtttcaaaaatagtttccatcatgagtctatcaatgagctcccacctctccagccagcctagaaagcaaacgagctgcccacagttctctgccctgtctgggaggttgaggccacagtgtatagactggtaagccagacaggcctcctcccgcaagctgctaccttgctttcacctgtaccttggtccccgggcagctagctataaagcaagagggacaggagcccagaagagacactgaggacaagagatcacaccagagtacatgtctctgcctctgttttcagtgtggctttggacaggaatatatgaataaatcactgccatacaggttttccaatacacaagtgctagaaaatacacacaattccccaatg

SEQ ID NO: 119374 - DNA, 596 bp, Homo sapiens
  Payload ID: 3377
  Gene Symbol: C7orf49
  Gene Name: chromosome 7 open reading frame 49
  Uniprot ID: Q9BWK5
  ENST ID: ENST00000483029
  CDS Start-End: 145-453
agacggcagggcttaaagttccgggaatcaaagatcaactcccactgaggacaaatggacctgtaattccgggtgtgacgagagaacgagatttaccttcctgaattaaaaaacagactccctgcgacaaggactgtgtactgcatgaatgaggctgagatagttgatgttgctctgggaatcctgattgagagccgcaaacaggaaaaggcctgcgagcagccggccctggcgggggctgataacccagagcactcccctccctgctccgtgtcgcctcacacaagttctgggagcagcagtgaggaagaggacagtgggaaacaggcactggctccaggcctcagcccttcccagaggccggggggttccagctctgcctgtagcaggagccctgaggaggaggaggaagaggatgtgctgaaatacgtccgggagatctttttcagctagggcataaactgtgcactgaactgtctgccgagagcagctggaggacagctgagcttccactggtgctgctgggccgcccgcctgtgggaatggggctctctgtgctcctacctttgtgccttcttgggcctggcagattcacc

SEQ ID NO: 119375 - DNA, 1727 bp, Homo sapiens
  Payload ID: 3377
  Gene Symbol: C7orf49
  Gene Name: chromosome 7 open reading frame 49
  ENST ID: ENST00000617987
  CDS Start-End: 388-597
gcggccgctccagtcggaaggagccgttgcagccctgcccggcgtgtggcggggtcagcgaggcccctgcggtgcttcgcccgcgccttccgctccgcactcacccgccctctgggcctcccacaggtcggcgccgccagcggcgggtaccggcccgcagagggagggcgggctgtgaactggcagcacatcgcgttcccgcggggcccccattctgcccaggcagggagcggctgggatgggactgaggaatcaaagatcaactcccactgaggacaaatggacctgtaattccgggtgtgacgagagaacgagatttaccttcctgaattaaaaaacaggtcattaagcttgggccctgactcttctttgtgagaaggtacagagatggaaaccttacaatccgagactaaaacgagggtccttccctcatggctgacagcccaggtggctacaaagaatgtggcaccaatgaaggcccccaagaggatgagaatggcagcagtgccagtggcagcagcaaggtgcgacagctctggtcagaagactcctgcgaatctgactccctgcgacaaggactgtgtactgcatgaatgaggctgagatagttgatgttgctctgggaatcctgattgagagccgcaaacaggaaaaggcctgcgagcagccggccctggcgggggctgataacccagagcactcccctccctgctccgtgtcgcctcacacaagttctgggagcagcagtgaggaagaggacagtgggaaacaggcactggctccaggcctcagcccttcccagaggccggggggttccagctctgcctgtagcaggagccctgaggaggaggaggaagaggatgtgctgaaatacgtccgggagatctttttcagctagggcataaactgtgcactgaactgtctgccgagagcagctggaggacagctgagcttccactggtgctgctgggccgcccgcctgtgggaatggggctctctgtgctcctacctttgtgccttcttgggcctggcagattcacctcaggccagaagcccctggacactccgggccttggggctgccgttctgagtgtgcggaaggcaggactcaaaatgagatcccatttgactccctctgtatgtactgtgccctctcctggctcttgaggctctggagtcccaattgtctgtgttagtcagtgaccaggttccagggaaaatgatgtcatgtggtggtccaacttactggaaccaaagagacagtactttgcaaagaaaaggatcactgccaggtgcactggaattgctacagtttagtccgcatgatctctcctgaaggaggaagcctgtttcaaaaatagtttccatcatgagtctatcaatgagctcccacctctccagccagcctagaaagcaaacgagctgcccacagttctctgccctgtctgggaggttgaggccacagtgtatagactggtaagccagacaggcctcctcccgcaagctgctaccttgctttcacctgtaccttggtccccgggcagctagctataaagcaagagggacaggagcccagaagagacactgaggacaagagatcacaccagagtacatgtctctgcctctgttttcagtgtggctttggacaggaatatatgaataaatcactgccatacaggttttccaatacacaagtgctagaaaatacacacaattccccaatgcgt

SEQ ID NO: 119376 - DNA, 1349 bp, Homo sapiens
  Payload ID: 3377
  Gene Symbol: C7orf49
  Gene Name: chromosome 7 open reading frame 49
  Uniprot ID: Q9BWK5
  ENST ID: ENST00000620897
  CDS Start-End: 212-520
catagaagagtagagaaatcgagttggccagatgagggagaggccattaagaggaatcaaagatcaactcccactgaggacaaatggacctgtaattccgggtgtgacgagagaacgagatttaccttcctgaattaaaaaacaggtcattaagcttgggccctgactcttctttgtgagaagactccctgcgacaaggactgtgtactgcatgaatgaggctgagatagttgatgttgctctgggaatcctgattgagagccgcaaacaggaaaaggcctgcgagcagccggccctggcgggggctgataacccagagcactcccctccctgctccgtgtcgcctcacacaagttctgggagcagcagtgaggaagaggacagtgggaaacaggcactggctccaggcctcagcccttcccagaggccggggggttccagctctgcctgtagcaggagccctgaggaggaggaggaagaggatgtgctgaaatacgtccgggagatctttttcagctagggcataaactgtgcactgaactgtctgccgagagcagctggaggacagctgagcttccactggtgctgctgggccgcccgcctgtgggaatggggctctctgtgctcctacctttgtgccttcttgggcctggcagattcacctcaggccagaagcccctggacactccgggccttggggctgccgttctgagtgtgcggaaggcaggactcaaaatgagatcccatttgactccctctgtatgtactgtgccctctcctggctcttgaggctctggagtcccaattgtctgtgttagtcagtgaccaggttccagggaaaatgatgtcatgtggtggtccaacttactggaaccaaagagacagtactttgcaaagaaaaggatcactgccaggtgcactggaattgctacagtttagtccgcatgatctctcctgaaggaggaagcctgtttcaaaaatagtttccatcatgagtctatcaatgagctcccacctctccagccagcctagaaagcaaacgagctgcccacagttctctgccctgtctgggaggttgaggccacagtgtatagactggtaagccagacaggcctcctcccgcaagctgctaccttgctttcacctgtaccttggtccccgggcagctagctataaagcaagagggacaggagcccagaagagacactgaggacaagagatcacaccagagtacatgtctctgcctctgttttcagtgtggctttggacaggaatatatgaataaatcactgccatacaggttttccaatacacaagtgctagaaaatacacacaattccccaatgcgt

SEQ ID NO: 119377 - DNA, 1294 bp, Homo sapiens
  Payload ID: 3378
  Gene Symbol: C7orf50
  Gene Name: chromosome 7 open reading frame 50
  Uniprot ID: Q9BRJ6
  ENST ID: ENST00000357429
  CDS Start-End: 71-655
gccggaaggcggcgtccgcgacgcagctgttcacgcttaggtgggcgacgtgggcgcaggtgggcgcaggatggcaaaacagaagagaaaagttcctgaagtgacagagaaaaagaacaaaaagctgaagaaggcgtcagcagaggggccactgctgggccctgaggctgcaccaagtggcgaaggagccggctccaagggcgaagctgtgctcaggcccgggctggacgcagagccagagctgtccccagaggagcagagggtcctggaaaggaagctgaaaaaggaacggaagaaagaggagaggcagcgtctgcgggaggcaggccttgtggcccagcacccgcctgccaggcgctcgggggccgaactggccctggactacctctgcagatgggcccaaaagcacaagaactggaggtttcagaagacgaggcagacgtggctcctgctgcacatgtatgacagtgacaaggttcccgatgagcacttctccaccctgctggcctacctggaggggctgcagggccgggcccgagagctgacggtgcagaaggcggaagccctgatgcgggagctggatgaggagggctctgatccccccctgccggggagggcccagcgcatccgacaggtgctgcagctgctctcctagtgggttcagcgcggggcggggccgctgcccagtgcagggctgcctcagaccacacagggtgcagctcctccggcggtgggggccgggttcaccagcagggcagcggctgagcaagggctttcagctcctccggtggtgggggccgggatcaccagcaccagagcctcgcaagggccccttccctcctccagaccctccttggccggtgacggctgtgacagtgatggcaggttcagtgccttcagcgcagagcgtggatgctctggaatcacccggacccctggccttggagggaccctccagccccaggaatctgctttggagggaaatgtctatttttctaccgggaatattttagagattggggcatgctggctcctcccgccagctgcaaacctgcaccttccgcctgattcccgatccccctgcgtgggccgcattcctggtcccctgcctgcgtccatcgaggggcctggctgtggcctgttttcctttgaccccacacagcgtcattgcgggtcatggggagcccctggtgggagcttgtggagtcggatcacgtacctgtgcagaaaccgcctctgtggctgcatttgaaataaaacccgacccagcagcagccgtgggtcctgctctgtg

SEQ ID NO: 119378 - DNA, 2131 bp, Homo sapiens
  Payload ID: 3378
  Gene Symbol: C7orf50
  Gene Name: chromosome 7 open reading frame 50
  Uniprot ID: Q9BRJ6
  ENST ID: ENST00000397098
  CDS Start-End: 928-1512
gcgacgcagctgttcacgcttaggtgggcgacgtgggcgcaggtgggcgcaggtaggcgcgtggggcggcggcggggtggccggcgggtcagggcgccaggagacccagagccccggggcgggctcccgcggggctccgccccctccacgtgggtgcgcggaggcccggcgcggcgcgaccgggcggcggccctggggtccgcggtgctggggaggctggtgcggccggtgcggccggtgcgtcccggcgcgggctccgacacccgcacccgcctctgggttaactcagcgcgggcgagtggaagggactcagctggctcctaggtttcaggccgtcagggcttgcagtggctctggtttcattgtctttctctgaagacgccctgattgccctccgaggctttcagctcccactttctctttttcaatttttgaggcagtgtctcgctgtgccacccaggctggagtgcaatggcgtgatcatagctcactgcagcctccacctcctgggctcaagccgtcctcccgcctcatcctcccaagtagctgggaccacatgcgcgcgccaccacacccggataatttttaaaaatgttttttgtagaaatggggtctcaccatgttacccaggctggtctcgaattcttgggctcaagcgatggatcctcctgcctcggcctcccaaagtgctgggattacaggagtgagccaacgcgcttggcctcactttccatcataagcatgctttccgtttccttccttccgtcattcattcattcatttttaaaaaacgttcattgggttcctcctgcactgttcggggcattgggctacagctgtcaacaagtggagacaagtctgtgatctagtgaacttccattctggaggggagagacagatgaacaaggtgcacagagcaggtgatggatggcaaaacagaagagaaaagttcctgaagtgacagagaaaaagaacaaaaagctgaagaaggcgtcagcagaggggccactgctgggccctgaggctgcaccaagtggcgaaggagccggctccaagggcgaagctgtgctcaggcccgggctggacgcagagccagagctgtccccagaggagcagagggtcctggaaaggaagctgaaaaaggaacggaagaaagaggagaggcagcgtctgcgggaggcaggccttgtggcccagcacccgcctgccaggcgctcgggggccgaactggccctggactacctctgcagatgggcccaaaagcacaagaactggaggtttcagaagacgaggcagacgtggctcctgctgcacatgtatgacagtgacaaggttcccgatgagcacttctccaccctgctggcctacctggaggggctgcagggccgggcccgagagctgacggtgcagaaggcggaagccctgatgcgggagctggatgaggagggctctgatccccccctgccggggagggcccagcgcatccgacaggtgctgcagctgctctcctagtgggttcagcgcggggcggggccgctgcccagtgcagggctgcctcagaccacacagggtgcagctcctccggcggtgggggccgggttcaccagcagggcagcggctgagcaagggctttcagctcctccggtggtgggggccgggatcaccagcaccagagcctcgcaagggccccttccctcctccagaccctccttggccggtgacggctgtgacagtgatggcaggttcagtgccttcagcgcagagcgtggatgctctggaatcacccggacccctggccttggagggaccctccagccccaggaatctgctttggagggaaatgtctatttttctaccgggaatattttagagattggggcatgctggctcctcccgccagctgcaaacctgcaccttccgcctgattcccgatccccctgcgtgggccgcattcctggtcccctgcctgcgtccatcgaggggcctggctgtggcctgttttcctttgaccccacacagcgtcattgcgggtcatggggagcccctggtgggagcttgtggagtcggatcacgtacctgtgcagaaaccgcctctgtggctgcatttgaaataaaacccgacccagcagca

SEQ ID NO: 119379 - DNA, 1264 bp, Homo sapiens
  Payload ID: 3378
  Gene Symbol: C7orf50
  Gene Name: chromosome 7 open reading frame 50
  Uniprot ID: Q9BRJ6
  ENST ID: ENST00000397100
  CDS Start-End: 42-626
gccggaaggcggcgtccgcgacgcagctgttcacgcttaggatggcaaaacagaagagaaaagttcctgaagtgacagagaaaaagaacaaaaagctgaagaaggcgtcagcagaggggccactgctgggccctgaggctgcaccaagtggcgaaggagccggctccaagggcgaagctgtgctcaggcccgggctggacgcagagccagagctgtccccagaggagcagagggtcctggaaaggaagctgaaaaaggaacggaagaaagaggagaggcagcgtctgcgggaggcaggccttgtggcccagcacccgcctgccaggcgctcgggggccgaactggccctggactacctctgcagatgggcccaaaagcacaagaactggaggtttcagaagacgaggcagacgtggctcctgctgcacatgtatgacagtgacaaggttcccgatgagcacttctccaccctgctggcctacctggaggggctgcagggccgggcccgagagctgacggtgcagaaggcggaagccctgatgcgggagctggatgaggagggctctgatccccccctgccggggagggcccagcgcatccgacaggtgctgcagctgctctcctagtgggttcagcgcggggcggggccgctgcccagtgcagggctgcctcagaccacacagggtgcagctcctccggcggtgggggccgggttcaccagcagggcagcggctgagcaagggctttcagctcctccggtggtgggggccgggatcaccagcaccagagcctcgcaagggccccttccctcctccagaccctccttggccggtgacggctgtgacagtgatggcaggttcagtgccttcagcgcagagcgtggatgctctggaatcacccggacccctggccttggagggaccctccagccccaggaatctgctttggagggaaatgtctatttttctaccgggaatattttagagattggggcatgctggctcctcccgccagctgcaaacctgcaccttccgcctgattcccgatccccctgcgtgggccgcattcctggtcccctgcctgcgtccatcgaggggcctggctgtggcctgttttcctttgaccccacacagcgtcattgcgggtcatggggagcccctggtgggagcttgtggagtcggatcacgtacctgtgcagaaaccgcctctgtggctgcatttgaaataaaacccgacccagcagcagccgtgggtcctgctctgt

SEQ ID NO: 119380 - DNA, 507 bp, Homo sapiens
  Payload ID: 3378
  Gene Symbol: C7orf50
  Gene Name: chromosome 7 open reading frame 50
  ENST ID: ENST00000444428
  CDS Start-End: 1-489
gggccccaggatgcaagcacttgttttcctctgggcgaagctgtgctcaggcccgggctggacgcagagccagagctgtccccagaggagcagagggtcctggaaaggaagctgaaaaaggaacggaagaaagaggagaggcagcgtctgcgggaggcaggccttgtggcccagcacccgcctgccaggcgctcgggggccgaactggccctggactacctctgcagatgggcccaaaagcacaagaactggaggtttcagaagacgaggcagacgtggctcctgctgcacatgtatgacagtgacaaggttcccgatgagcacttctccaccctgctggcctacctggaggggctgcagggccgggcccgagagctgacggtgcagaaggcggaagccctgatgcgggagctggatgaggagggctctgatccccccctgccggggagggcccagcgcatccgacaggtgctgcagctgctctcctagtgggttcagcgcggggcg

SEQ ID NO: 119381 - DNA, 1147 bp, Homo sapiens
  Payload ID: 3378
  Gene Symbol: C7orf50
  Gene Name: chromosome 7 open reading frame 50
  ENST ID: ENST00000412051
  CDS Start-End: 1-538
cgcgggccgggcggtgcgcactgcgggcgcatccctgccccggcgccgtccgtgcccgcgggacctgacagccgggtcagagggcgaagctgtgctcaggcccgggctggacgcagagccagagctgtccccagaggagcagagggtcctggaaaggaagctgaaaaaggaacggaagaaagaggagaggcagcgtctgcgggaggcaggccttgtggcccagcacccgcctgccaggcgctcgggggccgaactggccctggactacctctgcagatgggcccaaaagcacaagaactggaggtttcagaagacgaggcagacgtggctcctgctgcacatgtatgacagtgacaaggttcccgatgagcacttctccaccctgctggcctacctggaggggctgcagggccgggcccgagagctgacggtgcagaaggcggaagccctgatgcgggagctggatgaggagggctctgatccccccctgccggggagggcccagcgcatccgacaggtgctgcagctgctctcctagtgggttcagcgcggggcggggccgctgcccagtgcagggctgcctcagaccacacagggtgcagctcctccggcggtgggggccgggttcaccagcagggcagcggctgagcaagggctttcagctcctccggtggtgggggccgggatcaccagcaccagagcctcgcaagggccccttccctcctccagaccctccttggccggtgacggctgtgacagtgatggcaggttcagtgccttcagcgcagagcgtggatgctctggaatcacccggacccctggccttggagggaccctccagccccaggaatctgctttggagggaaatgtctatttttctaccgggaatattttagagattggggcatgctggctcctcccgccagctgcaaacctgcaccttccgcctgattcccgatccccctgcgtgggccgcattcctggtcccctgcctgcgtccatcgaggggcctggctgtggcctgttttcctttgaccccacacagcgtcattgcgggtcatggggagcccctggtgggagcttgtggagtcggatcacgtacctgtgcagaaaccgcctctgtggctgcatttgaaataaaacccga

SEQ ID NO: 119382 - DNA, 621 bp, Homo sapiens
  Payload ID: 3378
  Gene Symbol: C7orf50
  Gene Name: chromosome 7 open reading frame 50
  ENST ID: ENST00000491163
  CDS Start-End: 45-621
cctgccggaaggcggcgtccgcgacgcagctgttcacgcttaggatggcaaaacagaagagaaaagttcctgaagtgacagagaaaaagaacaaaaagctgaagaaggcgtcagcagaggggccactgctgggccctgaggctgcaccaagtggcgaaggagccggctccaagggcgaagctgtgctcaggcccgggctggacgcagagccagagctgtccccagaggagcagagggtcctggaaaggaagctgaaaaaggaacggaagaaagaggagaggcagcgtctgcgggaggcaggccttgtggcccagcacccgcctgccaggcgctcgggggccgaactggccctggactacctctgcagatgggcccaaaagcacaagaactggaggtttcagaagacgaggcagacgtggctcctgctgcacatgtatgacagtgacaaggttcccgatgagcacttctccaccctgctggcctacctggaggggctgcagggccgggcccgagagctgacggtgcagaaggcggaagccctgatgcgggagctggatgaggagggctctgatccccccctgccggggagggcccagcgcatccgacaggtgctgcagctgc

SEQ ID NO: 119383 - DNA, 1210 bp, Homo sapiens
  Payload ID: 3379
  Gene Symbol: C7orf55
  Gene Name: chromosome 7 open reading frame 55
  Uniprot ID: Q96HJ9
  ENST ID: ENST00000297534
  CDS Start-End: 254-595
caaacccttgttctgggttagaggtcctggtaccttcagttaacagtcgggtttcgtttgattttgttacggcgcccctgggccttcgattaataaggttcggtcaacggacaagtgagcggttccactgctcgtcagtcgatagggggagtcggtagtctgtccgaccgtaccattaggcgcctgggccggaggaggggttttcagggtcgtaggacgccgttgggcaccacgctcggagaaggacaggacaatggcggccttagggtccccgtcgcacacttttcgaggacttctgcgggagttgcgctacctgagcgcggccaccggccgaccctatcgcgacaccgcggcctatcggtaccttgtgaaggctttccgtgcacatcgggtcaccagtgaaaagttgtgcagagcccaacatgagcttcatttccaagctgccacctatctctgcctcctgcgtagcatccggaaacatgtggccctacatcaggaatttcatggcaagggtgagcgctcggtggaggagtctgctggcttggtgggtctcaagttgccccatcagcctggagggaagggctgggagccatgaacatggagaatatccttggatgctgcattcataggagaattgaataatttctatcaatatgtatttatcattaaattttttttaagtttaaggtttttctctgtaattttgtttactagttcttaggggaattaactggacatttcatctttactctcagtgaatttactgaactttttgcactagactgatgttgtttttctacttaaaaaaatttttttatattttattttaaaagtagtacaagccttagccaggcacggtggctcacgcctgtaatcccagcactttgggaggccaaggcaggcggatcacctgaggttgggagttcgcgaccagcctgaccaacatggaaaaaccccgtctctactaaaaatacaaaattagccaggcgtggtggcacatgcctgtaatcccagctactcaggaggctgggacaggagaatcgcttgaacccgggaggtggaggttgcgatgagctgagatcgcgccatggcactcactccagcctgggcaacaagagcaaaactctgtctcaaaaaaaaaaaaaaaattagtataagccttttgtttaaggaattcaaatgttataaacataaaataaaagaaaccctc

SEQ ID NO: 119384 - DNA, 2125 bp, Homo sapiens
  Payload ID: 3380
  Gene Symbol: C7orf57
  Gene Name: chromosome 7 open reading frame 57
  Uniprot ID: Q8NEG2
  ENST ID: ENST00000348904
  CDS Start-End: 213-1100
gttccgcggcgcgctgggagtttgggtttggttggctgcagccagccagccgtgtaaaaactccaacgccgggcgccgcgggcagcacccacggagacccgcggggagctgctgcagctcctggcaactggtcaagcaggcagcgtccagcgcacccgcgaacaccaggtccggcagcatctgtcttttcccgcagcgtgcagcgcctgaccatgaggaacacaagcaaggaacttcagggcgccacgcaccgctacgctccctgcgattggtattaccacgtcccagtgaagcgctctgagaaggccgtggatgccccaccagcgtcccagatcccaggtctcagcaatttgggagactcacacagcgagaacctgcctgggactcggagatactggataaaagaaacagattcggaatatgtgaagctcgcgaaacaaggtggcaggcccgatttgttgaagcactttgcccctggaaccaggaaaggctctccagtggcctactccctgccagactggtatatccaccacagcaagccaccgacagccagccagcaagaagtgcgggctgtctccatgccggattacatggttcatgaagaatttaaccccgatcaagccaatggtagctatgcatccagaagagggcccttcgacttcgacatgaaaacagtttggcaaagagaggctgaggaacttgaaaaggagaaaaaaaagctgaggctaccggccattgactcaaagtatctgagcaaagcaggcaccccacttggccctaagaatcctgcaggaagtagactctccttcccccccgtgcctggtcaaaaaaacagttcacctaccaatttttccaaactcattagcaatggttataaggatgagtggttgcagcagcagcagcgagctgactcagacaagaggaccccgaagacctccagggcatcagtgttatctcagtccccacgagacctggaaggtccccaggatgcagccaggctccaggatgcagaggcttctgaaggtcctgaggacaccccagagtcttctcaaagcccagaagaatctgtatctgcatcaacaccagcagagctcaaataaatcctgatgcaatatgtatttaggataatttttaaatggctaaatatgacatgactgtattatagctatatttctgaggctttttttgtattttattaatatagactctcattgaataatttaccttgcagcagatttgacattgctgcatagaaggggcaggtgttggtttttgtttcttgcatttctctgggatgtgaaacacttggctaacaaacacaactaaggcctctggtaccctctgccctgctggcctggtgatgtcccagtgtctcagaactgatcacttgctcctcctattgtgtgaaccactcttagcaggcattgctactggattcttaactagagaaaacttacagaacaggtgttaagccttttccaatatttagtattgtagtcttcatagaaatcatttctagttacagaaaaatttaactccagaatatggtgatacagtttatgttaagaaacatattttaatttattatgccatgaatttataaacatttaatataaaacattataacatttgctgttttaaaatttttgctattttttcacaaactgatattcaaaatattaaacatttgttattttgtataaacctttaagtaaaaatatgctgttttaatatttaatttagtagaattaacaaaaactttttaatagtcaaactgaattaccttgttttataaatgttaaattgtttatatttaagtaattagcttaaaaatatagttttatgttttgtacattaattgattaataaaataataattttatgtgagaatgttttcaaaaagccaaataaagtcacagatattttagcttctttcccagaataaacttatcatgcatttgcttacctaaaatttaagtttcaaattagttctctatatgagatacttaatcgagcatatatatttatattcattgatcaaactgatatgctacaggagaatgtatgcaatgtgtaaaaaatgcaaatggctgtatgcattgaataaaaataatatacaattaga

SEQ ID NO: 119385 - DNA, 1925 bp, Homo sapiens
  Payload ID: 3380
  Gene Symbol: C7orf57
  Gene Name: chromosome 7 open reading frame 57
  Uniprot ID: Q8NEG2
  ENST ID: ENST00000435376
  CDS Start-End: 432-893
gatgttgtggttccgcggcgcgctgggagtttgggtttggttggctgcagccagccagccgtgtaaaaactccaacgccgggcgccgcgggcagcacccacggagacccgcggggagctgattggtattaccacgtcccagtgaagcgctctgagaaggccgtggatgccccaccagcgtcccagatcccaggtctcagcaatttgggagactcacacagcgagaacctgcctgggactcggagatactggataaaagaaacagattcggaatatgtgaagctcgcgaaacaaggtggcaggcccgatttgttgaagcactttgcccctggaaccaggaaaggctctccagtggcctactccctgccagactggtatatccaccacagcaagccaccgacagccagccagcaagaagtgcgggctgtctccatgccggattacatggttcatgaagaatttaaccccgatcaagccaatggtagctatgcatccagaagagggcccttcgacttcgacatgaaaacagtttggcaaagagaggctgaggaacttgaaaaggagaaaaaaaagctgaggctaccggccattgactcaaagtatctgagcaaagcaggcaccccacttggccctaagaatcctgcaggaagtagactctccttcccccccgtcaatggttataaggatgagtggttgcagcagcagcagcgagctgactcagacaagaggaccccgaagacctccagggcatcagtgttatctcagtccccacgagacctggaaggtccccaggatgcagccaggctccaggatgcagaggcttctgaaggtcctgaggacaccccaggcccagaagaatctgtatctgcatcaacaccagcagagctcaaataaatcctgatgcaatatgtatttaggataatttttaaatggctaaatatgacatgactgtattatagctatatttctgaggctttttttgtattttattaatatagactctcattgaataatttaccttgcagcagatttgacattgctgcatagaaggggcaggtgttggtttttgtttcttgcatttctctgggatgtgaaacacttggctaacaaacacaactaaggcctctggtaccctctgccctgctggcctggtgatgtcccagtgtctcagaactgatcacttgctcctcctattgtgtgaaccactcttagcaggcattgctactggattcttaactagagaaaacttacagaacaggtgttaagccttttccaatatttagtattgtagtcttcatagaaatcatttctagttacagaaaaatttaactccagaatatggtgatacagtttatgttaagaaacatattttaatttattatgccatgaatttataaacatttaatataaaacattataacatttgctgttttaaaatttttgctattttttcacaaactgatattcaaaatattaaacatttgttattttgtataaacctttaagtaaaaatatgctgttttaatatttaatttagtagaattaacaaaaactttttaatagtcaaactgaattaccttgttttataaatgttaaattgtttatatttaagtaattagcttaaaaatatagttttatgttttgtacattaattgattaataaaataataattttatgtgagaatgttttcaaaaagccaaataaagtcacagatattttagcttctttcccagaataaacttatcatgcatttgcttacctaaaatttaagtttcaaattagttctctatatgagatacttaatcgagcatatatatttatattcattgatcaaactgatatgctacaggagaatgtatgcaatgtgtaaaaaatgcaaatggctgtatgcattgaataaaaataatatacaattagagtaagaa

SEQ ID NO: 119386 - DNA, 1957 bp, Homo sapiens
  Payload ID: 3380
  Gene Symbol: C7orf57
  Gene Name: chromosome 7 open reading frame 57
  ENST ID: ENST00000420324
  CDS Start-End: 2-976
gatgttgtggttccgcggcgcgctgggagtttgggtttggttggctgcagccagccagccgtgtaaaaactccaacgccgggcgccgcgggcagcacccacggagacccgcggggagctgcgtgcagcgcctgaccatgaggaacacaagcaaggaacttcagggcgccacgcaccgctacgctccctgcgattggtattaccacgtcccagtgaagcgctctgagaaggccgtggatgccccaccagcgtcccagatcccaggtctcagcaatttgggagactcacacagcgagaacctgcctgggactcggagatactggataaaagaaacagattcggaatatgtgaagctcgcgaaacaaggtggcaggcccgatttgttgaagcactttgcccctggaaccaggaaaggctctccagtggcctactccctgccagactggtatatccaccacagcaagccaccgacagccagccagcaagaagtgcgggctgtctccatgccggattacatggttcatgaagaatttaaccccgatcaagccaatggtagctatgcatccagaagagggcccttcgacttcgacatgaaaacagtttggcaaagagaggctgaggaacttgaaaaggagaaaaaaaagctgaggctaccggccattgactcaaagtatctgagcaaagcaggcaccccacttggccctaagaatcctgcaggaagtagactctccttcccccccgtcaatggttataaggatgagtggttgcagcagcagcagcgagctgactcagacaagaggaccccgaagacctccagggcatcagtgttatctcagtccccacgagacctggaaggtccccaggatgcagccaggctccaggatgcagaggcttctgaaggtcctgaggacaccccagagtcttctcaaagcccagaagaatctgtatctgcatcaacaccagcagagctcaaataaatcctgatgcaatatgtatttaggataatttttaaatggctaaatatgacatgactgtattatagctatatttctgaggctttttttgtattttattaatatagactctcattgaataatttaccttgcagcagatttgacattgctgcatagaaggggcaggtgttggtttttgtttcttgcatttctctgggatgtgaaacacttggctaacaaacacaactaaggcctctggtaccctctgccctgctggcctggtgatgtcccagtgtctcagaactgatcacttgctcctcctattgtgtgaaccactcttagcaggcattgctactggattcttaactagagaaaacttacagaacaggtgttaagccttttccaatatttagtattgtagtcttcatagaaatcatttctagttacagaaaaatttaactccagaatatggtgatacagtttatgttaagaaacatattttaatttattatgccatgaatttataaacatttaatataaaacattataacatttgctgttttaaaatttttgctattttttcacaaactgatattcaaaatattaaacatttgttattttgtataaacctttaagtaaaaatatgctgttttaatatttaatttagtagaattaacaaaaactttttaatagtcaaactgaattaccttgttttataaatgttaaattgtttatatttaagtaattagcttaaaaatatagttttatgttttgtacattaattgattaataaaataataattttatgtgagaatgttttcaaaaagccaaataaagtcacagatattttagcttctttcccagaataaacttatcatgcatttgcttacctaaaatttaagtttcaaattagttctctatatgagatacttaatcgagcatatatatttatattcattgatcaaactgatatgctacaggagaatgtatgcaatgtgtaaaaaa

SEQ ID NO: 119387 - DNA, 2056 bp, Homo sapiens
  Payload ID: 3380
  Gene Symbol: C7orf57
  Gene Name: chromosome 7 open reading frame 57
  ENST ID: ENST00000430738
  CDS Start-End: 2-1024
gatgttgtggttccgcggcgcgctgggagtttgggtttggttggctgcagccagccagccgtgtaaaaactccaacgccgggcgccgcgggcagcacccacggagacccgcggggagctgcgtgcagcgcctgaccatgaggaacacaagcaaggaacttcagggcgccacgcaccgctacgctccctgcgattggtattaccacgtcccagtgaagcgctctgagaaggccgtggatgccccaccagcgtcccagatcccaggtctcagcaatttgggagactcacacagcgagaacctgcctgggactcggagatactggataaaagaaacagattcggaatatgtgaagctcgcgaaacaaggtggcaggcccgatttgttgaagcactttgcccctggaaccaggaaaggctctccagtggcctactccctgccagactggtatatccaccacagcaagccaccgacagccagccagcaagaagtgcgggctgtctccatgccggattacatggttcatgaagaatttaaccccgatcaagccaatggtagctatgcatccagaagagggcccttcgacttcgacatgaaaacagtttggcaaagagaggctgaggaacttgaaaaggagaaaaaaaagctgaggctaccggccattgactcaaagtatctgagcaaagcaggcaccccacttggccctaagaatcctgcaggaagtagactctccttcccccccgtgcctggtcaaaaaaacagttcacctaccaatttttccaaactcattagcaatggttataaggatgagtggttgcagcagcagcagcgagctgactcagacaagaggaccccgaagacctccagggcatcagtgttatctcagtccccacgagacctggaaggtccccaggatgcagccaggctccaggatgcagaggcttctgaaggtcctgaggacaccccagagtcttctcaaagcccagaagaatctgtatctgcatcaacaccagcagagctcaaataaatcctgatgcaatatgtatttaggataatttttaaatggctaaatatgacatgactgtattatagctatatttctgaggctttttttgtattttattaatatagactctcattgaataatttaccttgcagcagatttgacattgctgcatagaaggggcaggtgttggtttttgtttcttgcatttctctgggatgtgaaacacttggctaacaaacacaactaaggcctctggtaccctctgccctgctggcctggtgatgtcccagtgtctcagaactgatcacttgctcctcctattgtgtgaaccactcttagcaggcattgctactggattcttaactagagaaaacttacagaacaggtgttaagccttttccaatatttagtattgtagtcttcatagaaatcatttctagttacagaaaaatttaactccagaatatggtgatacagtttatgttaagaaacatattttaatttattatgccatgaatttataaacatttaatataaaacattataacatttgctgttttaaaatttttgctattttttcacaaactgatattcaaaatattaaacatttgttattttgtataaacctttaagtaaaaatatgctgttttaatatttaatttagtagaattaacaaaaactttttaatagtcaaactgaattaccttgttttataaatgttaaattgtttatatttaagtaattagcttaaaaatatagttttatgttttgtacattaattgattaataaaataataattttatgtgagaatgttttcaaaaagccaaataaagtcacagatattttagcttctttcccagaataaacttatcatgcatttgcttacctaaaatttaagtttcaaattagttctctatatgagatacttaatcgagcatatatatttatattcattgatcaaactgatatgctacaggagaatgtatgcaatgtgtaaaaaatgcaaatggctgtatgcattgaataaaaataatatacaattagagtaagaa

SEQ ID NO: 119388 - DNA, 1927 bp, Homo sapiens
  Payload ID: 3380
  Gene Symbol: C7orf57
  Gene Name: chromosome 7 open reading frame 57
  ENST ID: ENST00000539619
  CDS Start-End: 432-905
gatgttgtggttccgcggcgcgctgggagtttgggtttggttggctgcagccagccagccgtgtaaaaactccaacgccgggcgccgcgggcagcacccacggagacccgcggggagctgattggtattaccacgtcccagtgaagcgctctgagaaggccgtggatgccccaccagcgtcccagatcccaggtctcagcaatttgggagactcacacagcgagaacctgcctgggactcggagatactggataaaagaaacagattcggaatatgtgaagctcgcgaaacaaggtggcaggcccgatttgttgaagcactttgcccctggaaccaggaaaggctctccagtggcctactccctgccagactggtatatccaccacagcaagccaccgacagccagccagcaagaagtgcgggctgtctccatgccggattacatggttcatgaagaatttaaccccgatcaagccaatggtagctatgcatccagaagagggcccttcgacttcgacatgaaaacagtttggcaaagagaggctgaggaacttgaaaaggagaaaaaaaagctgaggctaccggccattgactcaaagtatctgagcaaagcaggcaccccacttggccctaagaatcctgcaggaagtagactctccttcccccccgtcaatggttataaggatgagtggttgcagcagcagcagcgagctgactcagacaagaggaccccgaagacctccagggcatcagtgttatctcagtccccacgagacctggaaggtccccaggatgcagccaggctccaggatgcagaggcttctgaaggtcctgaggacaccccagagtcttctcaaagcccagaagaatctgtatctgcatcaacaccagcagagctcaaataaatcctgatgcaatatgtatttaggataatttttaaatggctaaatatgacatgactgtattatagctatatttctgaggctttttttgtattttattaatatagactctcattgaataatttaccttgcagcagatttgacattgctgcatagaaggggcaggtgttggtttttgtttcttgcatttctctgggatgtgaaacacttggctaacaaacacaactaaggcctctggtaccctctgccctgctggcctggtgatgtcccagtgtctcagaactgatcacttgctcctcctattgtgtgaaccactcttagcaggcattgctactggattcttaactagagaaaacttacagaacaggtgttaagccttttccaatatttagtattgtagtcttcatagaaatcatttctagttacagaaaaatttaactccagaatatggtgatacagtttatgttaagaaacatattttaatttattatgccatgaatttataaacatttaatataaaacattataacatttgctgttttaaaatttttgctattttttcacaaactgatattcaaaatattaaacatttgttattttgtataaacctttaagtaaaaatatgctgttttaatatttaatttagtagaattaacaaaaactttttaatagtcaaactgaattaccttgttttataaatgttaaattgtttatatttaagtaattagcttaaaaatatagttttatgttttgtacattaattgattaataaaataataattttatgtgagaatgttttcaaaaagccaaataaagtcacagatattttagcttctttcccagaataaacttatcatgcatttgcttacctaaaatttaagtttcaaattagttctctatatgagatacttaatcgagcatatatatttatattcattgatcaaactgatatgctacaggagaatgtatgcaatgtgtaaaaaatgcaaatggctgtatgcattgaataaaaataatatacaatt

SEQ ID NO: 119389 - DNA, 3981 bp, Homo sapiens
  Payload ID: 3381
  Gene Symbol: C7orf60
  Gene Name: chromosome 7 open reading frame 60
  Uniprot ID: Q1RMZ1
  ENST ID: ENST00000297145
  CDS Start-End: 167-1384
aatcagtttgcacttttgggtgagggtccacctccaaggctgtcgctccggttcctctgcctcctctggctgctgcctccgcagctccctcctcctaccccacctcctccatctggggagcgtctgcgggggcctgaggggcggcggcggcggcggcggctgcgatatggagccaggggccggcggccgaaatactgctcgtgcgcagagggccgggtccccgaacactccgccgccccgggagcaggagcggaaactggagcaggagaagctctccggtgtggtgaagagcgtccaccggcggctccgcaagaagtaccgagaagtgggagattttgataagatctggcgagaacactgtgaggatgaagaaactctttgtgaatatgccgttgcaatgaaaaatttggcagataatcattgggcaaaaacttgtgagggcgaaggtcgtattgaatggtgttgtagtgtatgcagagaatatttccaaaatggtgggaagagaaaagcacttgagaaagatgaaaaaagagctgtacttgccactaagaccactccagccttaaatatgcatgagtcttctcaacttgaaggtcatttaaccaacctcagctttacaaaccctgaatttataactgagttgctacaagcctcaggaaaaatcagattacttgatgttggcagctgctttaacccatttctgaagtttgaagaatttctaactgttggcatagatattgtacctgctgtagagagtgtctataaatgtgatttcctgaacttacagcttcagcaaccactccagcttgcacaggatgctatagatgcttttttgaagcagctgaaaaaccctattgattctcttcctggagagcttttccatgtggttgttttctctctccttctttcttattttccatctccttaccagcgatggatttgctgcaagaaagcccatgaactgttagtgttaaatggtttattactaatcatcacacctgattcctcccatcagaaccgtcatgctatgatgatgaaaagctggaagattgctatagagtccctgggctttaaacgcttcaagtactcaaaattttcacatatgcatctgatggcatttaggaaaatctctctaaaaaccacaagtgacttggttagtaggaactacccaggaatgttatatattcctcaagatttcaacagtatagaagatgaggaatattctaacccttcctgctatgttcgatcagatatagaagatgaacaactagcatatggtttcacagaactccctgatgcgccatatgactcagattctggagaaagtcaagccagctctattcctttctatgagctagaagaccccatattacttttaagttaatatagaagcaaaaagcccctttcagtccaggctcctaaactaattgcttacaccaattggaaatactaacatgaactcagtactgaaaacctggtttgcataaaagaaatgcagaggtttacagagtttgctatttttttctacttctcaattttaaaatttattcttatatagaaagcttaaagtttcatgcagagtgactcatgtcatagcagaaactactgttactttagcatttagcactatcatagaaaggtacctttttctctttagtgctattgtgaaaacaagcataatttgctatatgttttccttttcaacttttcagtgttgactataaaccattgaatggaaaactttaagatgtagaaagctgtagattgcactttgatgactcacaagttaaatgtgatacagaaaaatagatcggttagttgttttgtgatgcacttatctttttcttttttctaactaaaattgtgatgttacagaaagtcattttatgttccttttttgtctgatgatccaatatttactgaactttttgtaattggtgataattctttttatttcttccttatattaaaagctcatttgacagcatcagacattgggggagagatgtcccccaaagtgtgtattctaattttattagccctatccaataaacaccattgccaaagtagtattttcataactttcttgttgatttgggccttggtgtgaagtatatttacctgagagttcacttttacttttcttaaacttaggcttcatttacaaaatgttttatttaagcaaggaacaatgtaatactcaataatgacctaaaacacctttttgaaagggtttgcacttggaagagagtttatgttctgttgaaaccaactttgatagggtcctcacctttccgttaaggaggtgccgcactacaagtttcaaattatatggaaaaacctaaaattaaccctctgttggtgatctcataaaatggttttgaccttttggtatcttaatttctatctaaactttatcagaaaattttctttgaatatatcaattagttggctgtgggaattttccctttccacattaataaatgcctttctgtgtttctgaatcagaagcaaatgattagggaaaaatatatgtccaaacaagacaagattagtttaaacagttaagaacatttagtccacattgtcttgtcagccagcaattgtcatggaagctatcatttttaagagtgccactgtgtggatttttttttcaagtggttattacattaaaattacctcatactgaggtttttgcactgaaatatcacagtttcagatttcatggttaatgttgtgcgtatgtttgtatgtttttaaaggaaacttgcattttcaatagttgatcctaaatttcataaactgcacttctttactctggtaaagctgatgtttttgtgcttattgtgaattgccgtagtacctttgaatgtcaaactttatttagaaatataaaacttatcctttatgatataaatggttgagtgtatgtacccagtatttctaattaaatttcacatgctaaattaatgaaagtaacaagattgtaattttttaaagtcagttgattaaatgcaataaatattggttgctcaaatatgccacaaataactcgaaatttttcatttactttcaacagcataagattctttaatatttaggattgactgttctttccagttaagcactgaaggattatgtcttgtagcttccccaagagaaggggaaggaaaaaaaagcactatgttaaggataatacagaactcttttgaactattttggtagtaccttttaccatactgtttgctttttgatttgggtaaatatcttaagagcaaagaaaacaatacaccaaatgaaaatgctttgaaagtaaatgaaaacagcgcttttgaaaggctggtatagtatgaccctggagtcagcctttgtgttacagcgaaaatgttggtgctataaattctgattgtttacagatgttgattctgcttatgctccaaagtgtgcatgatgtattttacgtagtactctgaggaagtctctttataaaacctactaccacttagtataaatttgtttgaatttatatcatttgttactgtaaattcagcttattccaattaggttggcacagatttaaactgatacacattccacaaaaaccaattcagtgtataagtattgaagtataagcagtcattgcagcttgatgccagatcatgtatgtaataacaagtggaagttaatagggccttctaatactgtatgggtactcctaagaattatttcattttggatataaagaagttatgaggcctcctgtcacattcacagctggttctccaaaataatttggttgtttcaaaaacaaatggtaatcatttggttggattcttcagtatcatgactagatcatgtggttttaccatagttgccaagtggtgggaggtagcatacctgaaaatgtacgtgtgtgtttgttgtattttttcacattttgtgaacaaagcacatttattaaaaattttaaattttctagta

SEQ ID NO: 119390 - DNA, 1271 bp, Homo sapiens
  Payload ID: 3381
  Gene Symbol: C7orf60
  Gene Name: chromosome 7 open reading frame 60
  ENST ID: ENST00000432572
  CDS Start-End: 1-1164
cggcggctccgcaagaagtaccgagaagtgggctttaaacacagctgctttaaaattttgaccaagtccaagaccttaagaaactttgaacagattcttttctcaatgggagattttgataagatctggcgagaacactgtgaggatgaagaaactctttgtgaatatgccgttgcaatgaaaaatttggcagataatcattgggcaaaaacttgtgagggcgaaggtcgtattgaatggtgttgtagtgtatgcagagaatatttccaaaatggtgggaagagaaaagcacttgagaaagatgaaaaaagagctgtacttgccactaagaccactccagccttaaatatgcatgagtcttctcaacttgaaggtcatttaaccaacctcagctttacaaaccctgaatttataactgagttgctacaagcctcaggaaaaatcagattacttgatgttggcagctgctttaacccatttctgaagtttgaagaatttctaactgttggcatagatattgtacctgctgtagagagtgtctataaatgtgatttcctgaacttacagcttcagcaaccactccagcttgcacaggatgctatagatgcttttttgaagcagctgaaaaaccctattgattctcttcctggagagcttttccatgtggttgttttctctctccttctttcttattttccatctccttaccagcgatggatttgctgcaagaaagcccatgaactgttagtgttaaatggtttattactaatcatcacacctgattcctcccatcagaaccgtcatgctatgatgatgaaaagctggaagattgctatagagtccctgggctttaaacgcttcaagtactcaaaattttcacatatgcatctgatggcatttaggaaaatctctctaaaaaccacaagtgacttggttagtaggaactacccaggaatgttatatattcctcaagatttcaacagtatagaagatgaggaatattctaacccttcctgctatgttcgatcagatatagaagatgaacaactagcatatggtttcacagaactccctgatgcgccatatgactcagattctggagaaagtcaagccagctctattcctttctatgagctagaagaccccatattacttttaagttaatatagaagcaaaaagcccctttcagtccaggctcctaaactaattgcttacaccaattggaaatactaacatgaactcagtactgaaaacctggtttgcataaaaga

SEQ ID NO: 119391 - DNA, 1004 bp, Homo sapiens
  Payload ID: 3382
  Gene Symbol: C7orf61
  Gene Name: chromosome 7 open reading frame 61
  Uniprot ID: Q8IZ16
  ENST ID: ENST00000332375
  CDS Start-End: 247-867
gtaggttctcacctacttcgactcctctccctgtcccagggaggggagaaaaggtctgggattcattgccaggaggggcttcccccaggatttcctacttctttctttactgctgtgcttgaagctcacaggagacccctcaagaggtggtcaccggcccacagcccaccccatcccccacccgccacccccaccgtaccaaatgctagctctgccctttcttctgtgtttttcccatcaagagagatggttgtggtcatgaagttcttccgatgggttagacgggcttggcaaaggattatttcctgggttttcttctggaggcaaaaaattaaaccaaccatctcaggacaccctgactccaagaaacactcattgaagaagatggagaagactctccaggtggttgagactttgaggttggtcgagctcccaaaagaggctaagcccaagttgggtgagtcccccgagctggcagatccctgcgtgttggccaagactacagaggagaccgaggtggagctgggccaacagggccaatccctactgcagctgccgaggacggccgtcaagtctgtctccacgctcatggtctctgccctgcagagcggctggcagatgtgcagctggaagtcatcagtgagttctgcctcagtcagctcccaagtgaggacgcagtcacctttgaagactccggaggctgagttgctgtgggaggtgtacctggtgctgtgggccgttcggaaacacctgcgccggctgtaccgcaggcaggagaggcacagacggcaccacgtccgatgccatgctgccccccgacccaacccggctcagtccctgaaactggatgcccaaagtcccctctagggggaaccccagacccttagagagtcctgacctcactcttacctggggtcccatatcagccccttcattccatgtattccagttgtaaaacaagtatcaaaatattgggaaataaatatcagatagttctgagtcag

SEQ ID NO: 119392 - DNA, 573 bp, Homo sapiens
  Payload ID: 3382
  Gene Symbol: C7orf61
  Gene Name: chromosome 7 open reading frame 61
  ENST ID: ENST00000418952
  CDS Start-End: 1-573
cctggcctgtggccaaacaagatggagtggggaggaaggaaaggacagctggggaggggctggaggagaaggaagagaggccaggaaactcactgctccatcccttttgtgccttcttttctgtggatggtgttgtctctgccctgcccctctctcctgtctctcctctctgtgtcttggttctcaggttttcttctggaggcaaaaaattaaaccaaccatctcaggacaccctgactccaagaaacactcattgaagaagatggagaagactctccaggtggttgagactttgaggttggtcgagctcccaaaagaggctaagcccaagttgggtgagtcccccgagctggcagatccctgcgtgttggccaagactacagaggagaccgaggtggagctgggccaacagggccaatccctactgcagctgccgaggacggccgtcaagtctgtctccacgctcatggtctctgccctgcagagcggctggcagatgtgcagctggaagtcatcagtgagttctgcctcagtcagctcccaagtgaggacgcagtcacctttgaagactcc

SEQ ID NO: 119393 - DNA, 1023 bp, Homo sapiens
  Payload ID: 3383
  Gene Symbol: C7orf62
  Gene Name: chromosome 7 open reading frame 62
  Uniprot ID: Q8TBZ9
  ENST ID: ENST00000297203
  CDS Start-End: 187-948
tggcagttgggagcctgatggaggacaagtagggcctcgaggacaggtgcgtgacagaagcacaggaaaaaaaagaaaaatgaagaaataaaaacacgagttcatcagtaaagaggtaccctggcagcataaatattatgataagctaaaagctggaatcatctggaaaaataaataagactcctcatgtccttttcggtccataaccagaagggcagcaaaaggcctttgccactggaacctcttctttttctccaagtcccacgtagcaattacctgcactttcaagaagagaaacaacgactacacctaaagaaattccttcttgataggatgtttctagtggccaagatacaagcaaatgtagaaagaaaagatgttgctgactactatgaacaaatgtttcagtcagttttgaaacatcacctaggagaagcagtgacaggattgctgctcatctatcccacttccattctgcatatcctcgagtcctccagcgacactctctacaaagttcttttagattatattggccatgtcaaagatgaaacagtattttttattcaacaaatgaaaattatagtcatttctcataacattccaatgaggctttttatgcaatggcatgtttcagtgataaaagttccagttatgtatctcgacgatgtgacacagtcacagtccctaaaggaggtcatcacagattttctcacacaaactcataaactgtcactctacctttgccagactatgaaagtaggcactaaaggaccaggcgataacttacaccaagttgcacctgacctactcctcccagaacaaatcataaagtacttgtgcaaatccgaagaattcatggacccggcaacatttataaacatgtataatagacccatacacatcactctggattctgaggtggtatggcctgctccttcacgtttctaggattgagagggataatgtgcccatgtctcttaaggagtttgtgctacttaaataaaaaaaacatttttaaagtta

SEQ ID NO: 119394 - DNA, 2028 bp, Homo sapiens
  Payload ID: 3384
  Gene Symbol: C7orf72
  Gene Name: chromosome 7 open reading frame 72
  Uniprot ID: A4D263
  ENST ID: ENST00000297001
  CDS Start-End: 51-1367
gaattatcagaaatactttatagttatcaaaaattctaaagaaaaaggccatggatgtagaaattcaggacacacctggaaagataagtatctctaaaaggtccatcctttcaggaactgttgagaatatagattacccacactattgtgatctcttaagaaaaatgaacatgccttttgtgaaaggtcttgagaacagacataactatggcaggtttgaaaagaaatgcaaccctgcttttcttaaatttcacccttatcccccttcagttttgccagactatcatttacatgatccttatcccccaccatatgggccacattatccattatttccacttcgggatgatgtgaccttaggtgattcctgttcagggtttatgagtcctggtggtgatgctgatttaaatcctggcattggcagaaccataccaaccctagtggattttagtgatgtgaaacctcaacatcgagttcccagaccagacacaggatttcaaacaacaataaaaaggcaaaaaattctatcagaagaactgcaacagaacaggagatggaattccagggaagtaccagacatttctatcagagcaagacttggaggttggacaagccctctgaaagttactcccttacaacctcatcatgaaggacgctcattaagtcacatatttacatttgatgaggaggcaacatgtacagatgaaggtgaaccacttgttcaaacaaacaagaaatgtaatgcaaaggactcattttacaagtcctctacacaaaaagcttatgaagatgttccttgggataagatgctaccaccaaaacttgttccagaagaaacaacattggaaaaaaccgctgaccccatctcacagtgttttactctgaaaagatataaaggggtgccagcaataactcagatggttggtgagctctgggacagatttcaaacaagatctttcttggcaccagtcaaaccaattaattttgtgagttcaagttctagaagtaaatatattcctctctatactggtcatgtgcagtctacaaatgctgatgatgttgacaaccccttgggagacatcgcatcgctagccaagcagcggtactctaagcctctttatacaaacacaagtcgtgctgcaaatattccaggatataccggcaaggttcatttcacagccacccacccagcaaattctaatattccatcaacaaccccatcaccagattcagaactgcaccgcgtcttccagaaagaaatggcagttgacctcttccgtcaccaggctcccctgtctcgactggtcacaactgtgagaccctacaaccctttcaacaagaaggacaaagaaaccatagactactagaggaggcggccctgcgcgggctgtccaggcctccgcctggggaaggcttgtgcggcggtgggaaataaaggctgcttctccgcgctgcgcagtgtggtgggttcggtgctgttctccgctggcctgcgcgtccctgcccagcccgcctctctcccccggcaggcggcgctcagctggacactgggcgcccgccagccgcggcgcagactcccaagccgccggcagcagggtagcagggcctgtgttgcagaagattcctctttagggttggaatattgggtctacctagaggtttcacatggcaccacttcagtgcagggattctagagcagagagcagaccatagattttagaatctcaaaggcagtctagtcaaaaatccgtatgctgtcagtgggaaccctgagctactgagaaagtgcgttcttcttttctagcaggggacatcacacaaggggacaacatctaccctctcttggcctgctccagtgtttccttcagagagaagtgttccccagtccccatgagggtcctgaagtctaagtcaggaccactttgggttagagtgtggcctgacccggccttgaccaaagagagcaccagctcgcagaatctctcaggggtgcatgtgggctgagggggagccctctggccttcggaa

SEQ ID NO: 119395 - DNA, 2450 bp, Homo sapiens
  Payload ID: 3385
  Gene Symbol: C7orf73
  Gene Name: chromosome 7 open reading frame 73
  Uniprot ID: E0CX11
  ENST ID: ENST00000507606
  CDS Start-End: 60-203
gaccggcccgcggagctgctgcagtccttcgcgccctcctcgccctccccaccgacatcatgctccagttcctgcttggatttacactgggcaacgtggttggaatgtatctggctcagaactatgatataccaaacctggctaaaaaacttgaagaaattaaaaaggacttggatgccaagaagaaaccccctagtgcatgagactgcctccagcactgccttcaggatatactgattctactgctcttgagggcctcgtttactatctgaaccaaaagcttttgttttcgtctccagcctcagcacttctcttctttgctagaccctgtgttttttgctttaaagcaagcaaaatggggccccaatttgagaactacccgacatttccaacatactcacctcttcccataatccctttccaactgcatgggaggttctaagactggaattatggtgctagattagtaaacatgacttttaatgagtagtgtcttctttatcgtttgcgatttttactaccttttttcaaaagaaaaattgatgagttttgtatagctggtcagatacaaataatagtgacttcacagtttagtaattataatgggtacttgttaaacatttggtactaaattatgttgctgcaaagtaattaaaattagtatctagagctagtttctggtgaattattcatttattttgtactgttgttaggcagctctgtagttgctaatttaaccaataagtcaatttgctattcatgaagaaacgattctgagaatcctgtcaggaattggggaatgaaaaaatacacaaaataatggtctttgtcccagtagagttcatagtctatttagtgtgcatgtttttccttaatgatgtatttgatctgacttttttccttctcaaaagaatcatacttgggattacaggtacatttgatgttatatgatggataagtgaaaagtttttaaaggagattttataccttttcacattaaaaaaggtatttatattattactttgtagtgattgtcttaagaaaaaatatagcccaaatgtatagtaaaatcagcagctcaagaagaatttctgcttctctttgtagttgatgctttgttttttcctgcagtcagaaattccttgtatttgtcaaatgtataatcagcttgtattgtttttaaattaaaaaaaaatttgaataattaacttttgccatgggacaagatacaaaagtaatttcatataaagggcctctcccacccctgttctctggctcctggctcctgtttgacaagttactgttaccacttcgccttatacttttgagaaagagtctgtgcctaaacaaacacgtgtaacacaaatagtaactatacatggaggtctagccctcgccttttttttttctttttttcttttttaatggagatcattctataccagcatgtaagtagcaaggaacctcattctttttttggctgcctaaaatttttttgaatagatataacataattgatttaatctgctactggtgaatgcttaggttgttcttttgctattacagtgataacttcaatcctaatgttattaagcatatcgattcagggtatagctataagatgaagtcctaaaagtataatttagactaaatacaaatacccatttcgctagctgttttgtttcagaggacttgttgagcagcttcactaataatgccatttttgaagacatggcaggttcagaatcaataaactggaagaattgttcagagcatcttttttcagacagtgatgacattgattctgtatatgataaagtgattctgcttctctttgacaacttgcatctctcctacatggaagtaagttttattcctgtcaatgttgtctttgtgtgtgacagattaggattaaattatggtttgacttttcctagcagcgtgatcatgggcaagtggcttttttttttttttttttttgagacagagtctcactctgctgcccaggctggagtgcagtggcacagtcttggctcactgcaactcctgcctcccggtccaagtgattctcgtgctgcagcttctcaagtagctggcatcaccaccacacctggctaatttttgtatttttagtaacgacgaggtttcaccatgttggcaaagctggtctcaaattcctggcctcaagtgatctgcccacttcagcctcccaaagtgttgggattacaggcgtgagccactgcgcccagcttttttaaacttttagattcatttaataggtaaattgcatgtcacgggtttgtagcttattctttcagaaactcttgcattatctgtagacgtggacgtaaatatccacctcatagggttttcataaaaaataattgagataatgtatgtaatgtttcacagtgctttgcagactatctaataaatagtagctattagta

SEQ ID NO: 119396 - DNA, 581 bp, Homo sapiens
  Payload ID: 3385
  Gene Symbol: C7orf73
  Gene Name: chromosome 7 open reading frame 73
  ENST ID: ENST00000509448
  CDS Start-End: 85-222
ccccgcgcatggggaggtaggctcggaccggcccgcggagctgctgcagtccttcgcgccctcctcgccctccccaccgacatcatgctccagttcctgcttggatttacactgggcaacgtggttggaatgtatctggctcagaactatgatgggatagggtctccctctgtctcccaggctggagtgcaatggtgggatcttggctcactgcagctttgaactcctgggctcaagcgatcctctcacttcaacctcctgagtagctgggactacagggcttcttcgctggaatgaggaagaggaggaagccaaggaagacagagactgtggcatcagtacggtagcctttcctagtaaagagacaagcatagctgaggagaagggtcaggaattttcaggagtaacatgatgtctcggagcagtctgtccgaacacagtgcctctttttaggacttatctagaggtaacattaagcttagttcttgccagttgctgccacgctatccactttggatttaatgggcaatggcgaatgtctggaggcagggcctggctagagtagatgtcttaatgtgaat

SEQ ID NO: 119397 - DNA, 548 bp, Homo sapiens
  Payload ID: 3386
  Gene Symbol: C7orf77
  Gene Name: chromosome 7 open reading frame 77
  Uniprot ID: A4D0Y5
  ENST ID: ENST00000616258
  CDS Start-End: 66-338
agcaggcagaaatccgcttctgagagagggcttcctgagagtgatggtgaaagttactggaagtaatgggagcagaaagggtttgtaccaaggctcctgaaatcacgcaggatgaagcagaaatctactctttgacaaacatggagggcaatattggaatcaaaggatgtgagttcaagtcttggctcttcaaattctatcaggctcgctctcaagttcttttgtgcggtgaagtcaagaatccgtacctgctcaccagcaacaaaaccacagtgaaggagcagaatgcctgtctgactcaccctgacagatcagctatggcaggtctgctgttgtagaaaattcttcaccccagaggctttatctctcctgcagggaaggctcatgagcaaatgctgtcattagcaaccatgcattgttgaagacatatagtgagaaaatatgtcaggtattgtttcaatgtaccaatgttagtagaaaatcctgaagaattttcgagatattaactgtagattaaaacaacctttaacctaaatcctgagaatttc

SEQ ID NO: 119398 - DNA, 1499 bp, Homo sapiens
  Payload ID: 3387
  Gene Symbol: C8orf22
  Gene Name: chromosome 8 open reading frame 22
  Uniprot ID: Q8WWR9
  ENST ID: ENST00000303202
  CDS Start-End: 174-428
cactggccctgcgtatgtggtgcagcctctcttcaatccctaagaactggttctttcaaagcatgtattttctgaagaaactttagaaccacgtttattttaaaagaacgaattggagaaaacaaatcgattaatgctcacagcttcttgggtgctttctcacgggtaaagccatggcatccgtaccttccattggttgccttctagccagaaatcagtattatcgaaagtccagtgtttcttcagttagttctttaactagctctgattctgttaacttcatagatgacgacaaaccacagcaagggttgcctgaagtggcagaatccacctggtggtttaaatcgtttttccattctgaacctgtgctttcaaatgtgagaataaaagatctgtctgctactgggtcgctgtcaggaagatcatagcaccctttccagttcaatcactcaagagtggtggagaagtcatatgccaaactgtgtcattgtttggcgggggatggactgagaatcagaggaaagggtctaaatttgttttgctcataccttcaggaaaagaataaccattgtctagttgttgtcttaaataaccttaggataacactgctgattttgattagcttctgtgtggtgcaaattactagacaggttgaattgggagtttgtgtgcagttgttttcagacattttgaactcaaacacactgactagcacagttgtaatttaatatatttaaactacttattttggattttagacatttgaatgcctagtaactaaatggaatagaaagaatctataataaagggattcatagatgccaatgttgaaatatagtgattctgatgaatttcctatctaagacaaatttagaatcattatttaaaattagaatcattatttaaagtatttttaaaagccaatgcaagattgattgttggaaagatgttttcttgacactctttatcaagtttattcatttgaattatctggacagtgtttcatttatttatcccctcctctctgactactataaaatcaacccagattacagatgagcactttgtagctgatcatctttgcactgccatttgatgaacatgttggtaacggttgcctgccttatgtagcatgaacagttgattctgacaatcaagatcctctgcctgctgcagtggtccatacatgaacagctccccttcagcgccccagctattccaggactcttctccattgtaagaagacagaaatgtgtctgagatctcatttatgagacaagatcacagcagccactgatataaaaaaagtttaggcatttttctcaacacaaagactatcgctggaagtggcacttgctacctggtgcatctttgaaaagtgtgcctttagaaacaagacacccttttaaagtaatatgtcttcaaatgttgtgacttacataaagtagctctttcattttttatatcatttttattaaaaaaacttaagttagactctt

SEQ ID NO: 119399 - DNA, 1272 bp, Homo sapiens
  Payload ID: 3387
  Gene Symbol: C8orf22
  Gene Name: chromosome 8 open reading frame 22
  Uniprot ID: Q8WWR9
  ENST ID: ENST00000399653
  CDS Start-End: 184-429
acggacctaccactggccctgcgtatgtggtgcagcctctcttcaatccctaagaactggttctttcaaagcatgtattttctgaagaaactttagaaccacgtttattttaaaagaacgaattggagaaaacaaatcgattaatgctcacagcttcttgggtgctttctcacgggtaaagccatggcatccgtaccttccattggttgccttctagccagaaatcagtattatcgaaagtccagtgtttcttcagttagttctttaactagctctgattctgttaacttcatagatgacgacaaaccacagcaagggttgcctgaagtggcagaatccacctggtggtttaaatcgtttttccattctgaacctgtgctttcaaatgtgagaataaaagatctgtctgctactggcatgaacagttgattctgacaatcaagatcctctgcctgctgcagtggtccatacatgaacagctccccttcagcgccccagctattccaggactcttctccattgtaagaagacagaaatgtgtctgagatctcatttatgagacaagatcacagcagccactgatataaaaaaagtttaggcatttttctcaacacaaagactatcgctggaagtggcacttgctacctggtgcatctttgaaaagtgtgcctttagaaacaagacacccttttaaagtaatatgtcttcaaatgttgtgacttacataaagtagctctttcattttttatatcatttttattaaaaaaacttaagttagactctttttctgtctgttgagtgatttatttattatgccttaaaactgacttgtcaatgtttcacataatggtttaaagggcattgaattcgaaattttagaaaataattgtaaaaattcaatttttttaaaagaatgaaggttggaaatagcatatgtatcattaagtatattagagctaatcaattggtcattgtatagactttaaaatttatgactttaaataatatttaataacatggaaaattatattatggcattaaaaattagcataatacaccatatatggtacaatcgtagttgtattaaaaagttacatatgcataaagatagactggaaggaactgtaccaaaatgctgacagggctatttctggagatgggattatgggcgtttttcattctctttttaatatatttttccatatctcccaatttttctaatatgacaagtattgtgcgtaattagaaaataataaatgttaatataaaaaa

SEQ ID NO: 119400 - DNA, 739 bp, Homo sapiens
  Payload ID: 3387
  Gene Symbol: C8orf22
  Gene Name: chromosome 8 open reading frame 22
  Uniprot ID: Q8WWR9
  ENST ID: ENST00000522267
  CDS Start-End: 187-441
atcacggacctaccactggccctgcgtatgtggtgcagcctctcttcaatccctaagaactggttctttcaaagcatgtattttctgaagaaactttagaaccacgtttattttaaaagaacgaattggagaaaacaaatcgattaatgctcacagcttcttgggtgctttctcacgggtaaagccatggcatccgtaccttccattggttgccttctagccagaaatcagtattatcgaaagtccagtgtttcttcagttagttctttaactagctctgattctgttaacttcatagatgacgacaaaccacagcaagggttgcctgaagtggcagaatccacctggtggtttaaatcgtttttccattctgaacctgtgctttcaaatgtgagaataaaagatctgtctgctactggattacagatgagcactttgtagctgatcatctttgcactgccatttgatgaacatgttggtaacggttgcctgccttatgtagcatgaacagttgattctgacaatcaagatcctctgcctgctgcagtggtccatacatgaacagctccccttcagcgccccagctattccaggactcttctccattgtaagaagacagaaatgtgtctgagatctcatttatgagacaagatcacagcagccactgatataaaaaaagtttaggcatttttctcaacacaaagactatcgctggaagtggcacttgctacctggtgca

SEQ ID NO: 119401 - DNA, 788 bp, Homo sapiens
  Payload ID: 3387
  Gene Symbol: C8orf22
  Gene Name: chromosome 8 open reading frame 22
  Uniprot ID: Q8WWR9
  ENST ID: ENST00000517663
  CDS Start-End: 104-358
cagtgtgaagaagaggaagatgaagacctttctgatgattcacttctacttaaggcataattaatgctcacagcttcttgggtgctttctcacgggtaaagccatggcatccgtaccttccattggttgccttctagccagaaatcagtattatcgaaagtccagtgtttcttcagttagttctttaactagctctgattctgttaacttcatagatgacgacaaaccacagcaagggttgcctgaagtggcagaatccacctggtggtttaaatcgtttttccattctgaacctgtgctttcaaatgtgagaataaaagatctgtctgctactggattacagatgagcactttgtagctgatcatctttgcactgccatttgatgaacatgttggtaacggttgcctgccttatgtagcatgaacagttgattctgacaatcaagatcctctgcctgctgcagtggtccatacatgaacagctccccttcagcgccccagctattccaggactcttctccattgtaagaagacagaaatgtgtctgagatctcatttatgagacaagatcacagcagccactgatataaaaaaagtttaggcatttttctcaacacaaagactatcgctggaagtggcacttgctacctggtgcatctttgaaaagtgtgcctttagaaacaagacacccttttaaagtaatatgtcttcaaatgttgtgacttacataaagtagctctttcattttttatatcatttttattaaaaaaacttaagttagactcttt

SEQ ID NO: 119402 - DNA, 2677 bp, Homo sapiens
  Payload ID: 3388
  Gene Symbol: C8orf33
  Gene Name: chromosome 8 open reading frame 33
  Uniprot ID: Q9H7E9
  ENST ID: ENST00000331434
  CDS Start-End: 115-804
ccgcccgcgccccgcccgcgccccgcggaacctagagtcgcaggcgcgttcttgaaggacggaattcggcgtcggactctgcgccccgcgtagttccggtggcgactgcggcgcatggcggccctgggacatcttgctggggaggcagcggcggccccaggcccgggtactccctgcgcgtcccgcggagcccggcttcccggcccagtttccagcgcccggaatccttccactgtctgtctctgcccagagcaacctacgtgcagtaacgctgactccagagcgcacccgttgggcgatgaaggcggcacagcgtcgaaaaaacaaaagaataagaagaaaacgcggaacagggcctctgtggcaaatggaggcgagaaggcctcagagaaactcgccccagaagaagttcccctaagcgctgaggcccaggcacaacagttggcccaggaattggcttggtgtgtggagcaactggagctgggcctcaagaggcagaaacccaccccgaaacagaaagagcaggctattggagcaatccgaaccctgcgcagcaaaagaacgcccttgccccggaagaggcagctgatgcactccttgtttggagactatagggctcagatggaagccgaatggcgtgaggccctgcgggctctcagagctgctgcttattcagcccaggtgcaacctgtagatggagccaccagaaagaagagccaaagggtctgcaggcctcgctctatatggagagccaaagccactctggacatgcctgatgaagagtttaggttcaatttcttttagcgtctccccgaacctgaaacaatccccctcccttggggtggtgtaggggtttgttttgagtgcagagcctttccaggacttctgttgtcagagaaccctggagttggtctgtccctggctggtccaaggatttgtagctgttgtgaaggtgtgagaccatcagataggcaaaagaccccgttcgttttctgatgaaatgttctctctttcagaagagagagagaggtgcatttagaaaatatgcaataaattgaagtgagtgttcaaagtattgtagaaggaatattgtactcagtctttaggattagattaagtggctgttggtaacaaagattagtggagaagctgtataatcgtacactggttttcacttttgaaaggaatccctgtcaaatggtttagtgcttaatgctgttatgtcatattgccctaatctctatttttgataaaattggataaggagtgaaagagtatgctgaccacctatgttagaggaagtacagaagatgcaggggtgtggtatccctgggtccagtccctcacctggtacctttgtgcatgttgccttcattcctgagcaggtatcatcctcagggaaccagcatggcacctaccaggccaggctctgttcttaggagcaaggagcttcttgcgctaacagttctggcctgagacctggattgagccttggcagacttcttgtctaaatgttggccattcagtctcaggccctctgttccatggaattgggaatctccaggtgacctaatcctcattggtggcttgatgtttgctggtatcttccaaactcagttcccagactagattgatacctggagcccagctgcctactcagcatttccacttgggtgcttcataggcatttcaaacctgatgtgtttaaaacacttgattaggctccggttttcctttggcttctgcttttcagtgaatggcatgactgcctatgtgggtggcaagccacccaggtgccgaggaaagagactgagggcacgagctgttccagtataataaaatatataaaataagaagagttatactagatctagatcatagacatgattatatgtgagtatcattaatcattagtttatagcaattactctttattccaatattataataatcctcactctacaatcataacctaggaaaaaccaggccatacagagataggagccgaggggacatagtgcgaagtggccagaagacaagagtgtgagccttctcttatgcccggacagggccaccagagggcttggtctagcagtaacaccagtgtctgggaagatgcctgttgcaaagtggaccatggtctagcagtagcatcagtgtcaaggaaaaacacccactacttagcagactgggaaaaggagcctccctttccccgggggagtttagagaagactactcctccacctcttgtggagggcctgacatcagtcaggcccgcccgcagttatccagaggcctgtctccctgtgatgctgtgcttcagtggtcacgctcctagtccgctttcatgttccatcctgtatacctggctctgccttttagatagcaggagcaaattagtgaaagtactaaatgtctgatatgcagaaataatggcataagctgtctctctctcttctctctctctctgcctctgctgccaggcagggaagggccccctgtccagtggacacatgacccatgtgaccttacctattattggagatggttcacattccttaccctgcccctttgtcttatatccaataaatatcagtgcagcctggcatttggggccactactggtctccgcgtcttggtggtagtggtcccccaggcccaggtgtcttttctttta

SEQ ID NO: 119403 - DNA, 2281 bp, Homo sapiens
  Payload ID: 3389
  Gene Symbol: C8orf34
  Gene Name: chromosome 8 open reading frame 34
  Uniprot ID: Q49A92
  ENST ID: ENST00000325233
  CDS Start-End: 119-724
aagaaaatgaaacagaattgaaaatggtcttgtaaaattccacttggggtggcgatgctttgtggcttgaagtgtaagggatgagaacagcatgtgaattccaagaaagcaacacagaatggaaaatggatttacaatgtgtcagacagggaggcaacatcctgtggcatgtggcttgcatctcagcggtgggaaagaggatcttaatgatttaagaatggagggagtaacaaccctggtaccttctgggagcaaatttaaccaaggccgtcctacttaccctgctgagcctcaggccaaggtcacactgaacatctgttcaaggtgtgccaggcttcaaggagacaacctggaagaaaggacagaagagtcactaccaatactccattctccagatgaaaaaatcccagattcattcgattccttgcctgggactgaagaagcactaatggaggagggtgacgaatttgagaaagcatctaaactaacaggacctggagaagcctccagtggagtaggacactcactgaaaaactacatggaagaagatgaatccttaaagcaattgcaggtagttcatcaaccatggatcttgccaagtgacacagaaagtgaaggagtggaagcagaacaagagaaacacctactaaatcagaatctctgtggctgggactctgaattctgcatttttcatactttggcttctttcctcatctataaataagtttgaatataaaatgtgagtctggagaaaaaggaaggctaaaatttgaagaaatatacatggagaagacatgcaagacagtgtattagtcggttttcacactgctataaagaactgcctgagactgggtaattgtaaagaaaaaaggtttaattgactcacagttccccatgtctggggaggcctcaggaaacttacagtcatggcagaaggaaaaggagaagcaagcactttcttctaaggagagagagagagcagtgaaagccacacatttttaaaccatcagctctcgtgagaactcattatcaagagaacaacaagggggatatctgcccccatgatccaactacctcccaccaggcccctcttctgacacatggggattacaatttgacatgagatttgggtggggacactgagccaaataatatcagacaggtcctccagactgtgggttcaatgcttacaaaatcaaaacacaaaacatttagaatcaatttagccagtaccctctaattacattttagatttttaaaaacacaaataaataagctaaaaacacacaagcaaacaaacaaccaaaccaaaccaaaccaacaaaacaacacaaatgtcccaaataaagaaataatagccaaagtcacagatgaaagctaatgctgtcataaaacattaagacttccccacttgggtttgggtcctagttcttcctgaggtcttaatgtctgtaacaataggtaatttggccctgggtctccttaaggcagggagattgagatgatgacacggtatagagcctgtcacctgcaaggactgactcaggtataaaaagggaaataaaatacctgtactctctaactgtggaacaagccatgaaatttgctattggtattagactttgaacgaaaaatgtaaagatacacatagggaatcaaactctcagctctgtactttggttattcggttcaaacttaaactatctgtattgtcagaaaccccacattataataacaattggccagcttcattaaaattcacagggtcctctcatgtgtaaatgtaagaactggggcatttagaactcccaaagatttaaatatcaactcctgctgaagacgagctctcaatcaaattacaagctgcctgaaaagttatagtaaaacaacagagtcagcaaatgctaaaaacactagaattagaatgatgagaaaggaaagaaataagacaatcagaaagagaccatattaaaagtatgcttaagatatttaaagatatagatcaggcgcaatggctcacgtctgtaatcccagcactttcggaggccaaggcgggcagatcacgaggtcaggagatcgagaccatcctggctaacacggtgaaacgccgtctctactaaaaatacaaaaaattagtcgggcgtggtggcacacgcctgtaatcccagctactcgggaggctgaggcaggagaatcgtttgaacccgggaggtggaggttgcagtgagccgagatcacaccactgcactccagcctgggtgacagagtgagactccatctc

SEQ ID NO: 119404 - DNA, 3652 bp, Homo sapiens
  Payload ID: 3389
  Gene Symbol: C8orf34
  Gene Name: chromosome 8 open reading frame 34
  Uniprot ID: Q49A92
  ENST ID: ENST00000337103
  CDS Start-End: 1593-2876
gcccaggtaaagccatgttttcctacacttaaaaatgtaaataaatatcccttagataatctggacagcagtttcttatatagcatgtctgagcactatattttgctgggctataaaaggtttaattgttgtttattggtacaataagggattctagttactaatatctacctgtagtcaataaagcaaacattgattggttgatcgaatcattgattcattcaataggtattgattcagcaccagctatgagctaggcagagttctaggccctacagagaaaactgatatcaaactaagaaagtctttttccaagtgctacagtaggggtgggggaggagagagataacaaactggtgagcaaatgttaaacaaaatgattctagagagtgctaaatactgtgaggaagataaaatgataaaataataaagacttctgaagattggttagggtaacctcttgtagaagtatcattggagaccgaaggatgacacaccagccatctgaccatgagagaacatcattcaaggcaaaggaaacagaccaccaccaacaaaaaaagatgcactggggaatttccagtaacacttttgttagctctcttaatatctgattttttgagcactagaacactgcctctcacagaatcctagcttaaaacagcaatgaacagactagaattctaggctaaaaccaacaagatgaaatgtgactgatatgaatataaatggtgcacataagttcacaaacccaattacacagcacaaaatgatatccacgtggcttgacagctgttcatattagaaaaatctagggattctaatggactacatattggagattgctctttgctgttcctgactggaaaaaaaaatatgtagatattacccttgggcagatttcagcccaacttaaagtatcattagagctgtccaaaatggaacagcctgctttgcacatagagaactcacattgctcaactcaaaaaagagcagaaggaaggaagaaggaaggacacgtaacagggatttttacaaaaacagaattcggtatttcttggagactactttaagacagtttttggtttctgtaagtctgtgacttattacttgttcctttaattccaataaaattttcttcatttttgttatttttaaaacattaagaagaaaaaaatgatattgatataaggtagatggtgaagtttagcaaaagtttagtttataatgatatctctcaaaatagcaaactgaagtttaaaattcttaagctataattttaaaggaatttagattaaacttttaatatgttgttggctaagtataatacaaaataaaaactaaataaatcttggttttgccacatattagctgtgtaatatagacaatttacttctctgttattgtttcctcagaatgagggcagtaacttgtagccgtctgaaaagattgttataagcatggagttagttgctgtatataaagcagttagaccagtacctgacaatattacatgctaagtaagtgcttgctattactgttgctgttattattaattataattgtgtgctctattctgccttcaggaattaatgaccaagttaataactgagacacctgaccagccaatcccatttctcattgaccatcttcagtctaaacaagggaaccgtggacaacttcaaagaactttgtctggatctgcagctctatgggcagaaagtgaaaaatcagaatccaaaggaacaagaagggatttcagaagctatgataaaccttggcaattaaatgcaaagaagcctaaaaaatcaaaaagtgaccttgctgtgtctaatatttctccaccatcaccggactccaaatcattgccaaggtcagtagagcatccaaagtggaactggaggactaaaccacaaagccgtgattttgatgaattgaatcacatccttcaggagagcaagaagctggggaaagcccttgagaatctctctcgaagtattgcaatttcagatgaactcgataaggaaacagtgacatttaattcttctcttctgaggccccgtgtgattggagaatggattggtagagaagaaaatgatgctgatcccctagctgctgaaatgctacagcctccaattccaagaagcaaaaatgaccaatgggaaagtgaagatagtggctctagtcctgcaggaagcttaaagatggagcctaagaacaaaggattaaaacagcagcaacagcaacataagaaactcctggccgcaatgctctctcaagattcttttgagtccatccacagccctaccccatctgtaacagaagaagatattgataatgaagatgatgcaatggaattgctggaggatcttaatgatttaagaatggagggagtaacaaccctggtaccttctgggagcaaatttaaccaaggccgtcctacttaccctgctgagcctcaggccaaggtcacactgaacatctgttcaaggtgtgccaggcttcaaggagacaacctggaagaaaggacagaagagtcactaccaatactccattctccagatgaaaaaatcccagattcattcgattccttgcctgggactgaagaagcactaatggaggagggtgacgaatttgagaaagcatctaaactaacaggacctggagaagcctccagtggagtaggacactcactgaaaaactacatggaagaagatgaatccttaaagcaattgcaggtagttcatcaaccatggatcttgccaagtgacacagaaagtgaaggagtggaagcagaacaagagaaacgttccgctgatcttcttctttgcgttccatgctcttcttgtcctacgctggtctactctggtttgtgaaacagagagaagaagttgcaagtggtccttaaagaaatgcagttattcaaatccttatgtatagttctaattttatttactatgtgtaatcatttagagaatggttatttttataatctcaataataaacaagtactatcgtagccagggggtgcccaagtatgtaatcagagaacactaatcctggcaaaggattgtggggtggtcaggaggccggctgccttttgacatggttagagtcctgggtttagattactttataaatagttattaagattaatatttgatatattaaatattgcctgattcaaataactttgcttaaaatttttctgtattttaacttgtctagggttttctacttcttctatttttataatattttctcattttttagattactaaacattctacttatccacatgtgccaagatgtgccatttaggtctctgcagaaattagctgtttggtatcatcacctgccatacatgttgtgtgcagcagtgagaagtatattctctaccactgctctttctcatgattattttctctattcctattaaaatgaataattgatatgttaattaagtaaagcaaatcaataaggaatgaaatgcatggcccaaaacatagaaaatgaaaatcgtttgaccatttatccaattattgaacccaattaagatgatccattttaaatttaatatatgctcgcttttggaatgtgttatgcattgatgttaagtgaatggatctaagtaaatctattgatatctcta

SEQ ID NO: 119405 - DNA, 3571 bp, Homo sapiens
  Payload ID: 3389
  Gene Symbol: C8orf34
  Gene Name: chromosome 8 open reading frame 34
  ENST ID: ENST00000348340
  CDS Start-End: 47-910
gccgcgcgttctccctgcactctcttcgcggtcccatctgttccccatggcgtctcatccgcaaacccggatccaggcttacctggagaagaacaagatcggtcccctgtttgaggaattaatgaccaagttaataactgagacacctgaccagccaatcccatttctcattgaccatcttcagtctaaacaagggaaccgtggacaacttcaaagaactttgtctggatctgcagctctatgggcagaaagtgaaaaatcagaatccaaaggaacaagaagggatttcagaagctatgataaaccttggcaattaaatgcaaagaagcctaaaaaatcaaaaagtgaccttgctgtgtctaatatttctccaccatcaccggactccaaatcattgccaaggtcagtagagcatccaaagtggaactggaggactaaaccacaaagccgtgattttgatgaattgaatcacatccttcaggagagcaagaagctggggaaagcccttgagaatctctctcgaagtattgcaatttcagatgaactcgataaggaaacagtgacatttaattcttctcttctgaggccccgtgtgattggagaatggattggtagagaagaaaatgatgctgatcccctagctgctgaaatgctacagcctccaattccaagaagcaaaaatgaccaatgggaaagtgaagatagtggctctagtcctgcaggaagcttaaagatggagcctaagaacaaaggattaaaacagcagcaacagcaacataagaaactcctggccgcaatgctctctcaagattcttttgagtccatccacagccctaccccatctgtaacagaagaagatattgataatgaagatgatgcaatggaattgctgggtaattttaaaaattaataatttctcattttcttctttgacattgtaaaaaaaacgtgtggtgattaagagattttaaaagttttgaatagccttgtcttagggaaaagaaaccatttagtacatattttatttacattagactcacataaagttgcatgtaagaactaaattgaaataccctaagcatatgaatatttattagactgtattttgtgctttgtgtatgctgcactttaccttctgactacgtaatgaagcgttattctgtgtgcaactgtgatcaaaattcaagtctgtctgctttattctctgataataattgccttgtttacatctattgtctataaaatatacccaaagtacatatttcagccctcactccaaaatgtctaccttttattttgaggatgctttagaaaaatagaataaagttgaaaggggcagatagtaaattcaggttttatgttttccgtaaatgacgggaaagtttgcagagatttcaaagtttcttcaggcctgttactttcatgaaaccttattaatcttgtatatgtaggatatctttttatattttttaatgtagtatatgtatgtttttgcttcatcagaaatctcttcatataaatttttaaactgaacttctctttggaacatcatttttctgaagaaagaaaatgaaatgttatttcagagtgatccacatataaaacaatgagttttgaagtcagtggtatcaattattctgctacaaataaagagtatgattttcaaatactttataacaatatgctgttgtattttatttagaaagagaataaataatataattatttgaaagccttaaacacgttttacatatagaatatggaatctcagaaaaatataggccattttctgaagtttttgttaaaaatgagattccttggttttaagtgtttatggcagtaaaatactatcattataaaaaatgatatattgcttatcatttttgcataggcctacaaaggtgttatttggtcaatggtgacaggtttgaaagatgttttctgatgctgtaaaaactgcattcatgctaacattaaggagattgtatcatggcgttttcattacatgctgttggtcccttccaattgggtcttttcctcacctccaaatcattaacatggcagacgtgccctatgtggcagtggtagcttcattcaacaaacatttactgagcacttactctatgctaagcacttggctggggtctgggaacataaaaataaaatcattgtgatctgtgtttgaaggaattttacattgtaatgttcaagatacaatacgtcactacctgtgctaactgcgctaattggatgaagcacacagttgtgtataggggtaacacctaaagcagaggtaagggacagtgacccaggaatgtttcctagagaagccgattactctggctagtcctgaaaagcaaatagatgtaagctcagcaggtggggtgtggtcattgtaggtttgctcacgtaggtatgggctgttttgcgattgtgctccataactatacctgtaaatggttcctctgctttggacagtaacagggaaggggcaactgagatccagggtttctttcaggagatgcagttgtccactccatgctggtactccctagatctcagctgccctgactgaaggttctagtctcccaagctgaagaccgaggattgagtcttggagactatctaatgatgagcaattaataactagtcctcattaattctttttttagacattttagcctgtggtctgagcaagtttaataataagagatagttgaaggtttggactttcttcatgtaattccacatatctcagcacaggtggcaagcagtgtaataatgttggtctctaggtcatgagattatcctcttatagcttggaatgttacaagtccactggactttatcttaaaataatgccatattcaatttcttgtttttgaaatggattccagcaaaatgtatgtgattgtgtctatttcagaaaaatataaatgctaagttcttggaaatttatgtgaaatctaattttatagagtttatatagaatcattgtaagatgcaatagagacatctggtatttaaaatctttttgaatctacattttgtagatgtgtgtgctatagcttatgtgtttgtaaatgtttaacttgtctttgttatctataccaagatataactggctgaaaaatatttattatgcatggaaagcactctgtaaaccttgtgaagtgataaataagtgaaaggtataattgttagttgacattaatataaaaaaggattattcttcaataaaattggttgatttgaagggaaaaaatccttttagttgaactagtagaagttagtaataactattgactcttgttttgtttattaaggaaactagcattgttaatatatactgattaatatttaattattcacagttgtttaattatatatttgtggatttcttttctaaatgttttaggcatatgaaaatattatagtacaacacctgtaatttttaagtagatcaaatattttctgtaagattgctttaaatgctccttataaattcacattgcaaaagtaacttaatatggaattaacacttgtcagataataaaacagccaaacttgt

SEQ ID NO: 119406 - DNA, 2223 bp, Homo sapiens
  Payload ID: 3389
  Gene Symbol: C8orf34
  Gene Name: chromosome 8 open reading frame 34
  Uniprot ID: Q49A92
  ENST ID: ENST00000518698
  CDS Start-End: 292-1908
agcctcggggagcagcccgggctgtttgttccgtcaccggggaaaggaggtacacacagtcgcgcgcgcacggacacacacacacacgcacgcacgcacacacaccggtggcgagttcgagccccgcggcccctgtccgcccgcgtgcgcccctcgacacagctcgcctcccgccccctgattcctgctgctgccgcccagaggagaaaggaacctctgcctcgaatttccccactgcgccgggcgctgcggagagcggcgagggtgggcgcgaggcggagaacgcgatgaatgagttctcccctcgcctcggagttgtctgagttggcggcgctgcgcccaggcttccggctctcagcgccccacgcgcgcgtggctccccgggctgccacccacgcccgcggccggggccgagccagccacgcagggcagccgaggctccggagctcctgtcccggccccagtccgggtaaaaggagggttgtccccagcggaggcgcacagccgcgcgttctccctgcactctcttcgcggtcccatctgttccccatggcgtctcatccgcaaacccggatccaggcttacctggagaagaacaagatcggtcccctgtttgaggaattaatgaccaagttaataactgagacacctgaccagccaatcccatttctcattgaccatcttcagtctaaacaagggaaccgtggacaacttcaaagaactttgtctggatctgcagctctatgggcagaaagtgaaaaatcagaatccaaaggaacaagaagggatttcagaagctatgataaaccttggcaattaaatgcaaagaagcctaaaaaatcaaaaagtgaccttgctgtgtctaatatttctccaccatcaccggactccaaatcattgccaaggtcagtagagcatccaaagtggaactggaggactaaaccacaaagccgtgattttgatgaattgaatcacatccttcaggagagcaagaagctggggaaagcccttgagaatctctctcgaagtattgcaatttcagatgaactcgataaggaaacagtgacatttaattcttctcttctgaggccccgtgtgattggagaatggattggtagagaagaaaatgatgctgatcccctagctgctgaaatgctacagcctccaattccaagaagcaaaaatgaccaatgggaaagtgaagatagtggctctagtcctgcaggaagcttaaagatggagcctaagaacaaaggattaaaacagcagcaacagcaacataagaaactcctggccgcaatgctctctcaagattcttttgagtccatccacagccctaccccatctgtaacagaagaagatattgataatgaagatgatgcaatggaattgctggaggatcttaatgatttaagaatggagggagtaacaaccctggtaccttctgggagcaaatttaaccaaggccgtcctacttaccctgctgagcctcaggccaaggtcacactgaacatctgttcaaggtgtgccaggcttcaaggagacaacctggaagaaaggacagaagagtcactaccaatactccattctccagatgaaaaaatcccagattcattcgattccttgcctgggactgaagaagcactaatggaggagggtgacgaatttgagaaagcatctaaactaacaggacctggagaagcctccagtggagtaggacactcactgaaaaactacatggaagaagatgaatccttaaagcaattgcaggtagttcatcaaccatggatcttgccaagtgacacagaaagtgaaggagtggaagcagaacaagagaaacgttccgctgatcttcttctttgcgttccatgctcttcttgtcctacgctggtctactctggtttgtgaaacagagagaagaagttgcaagtggtccttaaagaaatgcagttattcaaatccttatgtatagttctaattttatttactatgtgtaatcatttagagaatggttatttttataatctcaataataaacaagtactatcgtagccagggggtgcccaagtatgtaatcagagaacactaatcctggcaaaggattgtggggtggtcaggaggccggctgccttttgacatggttagagtcctgggtttagattactttataaatagttattaagattaatatttgatatattaaatattgcctgattcaaataa

SEQ ID NO: 119407 - DNA, 1428 bp, Homo sapiens
  Payload ID: 3389
  Gene Symbol: C8orf34
  Gene Name: chromosome 8 open reading frame 34
  ENST ID: ENST00000521406
  CDS Start-End: 30-650
tgtgtgctctattctgccttcaggaattaatgaccaagttaataactgagacacctgaccagccaatcccatttctcattgaccatcttcagtctaaacaagggaaccgtggacaacttcaaagaactttgtctggatctgcagctctatgggcagaaagtgaaaaatcagaatccaaaggaacaagaagggatttcagaagctatgataaaccttggcaattaaatgcaaagaagcctaaaaaatcaaaaagtgaccttgctgtgtctaatatttctccaccatcaccggactccaaatcattgccaaggtcagtagagcatccaaagtggaactggaggactaaaccacaaagccgtgattttgatgaattgaatcacatccttcaggagagcaagaagctggggaaagcccttgagaatctctctcgaagtattgcaatttcagatgaactcgataaggaaacagtgacatttaattcttctcttctgaggccccgtgtgattggagaatggattggtagagaagaaaatgatgctgatcccctagctgctgaaatgctacagcctccaattccaagaagcaaaaatgaccaatgggaaagtgaagatagtggctctagtcctgcaggaagtttagaagacacgtaatgcaatgatgcagaggacagatgccatggcaagagactgaagctaaataaacttcttccttccattttcaacttaaagatggagcctaagaacaaaggattaaaacagcagcaacagcaacataagaaactcctggccgcaatgctctctcaagattcttttgagtccatccacagccctaccccatctgtaacagaagaagatattgataatgaagatgatgcaatggaattgctggaggatcttaatgatttaagaatggagggagtaacaaccctggtaccttctgggagcaaatttaaccaaggccgtcctacttaccctgctgagcctcaggccaaggtcacactgaacatctgttcaaggtgtgccaggcttcaaggagacaacctggaagaaaggacagaagagtcactaccaatactccattctccagatgaaaaaatcccagattcattcgattccttgcctgggactgaagaagcactaatggaggagggtgacgaatttgagaaagcatctaaactaacaggacctggagaagcctccagtggagtaggacactcactgaaaaactacatggaagaagatgaatccttaaagcaattgcaggtagttcatcaaccatggatcttgccaagtgacacagaaagtgaaggagtggaagcagaacaagagaaacgttccgctgatcttcttctttgcgttccatgctcttcttgtcctacgctggtctactctggtttgtgaaacagagagaagaagttgcaagtggtcc

SEQ ID NO: 119408 - DNA, 1948 bp, Homo sapiens
  Payload ID: 3389
  Gene Symbol: C8orf34
  Gene Name: chromosome 8 open reading frame 34
  Uniprot ID: Q49A92
  ENST ID: ENST00000523686
  CDS Start-End: 50-439
acagccgcgcgttctccctgcactctcttcgcggtcccatctgttccccatggcgtctcatccgcaaacccggatccaggcttacctggagaagaacaagatcggtcccctgtttgaggaattaatgaccaagttaataactgagacacctgaccagccaatcccatttctcattgaccatcttcagtctaaacaagggaaccgtggacaacttcaaagaactttgtctggatctgcagctctatgggcagaaagtgaaaaatcagaatccaaaggaacaagaagggatttcagaagctatgataaaccttggcaattaaatgcaaagaagcctaaaaaatcaaaaagtgaccttgctgtgtctaatatttctccaccatcaccggactccaaatcatgtaaggaagtctcttattcaaatgctattcaaagcatgtaagtttatgttgttaagaaaatgaagaaaaggtattaattgaagcccaacttttcatctgatatttctggcctttaatcttagtgaatttcacttttactccgcatttacattgatcttcattcatacgtatgtatttgcttgcttatattctcaaacatgtgtaattcacttggacccttttgagtataatattccttgaagaatataaactgcatggagcgggtctcttgtttctcatagccaattgtagcattacatcatattgaaagcagtagctacctatatttaatgaagtatgtaaaagcaaattaaatctcttagaatagaagcaaagaagatttctattcaaaacatttcataaaatttcttaaaaaatatttcatctgggattttcctgaagtcctactcattaatttgtgatggaagtccctatattctcttcactactactgtaatatctttgtttttatgttactacaaaggaatgactgaggttgggtattttataaagaaaaaaggtttatttggcttacggttctgcagactgtacaagaagcatgacactagcatctgcttcttgtgagagccgcaggaagcttccactcatggcagaaggtgaaggggtgcacgcatcatatggcgagaggaaggagaaagagatagcagagggaggtgccaggctctttttaacagtcagatcttgtaagaaccaacagagtgagaagtcactccttaccatgaggacagcaccaagccactcatgagggattgacccccataacccaaataccttccaccaggccccacctccgatattggtgatcaaatttaccatgtgatttggagaggacaaatatccaagctataccacctaagtatcccttctctctcaatggcctactgctttggtagctactgggattctccagtgctctgctatccccacatatgtataaacatgtcaaaaatctcaggagcctctagcaaatcacagctattcttggaagaaaagagaacttgcaagctgttcttcttatacatcaattccttgtgcttgttacagggtgagatgtttgattttagtttcaacagagaaaggagtaggcagaaaatatttatctttgtttgaaaatgtttgaaaaaccactatgtgctaactggaatctgcatctgggtcatttgtgaaagcaactaaatttaactttgtgagcagcttcatttacatagtggtactcataaaaagtattgcattaaccacaccaagttcttgtgagaattatatgaagtgttaacaacttaaaatgttcttcagaaattgtgattgtaaccaaattgtcctgcttcatcagtttggtatatagaattaggtcccaacattttaaaaaatatacaagtttaaaatttgcatgtcttttttacaacagtatagccagtaatatccagcacagtgcctgtttcaattaataaatgctaaatgataaaaatgaataaaggaagaaataaaaaatg

SEQ ID NO: 119409 - DNA, 3334 bp, Homo sapiens
  Payload ID: 3390
  Gene Symbol: C8orf37
  Gene Name: chromosome 8 open reading frame 37
  Uniprot ID: Q96NL8
  ENST ID: ENST00000286688
  CDS Start-End: 13-636
aggcgattcaagatggcggaggacctggacgagctcttggatgaagtcgagtccaagttttgcacacctgaccttctaagacggggtatggtcgagcagcccaaaggctgcggcggcggcacccacagtagcgaccggaaccaagccaaggcgaaagagacgctcagatcaacagaaacatttaaaaaagaagatgatcttgacagtcttattaatgaaatacttgaagagcccaacttggacaaaaaaccctctaaattaaaatctaaatcttcaggtaacacatctgtcagagcttccattgaaggccttggtaaaagttgcagtccggtgtaccttggtggaagctctattccatgtgggattggaacaaatatttcatggagagcatgtgaccatctgcgttgtatagcctgtgatttcttggtagtcagctatgatgactatatgtgggacaaatcgtgtgattatctgtttttcaggaacaacatgccagaatttcacaaattaaaagcaaagttgataaagaagaaaggaacacgggcatatgcctgccagtgtagctggagaactattgaagaagtgactgaccttcagacagatcatcagcttcgctgggtttgtggtaaacattaagaatgcagactgcacattcggacagatgcatccatgagagtggtctccatgaatcatcatcatgtttagacaatagtccctagcaataccattccctgtgggaaaaggcagtgaattttattgatacaactacatacatttttgaagaccaaatggactaaggaagatcatgtattataacactttggaattattcctgatacatggatgtttcacttagtaacaggcatctacattctttactaatctgtcttctgtttaatagaggtttgattatggagttccatacaaatatctagtttttcattagcaactgcaatattgattgctaatacgtttagcaaatcattccccaacttgtagcagttaaagtggataaagccggccagggcaaagagatcatttaggggtgtctacaacacttcttccagtcagatcttttgttgccaaagatcataatttggacatggcagaaaccaggtgatcagtggctgactgaagggtgttcagaagtagttacaggtattttgcaaaaacactgcctcatagctgatcttacctcatcaactcaaagcaatgttatgcacaatattaaatacatgttaccagttttagcttatttttccctcttttgttcatttaactatcaaaagttattttctattttgattacccaataatatataaaaagagtttgatgcacccaaaatcacaaaaatcctaatacatacaggttattgttggattttccaagtactttctatcctttaatgcctaaaactccatcaagggaagtaaacagcaagtaatataatttttcaggcagcctgtggacttctctggtaggatcaggttgacatatcgtttattaggtgagtaagtgaaaagacaagtaaagcataactgaaccaacaggtaacctgttgggctccttcctgacatcactgagatctgaggagccctacaatagcagcacattcaggaaatcaggtccctcaaaatttctagctcccaaccccattgagagattttgggagctttccaatctgccacaaactccctgctacatatgtactatatagttcaaatgtgtgatacagagcaccctgaaagggaataattgaaacaaagttataatcttcttagtcttatgctaaatttattccagccaccctactgaagggaggaagatctgatcattagaatccttttcctagccatgacacatttacatacttgtaaaatttattgtagtaagtctagcattgcaacagaatagatcttataatggccaatcctcacacttttgtattaaggatattatgacagactaagcatggtagctcacgcctgtaatcccagcactttgggaggctgaggcaggcagatcagctgaggtcaggagttcaagaccagcctggccaacatgataaaacaccatctctactaaaaatacaaaaattagctgggcgcggtggtgcatgcctgtaatcccaactactcgggaggccgaggcaggaaaatttattgaacctgggaggcagaggttgtagtgagccaaggtcgcgccactgcgctccagcctggacaacacagtgagactctgtctcaaaaaaaaaaaaaagacattatgacagattttatcttttaataaaaatgtattatatccctaaagttatatctatatgtaattgagtcagaaacctagggggatgtcgattgaagtcgactgctggaaaaaaatagcagagcaacaagatccacacatttagaacctcatagaatttgacacattattcataatggtgcaattctttcttttttattccagtaagcaaatttactaaatcactaatttgaaaaaaaaaattttttttttgagatggagtgtcactctgttgccgggctggagtgcagtggcacgatctctgctcactgcaacctccgcctcgcagcttcaagtgattgtcctgcctcagcctccccagtagctgggattacaggcacacaccaccacgcccagctaatttttgtatttttaatagagacagggtttcaccatgttggccagaatgatgtcgatctcctgaactcgtgatccgcccgcctcagcctcccaaagtagcctacattgcctctactttgaagggacaaagttgtcctggtttttttttcccttttattatttcattataactatcctaaaacttacatacattgcctatgtttggcattccataacataataattataataatcccccaatgtcagaaatgtatgtgtgagttcccatgtttattggcaatttataagctttttaatattgtactattttaaactaaaatgtagaaagaatattatgtttatatacagtcagataaattattaactgttgtaatttaagctgaaaatgaaactattttagtatcagtatagaagaaaagtatagtttctaatcatctataattttaaaatgcaaagcctataaaactttcaagatgttttgcctgtttgtttttaagatttataataattttctatctttagcaagtagctatttttaagccaggtaacttctttatttgaactgtattatactctcagaccctcatcctgcctagaaatgaataagtaataaataattactctgtattatttacttcttttattttatagtaaaatattcatttggatgga

SEQ ID NO: 119410 - DNA, 1854 bp, Homo sapiens
  Payload ID: 3391
  Gene Symbol: C8orf4
  Gene Name: chromosome 8 open reading frame 4
  Uniprot ID: Q9NR00
  ENST ID: ENST00000315792
  CDS Start-End: 79-399
aaatagcagtcccagaatgatttcactacagactctctggaaagcctgggagctgaattccggaagatccccacatcgatgaaagcaaagcgaagccaccaagccgtcatcatgtccacgtcgctacgagtcagcccatccatccatggctaccacttcgacacagcctctcgtaagaaagccgtgggcaacatctttgaaaacacagaccaagaatcactagaaaggctcttcagaaactctggagacaagaaagcagaggagagagccaagatcatttttgccatagatcaagatgtggaggagaaaacgcgtgccctgatggccttgaagaagaggacaaaagacaagcttttccagtttctgaaactgcggaaatattccatcaaagttcactgaagagaagaggatggataaggacgttatccaagaatggacattcaaagaccaagtgagtttgtgagattctaacagatgcagcattttgctgctaccttacaagcttctcttctgtcaggactccagaggctggaaagggaccgggactggaaagggaccaggactgaacagactggttacaaagactccaaacaatttcatgccctgtgctgttacagaggagaacaaaatgctttcagcaaggatttgaaaactcttccgtccctgcaggaaaggattgatgctgatagaagagcctggacagatgtaatgagaactaaagaaaacagatggctggagatgacatttatccagggtcactttgtcaggccctaggacttaaatcgaagttgaacttttttttttttttttaaccaaatagataggggaagggaggagggagagggaggacagggagagaaaataccatgcataaattgtttactgaatttttatatctgagtgttcaaaatatttccaagcctgagtattgtctattggtatagatttttagaaatcaataattgattatttatttgcacttattacaatgcctgaaaaagtgcaccacatggatgttaagtagaaattcaagaaagtaagatgtcttcagcaactcagtaaaaccttacgccaccttttggtttgtaaaaggttttttatacatttcaaacaggttgcacaaaagttaaaataatggggtcttttataaatccaaagtactgtgaaaacattttacatattttttaaatcttctgactaatgctaaaacgtaatctaattaaatttcatacagttactgcagtaagcattaggaagtgaatatgatatacaaaatagtttataaagactctatagtttctataatttattttactggcaaatgtcatgcaacaataataaattattgtaaactttgtggcttttggtctgtgatgcttggtctcaaaggaaaaaataagatggtaaatgttgatatttacaaacttttctaaagatgtgtctctaacaataaaagttaattttagagtagttttatattaattaccaaactttttcaaaacaaattcttacgtcaaatatctgggaagtttctctgtcccaatcttaaaatataaaatatagatatagaagttcatagattgactccttggcatttctatttatgtatccattaaggatgagttttaaaaggctttctcttcatacttttgaaaaatttcttctatgattacagtagctatgtacatgtgtacatctatttttcccaagcaatatgttttgggtttagagtctgagtgatgaccaagattctgtgtgttactactgtttgtttaataggaacaaatatagaaataatattatctctttgcttatttcccgttaaaactataataaaatgtttctaggacagca

SEQ ID NO: 119411 - DNA, 1817 bp, Homo sapiens
  Payload ID: 3392
  Gene Symbol: C8orf44
  Gene Name: chromosome 8 open reading frame 44
  Uniprot ID: Q96CB5
  ENST ID: ENST00000390159
  CDS Start-End: 292-771
aaaaatcagaataagaagtacctgacatactttctacatctgtagttgcggaagacattttaataggtcttctcatagcctttctttgctaaggacattgtgactctccagagagcaacagtgatggctctagaatgtctaggaaaaagaagggcttaatgtcaggagtctgcttggggcacacaacactagaagatgtccttctgcacattgtttcatatcgagtatggaacccttcagatcaaagcttaccaataaattcagtatgtagaacagattaacgtagttgaaatgaggaagaatgagagttatctcaaccagccagcaccccctatccccattcccacactttccctcatgggaggctgtcgggagcacttcgaaaaccactggaaaggccgggcacggtggctcatgcctgtaatcccagcactttgggaggccaaggcaggcagatcacctgaggtcaggagttcgaaaccagcctggccaacatggcgaaaccccatctttactaaaaatacgaaaattagccaggtattagaattatttctgaattatcagtctctcatttgtgctttggagaagcagaaaaggcaaaaggggtctttggccatcttctgctggagcttccagggaggatgtgtctccaagagaccagatgtaccgagtttgaaatcccagaagcccaagaggaaaagaatcacagggaggaaaagactgtccaaaggcttctggagtcttctgttctctaaccttggaaggttttgaacaatatttctcagaggatagcctttcacttattcatctgtccagcatgactcatccccgggagtgttgagtaagtgaaattttgctgtattcatgtttttgtgacttataaaataggatgataaggagagaacatgaactctggagtcagacctgttacctcggacatgatactcttagctttgtcatttagtatttgagtaattttgggcaagctaacatctctggtcgttctcatctgtaaaatgagaataaatgaaacccactaaccagaattggtatgaaaatgaaatgtggcagaaaaaaaatgaaagtgaatagtatcaccactgacacacaagcactaaaggcccttcctgtctccatcaggtatggatttggggcaacatttggccaggtcttgtttatctttctgttcatctattctgtctaattcagtgctttgtttacaacgaatgtcttacaaatgctgactgaacactagcatacctgcatgaacaacaggtaaataaattttagatgtgttttaatgtttattaatctatcctgtcagagaagaactgccagttatagataaatatgatgccaggtcagggctgaagagttgggcaggttgttatctgcatggggtcactaggttccagtggagaggtgggggctaagctctcacccgctctgcagccacctggcacccggtttcagtttcctgaaagggagccttctacttgctgacgactgcctcatctcttctgaggtttcctctgataaacaattttctctgctttttttttttaattatgaaatacttaaaatgtaaaggagataatgtgacacacatttacccataattgagattgccataattgctataactttttcaaaattttgacttaatttcagacttttagaaaaattggccaggtgtgatggctcatgcctgtaatcccagcactttgggaggccaaggtgggtaaattacttgaacccagcagttcgagacttgcctgggcaacatagtgagaccttgtctctactgaaaacaaact

SEQ ID NO: 119412 - DNA, 1835 bp, Homo sapiens
  Payload ID: 3392
  Gene Symbol: C8orf44
  Gene Name: chromosome 8 open reading frame 44
  Uniprot ID: Q96CB5
  ENST ID: ENST00000519561
  CDS Start-End: 152-631
ttatggcagtgggagtcgaagcgagggtctgaagttcacgactactagaaggggaggggagtggaaaggctctcagtgaaaaaggtatggaacccttcagatcaaagcttaccaataaattcagtatgtagaacagattaacgtagttgaaatgaggaagaatgagagttatctcaaccagccagcaccccctatccccattcccacactttccctcatgggaggctgtcgggagcacttcgaaaaccactggaaaggccgggcacggtggctcatgcctgtaatcccagcactttgggaggccaaggcaggcagatcacctgaggtcaggagttcgaaaccagcctggccaacatggcgaaaccccatctttactaaaaatacgaaaattagccaggtattagaattatttctgaattatcagtctctcatttgtgctttggagaagcagaaaaggcaaaaggggtctttggccatcttctgctggagcttccagggaggatgtgtctccaagagaccagatgtaccgagtttgaaatcccagaagcccaagaggaaaagaatcacagggaggaaaagactgtccaaaggcttctggagtcttctgttctctaaccttggaaggttttgaacaatatttctcagaggatagcctttcacttattcatctgtccagcatgactcatccccgggagtgttgagtaagtgaaattttgctgtattcatgtttttgtgacttataaaataggatgataaggagagaacatgaactctggagtcagacctgttacctcggacatgatactcttagctttgtcatttagtatttgagtaattttgggcaagctaacatctctggtcgttctcatctgtaaaatgagaataaatgaaacccactaaccagaattggtatgaaaatgaaatgtggcagaaaaaaaatgaaagtgaatagtatcaccactgacacacaagcactaaaggcccttcctgtctccatcaggtatggatttggggcaacatttggccaggtcttgtttatctttctgttcatctattctgtctaattcagtgctttgtttacaacgaatgtcttacaaatgctgactgaacactagcatacctgcatgaacaacaggtaaataaattttagatgtgttttaatgtttattaatctatcctgtcagagaagaactgccagttatagataaatatgatgccaggtcagggctgaagagttgggcaggttgttatctgcatggggtcactaggttccagtggagaggtgggggctaagctctcacccgctctgcagccacctggcacccggtttcagtttcctgaaagggagccttctacttgctgacgactgcctcatctcttctgaggtttcctctgataaacaattttctctgctttttttttttaattatgaaatacttaaaatgtaaaggagataatgtgacacacatttacccataattgagattgccataattgctataactttttcaaaattttgacttaatttcagacttttagaaaaattggccaggtgtgatggctcatgcctgtaatcccagcactttgggaggccaaggtgggtaaattacttgaacccagcagttcgagacttgcctgggcaacatagtgagaccttgtctctactgaaaacaaactaaaaaaaaaattagccaaccatggtggtgcatgcctgtagtcctagctactcgggaagctgaggcaagaggatagcctgagcccaggggagttggggctgaagcctgggtgacagaggaagaccttgccttcaaaaaaacaaaaaaaaagaaaagaaa

SEQ ID NO: 119413 - DNA, 598 bp, Homo sapiens
  Payload ID: 3392
  Gene Symbol: C8orf44
  Gene Name: chromosome 8 open reading frame 44
  ENST ID: ENST00000521889
  CDS Start-End: 276-533
ttcacgactactagaaggggaggggagtggaaaggctctcagtgaaaaaggtcttctcatagcctttctttgctaaggacattgtgactctccagagagcaacagtgatggctctagaatgtctaggaaaaagaagggcttaatgtcaggagtctgcttggggcacacaacactagaagatgtccttctgcacattgtttcatatcgagtatggaacccttcagatcaaagcttaccaataaattcagtatgtagaacagattaacgtagttgaaatgaggaagaatgagagttatctcaaccagccagcaccccctatccccattcccacactttccctcatgggaggctgtcgggagcacttcgaaaaccactggaaaggccgggcacggtggctcatgcctgtaatcccagcactttgggaggccaaggcaggcagatcacctgaggtcaggagttcgaaaccagcctggccaacatggcgaaaccccatctttactaaaaatacgaaaattagccaggtcatactttaaggagcccaagagctttataacataacaaaagaaactgaaatgtctaataaatgtgtacataacaa

SEQ ID NO: 119414 - DNA, 3513 bp, Homo sapiens
  Payload ID: 3393
  Gene Symbol: C8orf46
  Gene Name: chromosome 8 open reading frame 46
  Uniprot ID: Q8TAG6
  ENST ID: ENST00000305454
  CDS Start-End: 442-1065
atttctgaaatgagaaagggaattgctggtaccaaaattcacgtttcctttttggtggaaattctccagccaagcttggcgctaacagagtaggcgatttcacttcgtcgtcacctcacaaaaggcttccaaattcactgcggcagacaccgcaaaataaaaatgttaaatacatcctagctgggaggggattgaagcctccaggctcaatcaaaggtttgcaataataggattcatttaaaaaaaaaaaaaaaaaaaaggacagatgggtttagaaaatgttgcagtgaagactggaacgagatgagctcatagcaccagcctgtcttttgtggacccgcacaatgatccctgagccagactggattaggatgcctcgcgactaggggtccagagacagaggcctccagttcccaggcacttcgggaagaggaggctgaaatgatgcatcagatttacagctgcagtgacgagaacatagaagttttcaccaccgtgattccttccaaggtatccagtccagccagaagaagagccaaaagctctcagcacctcttgaccaagaatgtggtgatcgagtcggacctgtacacgcaccagcccctggagctgctgccccaccgcggagaccgcagggaccctggcgaccgccgcaggtttgggcggctccagaccgcgcggccgcccacagcccacccggccaaagcctctgccagacccgtggggatttctgaacccaaaacatcaaatctgtgtgggaatcgagcatatggaaaatctctgataccgccagtgccccggatctcagtgaaaacttcagcctctgcctcattggaggcgacagccatgggcacagagaagggagctgttctgatgagaggatccagacatctcaagaagatgactgaagagtatccagcccttccccaaggagcagaagcctctctaccactgacaggcagtgcttcctgcggcgtccccggcatcctccggaaaatgtggacaaggcacaagaagaagtctgaatatgtgggagccaccaacagcgcctttgaggccgactaaaggtgaccctcttcaagtgccctgtgttggccaaggttccccggacaagaggaaaaaccttcaggattgaaactgagccacacgcacctctgctagtagctggtccaaacccattatcctccctcactcattgattaccctgggatagggcacaggaaagaaatgtccctcgaaggcaatataaaactgccccttcttagaattgctaaagccattggtctgaaagtgactttgggaggtcataaagtttgtatctctatctttaagcaaaaaattaaactttcccagctcattttaaagacctccaaggaaggaaaaaagcaattcctctgtcttccttgtgagttgctctaaagtgtgtgattttctagtgtaaatggactttgaggcacttgtaaacacaatggttcttactgtttccattactgcatttacttcaccttgacaaggtacaattttcaaggacaaagcactatatataaagttagtagttctaatatccacttgagagtatactcaagattgattttcatggccatttggcatgattgcatgaattctctattcttttatgtgcagtttttctatagaaaaacattaaaagttaaatgttgactgctaatgttttctgaagtggcatagtctagtggaatcaataatcccttgctttggtataataatttgaacttttgaaagtgctttctcatccgttatctcttatcttcacaaaacccctgtggaagaaagcacaattattcccaatctgcagagggggaaatggaggccttcagagattacaggaccagataccaggtagtggaaccagacagcaggtccttaacttctctccagtggactccctgctttgcctactctctagcaactgacttggggaagtttttaaatggtgagagtgtgtctctgggggcaaccattgaaaagaagactctgatatgttggaacaagtaagggatttgaatgaaatacactattatatcttatatgttagcttgaaccagaaaaagttgacatttttgtaggtcaaaaacaattgagcatcaatttcatatggttcaacctcatatatgatactatgcttttcttctatcagtgaaaatgtcatcatcaattccattgtcaacattagtagccttaaaacaataacataataataatgatgataatgatacttatagctatcatctattaaatgcctatgtttcaggcatgatactaggcaatttatatatatcatcctaatctttctaaaaactctattaggtggccctatccacttaatagatgccaattcaaagaggttaaatgattagactaaggcacctaacttatgtgagtgtcaggcttcaatgcctgtgttagagctactccttcacacaaaatagttcagaacatagagaaggaccaaggttaataaatgattttcatcccaaacactaaacatgattgatgggtagaggctgcccgaagtactgtgtaaagatggaatctgagatagaagaatgctgtggtcaattagtaattcttgcccatggagggattagtgacacatgccttgtatatttgtcatctgtggcctaaactctgcccctgaaggtttgttttctaattcagaggtttaaattaatctagcccacttaataaaaccagagatcctatgggaaatttagcctaagacagtgctggaaattgccatatgttgatacaaagaagtgtttggccacattacaggtctcagactcaactgctatgtgtgactgccgctctgtgcctatgtcttgcttttttgctgagttccctatttccatatctccaggtgaatccatgagaagcgagagggtggctgagaggcctgggcctctgggattccaccttgctatctctgctcttcaaccattgttttagactctgaacaccagatcctcatatctgaaagtgatttggagacctgggcatcaagtgctcttttaagaaggggctatcccagaggactgttcaaaagtctcattcaatagagatgttggagtccagaacaaagttagggagcaaaccagtaacctatgctggtcgtaacagaggatcctacaattacgtttgtttttaagacaggattttgctgtgttgcccagactggtctcaaactcctgggttcaagagatccatcctcccacctcagtctcctgaaagctgggatgacaggcacatgccaccacacctagctccttacaaccatttattttaacttatttcatttataactggtatctttcatttgtatgtggcagctagagatttatataggatggaagtaatttatttttaatttaaatatttcatgttgaactgtttgccttgtatggaacattttacttggccaattcaaataaaaataaagtcagctttgtttgtgacattcatgcaccaccataa

SEQ ID NO: 119415 - DNA, 865 bp, Homo sapiens
  Payload ID: 3393
  Gene Symbol: C8orf46
  Gene Name: chromosome 8 open reading frame 46
  ENST ID: ENST00000480005
  CDS Start-End: 23-466
acttcgggaagaggaggctgaaatgatgcatcagatttacagctgcagtgacgagaacatagaagttttcaccaccgtgattccttccaaggtatccagtccagccagaagaagagccaaaagctctcagcacctcttgaccaagaatgtggtgatcgagtcggacctgtacacgcaccagcccctggagctgctgccccaccgcggagaccgcagggaccctggcgaccgccgcaggtttgggcggctccagaccgcgcggccgcccacagcccacccggccaaagcctctgccagacccgtggggatttctgaacccaaaacatcaaatctgtgtgggaatcgagcatatggaaaatctctgataccgccagtgccccggatctcagtgaaaacttcagcctctgcctcattggaggcgacagccatgggcacagagaagggagctgttctgatgagagggtaagtgctgcgtctctggccccactgcctgtggcctcccactgtcctgatccttccttccccagaagagcaccaggccgcctggttgacagaccctcgagaggccaacacaaacccatgccagctgcaaattatcttttaatgaggccaataatcctgggtctctgcagcgcctcatcaactgtttccctaggattaagcaggagggtttttcatggtttccacttcattaacgccactctttaggcttggagaagtcatttgggaggttttttggttaattagatgaatgtaatcacgagccatattcagaacctcccataggcatgcaggcgtcagaaatatctcatgagtaagttcaagatcccctgcccaccggttaagaagtgtgtcaagtacaaag

SEQ ID NO: 119416 - DNA, 1347 bp, Homo sapiens
  Payload ID: 3393
  Gene Symbol: C8orf46
  Gene Name: chromosome 8 open reading frame 46
  Uniprot ID: Q8TAG6
  ENST ID: ENST00000522977
  CDS Start-End: 44-448
agaggcctccagttcccaggcacttcgggaagaggaggctgaaatgatgcatcagatttacagctgcagtgacgagaacatagaagttttcaccaccgtgattccttccaaggtatccagtccagccagaagaagagccaaaagctctcagcacctcttgaccaagaatgtggtgatcgagtcggacctgtacacgcaccagcccctggagctgctgccccaccgcggagaccgcagggaccctggcgaccgccgcaggtttgggcggctccagaccgcgcggccgcccacagcccacccggccaaagcctctgccagacccgataccgccagtgccccggatctcagtgaaaacttcagcctctgcctcattggaggcgacagccatgggcacagagaagggagctgttctgatgagaggatccagacatctcaagaagatgactgaagagtatccagcccttccccaaggagcagaagcctctctaccactgacaggcagtgcttcctgcggcgtccccggcatcctccggaaaatgtggacaaggcacaagaagaagtctgaatatgtgggagccaccaacagcgcctttgaggccgactaaaggtgaccctcttcaagtgccctgtgttggccaaggttccccggacaagaggaaaaaccttcaggattgaaactgagccacacgcacctctgctagtagctggtccaaacccattatcctccctcactcattgattaccctgggatagggcacaggaaagaaatgtccctcgaaggcaatataaaactgccccttcttagaattgctaaagccattggtctgaaagtgactttgggaggtcataaagtttgtatctctatctttaagcaaaaaattaaactttcccagctcattttaaagacctccaaggaaggaaaaaagcaattcctctgtcttccttgtgagttgctctaaagtgtgtgattttctagtgtaaatggactttgaggcacttgtaaacacaatggttcttactgtttccattactgcatttacttcaccttgacaaggtacaattttcaaggacaaagcactatatataaagttagtagttctaatatccacttgagagtatactcaagattgattttcatggccatttggcatgattgcatgaattctctattcttttatgtgcagtttttctatagaaaaacattaaaagttaaatgttgactgctaatgttttctgaagtggcatagtctagtggaatcaataatcccttgctttggtataataatttgaacttttgaaagtgctttctcatccgttatctcttatcttcacaaaacccctgtggaa

SEQ ID NO: 119417 - DNA, 3313 bp, Homo sapiens
  Payload ID: 3393
  Gene Symbol: C8orf46
  Gene Name: chromosome 8 open reading frame 46
  ENST ID: ENST00000460144
  CDS Start-End: 89-322
gagccagactggattaggatgcctcgcgactaggggtccagagacagaggcctccagttcccaggcacttcgggaagaggaggctgaaatgatgcatcagatttacagctgcagtgacgagaacatagaagttttcaccaccgtgattccttccaaggtatccagtccagccagaagaagagccaaaagctctcagcacctcttgaccaagaatattttgtcgctgttcctagaattcactggaatcacgaaggatccagaaactccctcgatgcgagctccatctgcaaagctcctgccctggggttccatgggtccctaggcccgagcagaggagtgggctaaccgcgtttcccccgcccggcaggtggtgatcgagtcggacctgtacacgcaccagcccctggagctgctgccccaccgcggagaccgcagggaccctggcgaccgccgcaggtttgggcggctccagaccgcgcggccgcccacagcccacccggccaaagcctctgccagacccgtggggatttctgaacccaaaacatcaaatctgtgtgggaatcgagcatatggaaaatctctgataccgccagtgccccggatctcagtgaaaacttcagcctctgcctcattggaggcgacagccatgggcacagagaagggagctgttctgatgagaggatccagacatctcaagaagatgactgaagagtatccagcccttccccaaggagcagaagcctctctaccactgacaggcagtgcttcctgcggcgtccccggcatcctccggaaaatgtggacaaggcacaagaagaagtctgaatatgtgggagccaccaacagcgcctttgaggccgactaaaggtgaccctcttcaagtgccctgtgttggccaaggttccccggacaagaggaaaaaccttcaggattgaaactgagccacacgcacctctgctagtagctggtccaaacccattatcctccctcactcattgattaccctgggatagggcacaggaaagaaatgtccctcgaaggcaatataaaactgccccttcttagaattgctaaagccattggtctgaaagtgactttgggaggtcataaagtttgtatctctatctttaagcaaaaaattaaactttcccagctcattttaaagacctccaaggaaggaaaaaagcaattcctctgtcttccttgtgagttgctctaaagtgtgtgattttctagtgtaaatggactttgaggcacttgtaaacacaatggttcttactgtttccattactgcatttacttcaccttgacaaggtacaattttcaaggacaaagcactatatataaagttagtagttctaatatccacttgagagtatactcaagattgattttcatggccatttggcatgattgcatgaattctctattcttttatgtgcagtttttctatagaaaaacattaaaagttaaatgttgactgctaatgttttctgaagtggcatagtctagtggaatcaataatcccttgctttggtataataatttgaacttttgaaagtgctttctcatccgttatctcttatcttcacaaaacccctgtggaagaaagcacaattattcccaatctgcagagggggaaatggaggccttcagagattacaggaccagataccaggtagtggaaccagacagcaggtccttaacttctctccagtggactccctgctttgcctactctctagcaactgacttggggaagtttttaaatggtgagagtgtgtctctgggggcaaccattgaaaagaagactctgatatgttggaacaagtaagggatttgaatgaaatacactattatatcttatatgttagcttgaaccagaaaaagttgacatttttgtaggtcaaaaacaattgagcatcaatttcatatggttcaacctcatatatgatactatgcttttcttctatcagtgaaaatgtcatcatcaattccattgtcaacattagtagccttaaaacaataacataataataatgatgataatgatacttatagctatcatctattaaatgcctatgtttcaggcatgatactaggcaatttatatatatcatcctaatctttctaaaaactctattaggtggccctatccacttaatagatgccaattcaaagaggttaaatgattagactaaggcacctaacttatgtgagtgtcaggcttcaatgcctgtgttagagctactccttcacacaaaatagttcagaacatagagaaggaccaaggttaataaatgattttcatcccaaacactaaacatgattgatgggtagaggctgcccgaagtactgtgtaaagatggaatctgagatagaagaatgctgtggtcaattagtaattcttgcccatggagggattagtgacacatgccttgtatatttgtcatctgtggcctaaactctgcccctgaaggtttgttttctaattcagaggtttaaattaatctagcccacttaataaaaccagagatcctatgggaaatttagcctaagacagtgctggaaattgccatatgttgatacaaagaagtgtttggccacattacaggtctcagactcaactgctatgtgtgactgccgctctgtgcctatgtcttgcttttttgctgagttccctatttccatatctccaggtgaatccatgagaagcgagagggtggctgagaggcctgggcctctgggattccaccttgctatctctgctcttcaaccattgttttagactctgaacaccagatcctcatatctgaaagtgatttggagacctgggcatcaagtgctcttttaagaaggggctatcccagaggactgttcaaaagtctcattcaatagagatgttggagtccagaacaaagttagggagcaaaccagtaacctatgctggtcgtaacagaggatcctacaattacgtttgtttttaagacaggattttgctgtgttgcccagactggtctcaaactcctgggttcaagagatccatcctcccacctcagtctcctgaaagctgggatgacaggcacatgccaccacacctagctccttacaaccatttattttaacttatttcatttataactggtatctttcatttgtatgtggcagctagagatttatataggatggaagtaatttatttttaatttaaatatttcatgttgaactgtttgccttgtatggaacattttacttggccaattcaaataaaaataaagtcagctttgtttgtgacattcatgcaccaccataa

SEQ ID NO: 119418 - DNA, 557 bp, Homo sapiens
  Payload ID: 3393
  Gene Symbol: C8orf46
  Gene Name: chromosome 8 open reading frame 46
  ENST ID: ENST00000521495
  CDS Start-End: 130-498
tagcaccagcctgtcttttgtggacccgcacaatgatccctgagccagactggattaggatgcctcgcgactaggggtccagagacagaggcctccagttcccaggcacttcgggaagaggaggctgaaatgatgcatcagatttacagctgcagtgacgagaacatagaagttttcaccaccgtgattccttccaaggtatccagtccagccagaagaagagccaaaagctctcagcacctcttgaccaagaatgtggtgatcgagtcggacctgtacacgcaccagcccctggagctgctgccccaccgcggagaccgcagggaccctggcgaccgccgcaggtttgggcggctccagaccgcgcggccgcccacagcccacccggccaaagcctctgccagacccgtggggatttctgaacccaaaacatcaaatctgtgtgggaatcgagcatatggaaaatctctgatccagacatctcaagaagatgactgaagagtatccagcccttccccaaggagcagaagcctctctaccactgacaggcagtgctt

SEQ ID NO: 119419 - DNA, 3227 bp, Homo sapiens
  Payload ID: 3393
  Gene Symbol: C8orf46
  Gene Name: chromosome 8 open reading frame 46
  ENST ID: ENST00000450307
  CDS Start-End: 88-234
agccagactggattaggatgcctcgcgactaggggtccagagacagaggcctccagttcccaggcacttcgggaagaggaggctgaaatgatgcatcagatttacagctgcagtgacgagaacatagaagttttcaccaccgtgattccttccaaggtatccagtccagccagaagaagagccaaaagctctcagcacctcttgaccaagaatactctacttgaccaagggtaactgaaaccatagatgaaagggactactgtatactatcagcaaatcctgagaagctgcagaagagaggggttaggtggtgatcgagtcggacctgtacacgcaccagcccctggagctgctgccccaccgcggagaccgcagggaccctggcgaccgccgcaggtttgggcggctccagaccgcgcggccgcccacagcccacccggccaaagcctctgccagacccgtggggatttctgaacccaaaacatcaaatctgtgtgggaatcgagcatatggaaaatctctgataccgccagtgccccggatctcagtgaaaacttcagcctctgcctcattggaggcgacagccatgggcacagagaagggagctgttctgatgagaggatccagacatctcaagaagatgactgaagagtatccagcccttccccaaggagcagaagcctctctaccactgacaggcagtgcttcctgcggcgtccccggcatcctccggaaaatgtggacaaggcacaagaagaagtctgaatatgtgggagccaccaacagcgcctttgaggccgactaaaggtgaccctcttcaagtgccctgtgttggccaaggttccccggacaagaggaaaaaccttcaggattgaaactgagccacacgcacctctgctagtagctggtccaaacccattatcctccctcactcattgattaccctgggatagggcacaggaaagaaatgtccctcgaaggcaatataaaactgccccttcttagaattgctaaagccattggtctgaaagtgactttgggaggtcataaagtttgtatctctatctttaagcaaaaaattaaactttcccagctcattttaaagacctccaaggaaggaaaaaagcaattcctctgtcttccttgtgagttgctctaaagtgtgtgattttctagtgtaaatggactttgaggcacttgtaaacacaatggttcttactgtttccattactgcatttacttcaccttgacaaggtacaattttcaaggacaaagcactatatataaagttagtagttctaatatccacttgagagtatactcaagattgattttcatggccatttggcatgattgcatgaattctctattcttttatgtgcagtttttctatagaaaaacattaaaagttaaatgttgactgctaatgttttctgaagtggcatagtctagtggaatcaataatcccttgctttggtataataatttgaacttttgaaagtgctttctcatccgttatctcttatcttcacaaaacccctgtggaagaaagcacaattattcccaatctgcagagggggaaatggaggccttcagagattacaggaccagataccaggtagtggaaccagacagcaggtccttaacttctctccagtggactccctgctttgcctactctctagcaactgacttggggaagtttttaaatggtgagagtgtgtctctgggggcaaccattgaaaagaagactctgatatgttggaacaagtaagggatttgaatgaaatacactattatatcttatatgttagcttgaaccagaaaaagttgacatttttgtaggtcaaaaacaattgagcatcaatttcatatggttcaacctcatatatgatactatgcttttcttctatcagtgaaaatgtcatcatcaattccattgtcaacattagtagccttaaaacaataacataataataatgatgataatgatacttatagctatcatctattaaatgcctatgtttcaggcatgatactaggcaatttatatatatcatcctaatctttctaaaaactctattaggtggccctatccacttaatagatgccaattcaaagaggttaaatgattagactaaggcacctaacttatgtgagtgtcaggcttcaatgcctgtgttagagctactccttcacacaaaatagttcagaacatagagaaggaccaaggttaataaatgattttcatcccaaacactaaacatgattgatgggtagaggctgcccgaagtactgtgtaaagatggaatctgagatagaagaatgctgtggtcaattagtaattcttgcccatggagggattagtgacacatgccttgtatatttgtcatctgtggcctaaactctgcccctgaaggtttgttttctaattcagaggtttaaattaatctagcccacttaataaaaccagagatcctatgggaaatttagcctaagacagtgctggaaattgccatatgttgatacaaagaagtgtttggccacattacaggtctcagactcaactgctatgtgtgactgccgctctgtgcctatgtcttgcttttttgctgagttccctatttccatatctccaggtgaatccatgagaagcgagagggtggctgagaggcctgggcctctgggattccaccttgctatctctgctcttcaaccattgttttagactctgaacaccagatcctcatatctgaaagtgatttggagacctgggcatcaagtgctcttttaagaaggggctatcccagaggactgttcaaaagtctcattcaatagagatgttggagtccagaacaaagttagggagcaaaccagtaacctatgctggtcgtaacagaggatcctacaattacgtttgtttttaagacaggattttgctgtgttgcccagactggtctcaaactcctgggttcaagagatccatcctcccacctcagtctcctgaaagctgggatgacaggcacatgccaccacacctagctccttacaaccatttattttaacttatttcatttataactggtatctttcatttgtatgtggcagctagagatttatataggatggaagtaatttatttttaatttaaatatttcatgttgaactgtttgccttgtatggaacattttacttggccaattcaaataaaaataaagtcagctttg

SEQ ID NO: 119420 - DNA, 1445 bp, Homo sapiens
  Payload ID: 3394
  Gene Symbol: C8orf48
  Gene Name: chromosome 8 open reading frame 48
  Uniprot ID: Q96LL4
  ENST ID: ENST00000297324
  CDS Start-End: 150-1109
aagacagctgggaaggcgtctcccggaagacgacctccgcagagctgatggcattgagatccattcccggaggggtcagctcctgacgggttcctgagccagtcttaacctgggcaaaggagatgaggagccgagcctgatgcattgtgatggccatctgcccagaattggcccaaacggacaaaagtgctcttgcaaacctttctgatgagactgagactttgaagaactctactgatgaggtacagacttccagctcattcagctcctctggaggacggcagtcctcgcccctgacctctgggagcaaactggagagggaaaagcagactccaagcttggaacaaggagacacacaatctgagcttttggactataaaaattatgaaaagaagttgagtaaaaaatggatcaactacctcaagctcaaagactctaactttgaacggcaccaaccagacaccaaacttccaacagaaatcactcgggtatcagatgaagaattgaatgccctgcagtcttattgcaccatgaagataaatttgattcatcgtagaggggattctaagaagaagacgagcagcagacataaaaagctgcatcttggattggatgtagaggcttcagagagagatgcctttagttgtactgtacccgatgaacttttgaacagaatctactttaaaaacatgaggacaacgccaaaacaggaggcagcagctaagcaacacatatcttatcagtgtccctattgtaacaggaaaagagcggagctggccctgtctgcctttctgaaacaaaagaagactttactggagtcatttctactccaagagagaatagatgaacatcttcataccaaagactttctcacccgtattggagaagcacatcaagactttcccaggctttcagatgaccccagaataatctggaaaagactgactgagaaaagtcatatcagatactctggttttgaaagatcagagacagagcagaagttgcagcgagatggaaatagtgcttgtcatttaccattttctctgccatttctcaagcgacttactctaatcaaaccagagctggtgattgttaatgataatgtgtaatgtggatagatgtctttgttgtgtatttgagtaattaccataatttctacaggcacttgggaaactaacttaagactttactatgcttccttcacagatttgaggactaagaactttcactttttttttcctattatagaaggcactgttgtagttggaatagttataaaaacttttacaaaattccaagagaactatgttggtagtttgggccaggatgttgatggtacagaagcaaagtagtatggggatgtaagagaaacttaaaaagtaataactgtctttggcgatcaaatggctatggggaattaataaatagtagatgtttgaaatgtt

SEQ ID NO: 119421 - DNA, 2016 bp, Homo sapiens
  Payload ID: 3395
  Gene Symbol: C8orf58
  Gene Name: chromosome 8 open reading frame 58
  Uniprot ID: Q8NAV2
  ENST ID: ENST00000289989
  CDS Start-End: 75-1172
cccgagctccgcggggactcgggccgggatcctcgggcggctgcattggccggggccggggccgggagcgggccatgatgggccggcggcgcgccttcgccgtggacggccgggatggggctggcgagggcctggcacggggctgcatagtgcctggagtcaccagcacctacagacggatccccgacgctgcccacgggtgctcatcctgggagagaggtgacaagttcagaggtgtcggcagggaggcactctttctcaaactggcctcccgggactcaggagtggagatggcagttggggacagccccctggccgccttaccgggcctttctcaggactccctggactttgaatcctcagggagttctgagccccccgcccaggtaggccgactcctggccagccagaagctgggggaggtgttggagcggtcccgccggctcccaacagctcccaccagcttgtcaggacaacaccgctccctgcggctggcaagcaagcctgagcgtgaagtgccccttggagcagggcaacaggagtccatggaggcagacacagacctagaggcaggcctggaagaagaggcggtggggggcctggggcctggagcctgggcctgcctccccgggcagggtcttcgctatctggaacacctgtgcctggtgctggagcagatggcaaggctccagcagctctacctgcagctgcggatccagaggcccccaggggatcccggcgaggaggagtcgacccgagcccctttaccgtccccgttacacaccccaggcaatcgggggcaggggccatgggagctgctaagccagacagagcacacaggagcaaaggctgcttcacccccaaaggtggaggtgcccagtgccaaccctcccaggctgccagaaaccccagtggagccaacgtaccacttgccatcctcccagggacacaagcgggatatctcccactgggacaaggtcaaggtcctgctcaaccggatctgccggagaagccaccaccaccctgagccccctgcccctcctgatggctctgaccccaggatcgagtccagggacctccctgaaaggcctcagtgccgcccccaccggaagacctttatgccatcattagtggttaagaagcaacgagcaaaaaacctttctgtaggctgagacctctcggtgcacctggtgaccctgggtggaggggacttgctgtgaagtcttcctcgccctctgccctcttgctgcttctccacattgccaggaaaagctgctgacgcctgccctcctctcttgagtcgagggctgaatctttctcctctaagcagtctggtcaggaaccttggtttcttgagaggcccccaagatgccgcagctccagggctcttcctcctcaccagaaatccctgggcttccacaatgtgaactcactcattgtcaggtgtccgtggagtgtttttggcatggtgacctgtctgggcccagcatgttgcagatgtgtatttatgcgcaatggtatgcatatctctgtgtgactgtcagtgttgcaagctggctggatccaaccatctcttctgaaataatgcatccaaagggttgatattctgggggaggtcactgcagaaggatggaactgacctttattccccagtgggcagttactgagctttcctcctcagagccatgctggcagccctgggacagagaacggtgtggctttggctgcctctgcatggaatcttgccccggactcctgaagactgcacaaggaatgaggaagatcagggacaacctgggaactgaataactttcaaagccagtgctcagcttctctgctccgtactagcgtttacaggtcttaattcaaaccagatgcctgtactagtttttagaccccaagtcaacctttctgagccacagcttcccgctgggaataatgatgcctgccctatctacctcacagacttgttatgaggataaagtgagattaaactgcctcaaagtgctttgtaaa

SEQ ID NO: 119422 - DNA, 2021 bp, Homo sapiens
  Payload ID: 3395
  Gene Symbol: C8orf58
  Gene Name: chromosome 8 open reading frame 58
  Uniprot ID: Q8NAV2
  ENST ID: ENST00000409586
  CDS Start-End: 121-1194
gtctgggggccgcgcccagctgggtcgggacgcgctccctgagctgcccgagctccgcggggactcgggccgggatcctcgggcggctgcattggccggggccggggccgggagcgggccatgatgggccggcggcgcgccttcgccgtggacggccgggatggggctggcgagggcctggcacggggctgcatagtgcctggagtcaccagcacctacagacggatccccgacgctgcccacgggtgctcatcctgggagagaggtgacaagttcagaggtgtcggcagggaggcactctttctcaaactggcctcccgggactcaggagtggagatggcagttggggacagccccctggccgccttaccgggcctttctcaggactccctggactttgaatcctcagggagttctgagccccccgcccaggtaggccgactcctggccagccagaagctgggggaggtgttggagcggtcccgccggctcccaacagctcccaccagcttgtcaggacaacaccgctccctgcggctggcaagcaagcctgagcgtgaagtgccccttggagcagggcaacaggagtccatggaggcagacacagacctagaggcaggcctggaagaagaggcggtggggggcctggggcctggagcctgggcctgcctccccgggcagggtcttcgctatctggaacacctgtgcctggtgctggagcagatggcaaggctccagcagctctacctgcagctgcggatccagaggcccccaggggatcccggcgaggaggagtcgacccgagcccctttaccgtccccgttacacaccccaggcaatcgggggcaggggccatgggagctgctaagccagacagagcacacaggagcaaaggctgcttcacccccaaaggtggaggtgcccagtgccaaccctcccaggctgccagaaaccccagtggagccaacgtaccacttgccatcctcccagggacacaaggtcaaggtcctgctcaaccggatctgccggagaagccaccaccaccctgagccccctgcccctcctgatggctctgaccccaggatcgagtccagggacctccctgaaaggcctcagtgccgcccccaccggaagacctttatgccatcattagtggttaagaagcaacgagcaaaaaacctttctgtaggctgagacctctcggtgcacctggtgaccctgggtggaggggacttgctgtgaagtcttcctcgccctctgccctcttgctgcttctccacattgccaggaaaagctgctgacgcctgccctcctctcttgagtcgagggctgaatctttctcctctaagcagtctggtcaggaaccttggtttcttgagaggcccccaagatgccgcagctccagggctcttcctcctcaccagaaatccctgggcttccacaatgtgaactcactcattgtcaggtgtccgtggagtgtttttggcatggtgacctgtctgggcccagcatgttgcagatgtgtatttatgcgcaatggtatgcatatctctgtgtgactgtcagtgttgcaagctggctggatccaaccatctcttctgaaataatgcatccaaagggttgatattctgggggaggtcactgcagaaggatggaactgacctttattccccagtgggcagttactgagctttcctcctcagagccatgctggcagccctgggacagagaacggtgtggctttggctgcctctgcatggaatcttgccccggactcctgaagactgcacaaggaatgaggaagatcagggacaacctgggaactgaataactttcaaagccagtgctcagcttctctgctccgtactagcgtttacaggtcttaattcaaaccagatgcctgtactagtttttagaccccaagtcaacctttctgagccacagcttcccgctgggaataatgatgcctgccctatctacctcacagacttgttatgaggataaagtgagattaaactgcc

SEQ ID NO: 119423 - DNA, 448 bp, Homo sapiens
  Payload ID: 3395
  Gene Symbol: C8orf58
  Gene Name: chromosome 8 open reading frame 58
  ENST ID: ENST00000475994
  CDS Start-End: 4-448
cagatggcaaggctccagcagctctacctgcagctgcggatccagaggcccccaggggatcccggcgaggaggagtcgacccgagcccctttaccgtccccgttacacaccccaggcaatcgggggcaggggccatgggagctgctaagccagacagagcacacaggtgaggggccatcgtgtctccctttgtcctgcctgcctggggtcccaccagcaggtcctctgagccgaagcttgatggggtgtcttctggccctggccaacctgactgtctttctgaaggagcaaaggctgcttcacccccaaaggtggaggtgcccagtgccaaccctcccaggctgccagaaaccccagtggagccaacgtaccacttgccatcctcccagggacacaagcgggatatctcccactgggacaaggtcaaggtcctgctcaaccggatctg

SEQ ID NO: 119424 - DNA, 807 bp, Homo sapiens
  Payload ID: 3395
  Gene Symbol: C8orf58
  Gene Name: chromosome 8 open reading frame 58
  ENST ID: ENST00000495957
  CDS Start-End: 1-526
ctttaccgtccccgttacacaccccaggcaatcgggggcaggggccatgggagctgctaagccagacagagcacacaggagcaaaggctgcttcacccccaaaggtggaggtgcccagtgccaaccctcccaggctgccagaaaccccagtggagccaacgtaccacttgccatcctcccagggacacaaggtaggggacaggtatatgtggggcaggtggtgggctggggtggggggaggggaggtgggggatgcatgggcaccctgggggccagcaactctggggaaatgacaggattgattcctgtttggagcaggcgacttgtcctggctgtggcgacagctgtctctgggagcttggtcgggggtctgagtgtggggagggctctgggtgacccctcatcctctgctcagcgggatatctcccactgggacaaggtcaaggtcctgctcaaccggatctgccggagaagccaccaccaccctgagccccctgcccctcctgatggctctgaccccaggtgagccccgtgcccagcccaggttagggcacggagaggagactgataagccaggatgctgagattgtcatgccagttgtcattattgtccccgcaaaacttgagaggcagtctgggaggggctgctagaagaaacagtagttaaaacaccccatttacagataaggaggcagggttctgggtggggttgggggtagttgcttttccaaagccgcacggtgagtcagtgacagctaggaccagaatgtgggaaatctgcctaccctagctcagcaacccctcacc

SEQ ID NO: 119425 - DNA, 1955 bp, Homo sapiens
  Payload ID: 3395
  Gene Symbol: C8orf58
  Gene Name: chromosome 8 open reading frame 58
  ENST ID: ENST00000614574
  CDS Start-End: 121-1023
gtctgggggccgcgcccagctgggtcgggacgcgctccctgagctgcccgagctccgcggggactcgggccgggatcctcgggcggctgcattggccggggccggggccgggagcgggccatgatgggccggcggcgcgccttcgccgtggacggccgggatggggctggcgagggcctggcacggggctgcatagtgcctggagtcaccagcacctacagacggatccccgacgctgcccacgggtgctcatcctgggagagaggtgacaagttcagaggtgtcggcagggaggcactctttctcaaactggcctcccgggactcaggagtggagatggcagttggggacagccccctggccgccttaccgggcctttctcaggactccctggactttgaatcctcagggagttctgagccccccgcccaggtaggccgactcctggccagccagaagctgggggaggtgttggagcggtcccgccggctcccaacagctcccaccagcttgtcaggacaacaccgctccctgcggctggcaagcaagcctgagcgtgaagtgccccttggagcagggcaacaggagtccatggaggcagacacagacctagaggcaggcctggaagaagaggcggtggggggcctggggcctggagcctgggcctgcctccccgggcagggtcttcgctatctggaacacctgtgcctggtgctggagcagatggcaaggctccagcagctctacctgcagctgcggatccagaggcccccaggggatcccggcgaggaggagtcgacccgagcccctttaccgtccccgttacacaccccaggcaatcgggggcaggggccatgggagctgctaagccagacagagcacacaggagcaaaggctgcttcacccccaaaggtggaggtgcccagtgccaaccctcccaggctgccagaaaccccagtggagccaacgtaccacttgccatcctcccagggacacaaggatcgagtccagggacctccctgaaaggcctcagtgccgcccccaccggaagacctttatgccatcattagtggttaagaagcaacgagcaaaaaacctttctgtaggctgagacctctcggtgcacctggtgaccctgggtggaggggacttgctgtgaagtcttcctcgccctctgccctcttgctgcttctccacattgccaggaaaagctgctgacgcctgccctcctctcttgagtcgagggctgaatctttctcctctaagcagtctggtcaggaaccttggtttcttgagaggcccccaagatgccgcagctccagggctcttcctcctcaccagaaatccctgggcttccacaatgtgaactcactcattgtcaggtgtccgtggagtgtttttggcatggtgacctgtctgggcccagcatgttgcagatgtgtatttatgcgcaatggtatgcatatctctgtgtgactgtcagtgttgcaagctggctggatccaaccatctcttctgaaataatgcatccaaagggttgatattctgggggaggtcactgcagaaggatggaactgacctttattccccagtgggcagttactgagctttcctcctcagagccatgctggcagccctgggacagagaacggtgtggctttggctgcctctgcatggaatcttgccccggactcctgaagactgcacaaggaatgaggaagatcagggacaacctgggaactgaataactttcaaagccagtgctcagcttctctgctccgtactagcgtttacaggtcttaattcaaaccagatgcctgtactagtttttagaccccaagtcaacctttctgagccacagcttcccgctgggaataatgatgcctgccctatctacctcacagacttgttatgaggataaagtgagattaaactgcctcaaagtgctttgtaaa

SEQ ID NO: 119426 - DNA, 1848 bp, Homo sapiens
  Payload ID: 3395
  Gene Symbol: C8orf58
  Gene Name: chromosome 8 open reading frame 58
  ENST ID: ENST00000615223
  CDS Start-End: 128-1114
cagcacctacagacggatccccgacgctgcccacgggtgctcatcctgggagagaggtgacaagttcagaggtgtcggcagggaggcactctttctcaaactggcctcccgggactcaggagtggagatggcagttggggacagccccctggccgccttaccgggcctttctcaggactccctggactttgaatcctcagggagttctgagccccccgcccaggtaggccgactcctggccagccagaagctgggggaggtgttggagcggtcccgccggctcccaacagctcccaccagcttgtcaggacaacaccgctccctgcggctggcaagcaagcctgagcgtgaagtgccccttggagcagggcaacaggagtccatggaggcagacacagacctagaggcaggcctggaagaagaggcggtggggggcctggggcctggagcctgggcctgcctccccgggcagggtcttcgctatctggaacacctgtgcctggtgctggagcagatggcaaggctccagcagctctacctgcagctgcggatccagaggcccccaggggatcccggcgaggaggagtcgacccgagcccctttaccgtccccgttacacaccccaggcaatcgggggcaggggccatgggagctgctaagccagacagagcacacaggagcaaaggctgcttcacccccaaaggtggaggtgcccagtgccaaccctcccaggctgccagaaaccccagtggagccaacgtaccacttgccatcctcccagggacacaagcgggatatctcccactgggacaaggtcaaggtcctgctcaaccggatctgccggagaagccaccaccaccctgagccccctgcccctcctgatggctctgaccccaggatcgagtccagggacctccctgaaaggcctcagtgccgcccccaccggaagacctttatgccatcattagtggttaagaagcaacgagcaaaacctttctgtaggctgagacctctcggtgcacctggtgaccctgggtggaggggacttgctgtgaagtcttcctcgccctctgccctcttgctgcttctccacattgccaggaaaagctgctgacgcctgccctcctctcttgagtcgagggctgaatctttctcctctaagcagtctggtcaggaaccttggtttcttgagaggcccccaagatgccgcagctccagggctcttcctcctcaccagaaatccctgggcttccacaatgtgaactcactcattgtcaggtgtccgtggagtgtttttggcatggtgacctgtctgggcccagcatgttgcagatgtgtatttatgcgcaatggtatgcatatctctgtgtgactgtcagtgttgcaagctggctggatccaaccatctcttctgaaataatgcatccaaagggttgatattctgggggaggtcactgcagaaggatggaactgacctttattccccagtgggcagttactgagctttcctcctcagagccatgctggcagccctgggacagagaacggtgtggctttggctgcctctgcatggaatcttgccccggactcctgaagactgcacaaggaatgaggaagatcagggacaacctgggaactgaataactttcaaagccagtgctcagcttctctgctccgtactagcgtttacaggtcttaattcaaaccagatgcctgtactagtttttagaccccaagtcaacctttctgagccacagcttcccgctgggaataatgatgcctgccctatctacctcacagacttgttatgaggataaagtgagattaaactgcctcaaagtgctttgt

SEQ ID NO: 119427 - DNA, 325 bp, Homo sapiens
  Payload ID: 3396
  Gene Symbol: C8orf59
  Gene Name: chromosome 8 open reading frame 59
  Uniprot ID: Q8N0T1
  ENST ID: ENST00000321777
  CDS Start-End: 79-210
gcttaaaaagctgcacgcaagtgttaaacttctgtaggaggaatactgttggcgttcaaaagcattgctgtttcaacaatggccaagaacaaattaagagggccgaagtccaggaatgtatttcacatagccagccaaaaaaactttaaggctaaaaacaaagcaaaaccagttaccactaatcttaagaaggttcttcatttttcctagaaaggtaaggatggtttcaagcatttgtctaaaaaaatataaaaaaaaaggaagaaaaataacctccctttcttgaaaacaaatgttgaaaagaaataaacattttaactacaaa

SEQ ID NO: 119428 - DNA, 756 bp, Homo sapiens
  Payload ID: 3396
  Gene Symbol: C8orf59
  Gene Name: chromosome 8 open reading frame 59
  ENST ID: ENST00000523281
  CDS Start-End: 620-756
gttaagtagttccttaattacttacaatgtagtaaggctacattgaaggaagatataaatttcagtcaagactacgactgagcaaaggtaaaaaaggaagaatgttcaaggtgtctgtgcaagagaacagttagaccaggctggctagagcagtgtttatagggacgtaacaggagatatgtgtggcagatttagggtagattcagagtgccagtaatatgccaagccaaggcacgttgccccttatacattgggaaaactgttgaaggtttttaacattgggaaggtcgatcgcatagcttggtgccagatagccactgtgcagatggcttaagccaggagttggcagactttctgttaaaggtcggacactaaatattttggactttgtgggtcatagttatagcaggaaagcagccatatcagcatatgattgaatggacataactgtattccaattaaactttattttttaattaattaatttttttgagacagagtcttgctctgtcactcaggctggagtgcactggtgcaatcttggctcactgcaaccttcgccttccggattcaagcgattctccttcctcagtctcccgagtagctgggatcacagacaatggccaagaacaaattaagagggccgaagtccaggaatgtatttcacatagccagccaaaaaaactttaaggctaaaaacaaagcaaaaccagttaccactaatcttaagaagataaacattatgaatgaggaaaa

SEQ ID NO: 119429 - DNA, 491 bp, Homo sapiens
  Payload ID: 3396
  Gene Symbol: C8orf59
  Gene Name: chromosome 8 open reading frame 59
  ENST ID: ENST00000545322
  CDS Start-End: 248-433
acggctcgtgagcggaatcctgactggttcatcctccccggaacttcctagacgccgtacgtgccagatggtgttacctggagcttaaaaagctgcacgcaagtgttaaacttctgtaggaggaatactgttggcgttcaaaagcattgctgtttcagttaagtagttccttaattacttacaatgtagtaaggctacattgaaggaagatataaatttcagtcaagactacgactgagcaaagacaatggccaagaacaaattaagagggccgaagtccaggaatgtatttcacatagccagccaaaaaaactttaaggctaaaaacaaagcaaaaccagttaccactaatcttaagaagattcctcagcagcgtcatgaaagcaaaccagttaatgttgatgaagctacaagattaatggctctgttgtaatatactggtgatgcatctaattctccacaaagaccaataaattgaatgttttatacaa

SEQ ID NO: 119430 - DNA, 734 bp, Homo sapiens
  Payload ID: 3396
  Gene Symbol: C8orf59
  Gene Name: chromosome 8 open reading frame 59
  ENST ID: ENST00000614462
  CDS Start-End: 66-251
ccgtacgtgccagatggtgttacctggagcttaaaaagctgcacgcaagtgttaaacttctgacaatggccaagaacaaattaagagggccgaagtccaggaatgtatttcacatagccagccaaaaaaactttaaggctaaaaacaaagcaaaaccagttaccactaatcttaagaagattcctcagcagcgtcatgaaagcaaaccagttaatgttgatgaagctacaagattaatggctctgttgtaatatactggtgatgcatctaattctccacaaagaccaataaattgaatgttttatacaattttatttttaaaaatcttgttaatgtacaggcattggcacattttaaaaacaaactacataaacagatctttcctataacctaggaaagtggaatgtcagaagtcaacaaaatgtgataaacttaaagtgctaaaacagaaggcacttcacaaaatctgttcactgaaacagttatatatcctcgtttacatccttcactttacaagtggcagtgaacgtctgtttggatagaaggacatacagaaatacaggcagtttagtggcagtaaaaatataagacaagtaatgagtccttggccaacttgtttttgatgacctgtagtgtcctttaactttcctccttaagaagaaaaaacagaaggattcacaattagaagaaaagttgaaatccagaatatagttacttttgggagtggggacgtt

SEQ ID NO: 119431 - DNA, 475 bp, Homo sapiens
  Payload ID: 3396
  Gene Symbol: C8orf59
  Gene Name: chromosome 8 open reading frame 59
  Uniprot ID: Q8N0T1
  ENST ID: ENST00000612809
  CDS Start-End: 115-417
cctagacgccgtacgtgccagatggtgttacctggagcttaaaaagctgcacgcaagtgttaaacttctgtaggaggaatactgttggcgttcaaaagcattgctgtttcaacaatggccaagaacaaattaagagggccgaagtccaggaatgtatttcacatagccagccaaaaaaactttaaggctaaaaacaaagcaaaaccagttaccactaatcttaagaagataaacattatgaatgaggaaaaagttaacagagtaaataaagcttttgtaaatgtacaaaaggaacttgcacatttcgcaaaaagcatttcacttgaacctctgcagaaagaactgattcctcagcagcgtcatgaaagcaaaccagttaatgttgatgaagctacaagattaatggctctgttgtaatatactggtgatgcatctaattctccacaaagaccaataaattgaatgttttatacaa

SEQ ID NO: 119432 - DNA, 483 bp, Homo sapiens
  Payload ID: 3396
  Gene Symbol: C8orf59
  Gene Name: chromosome 8 open reading frame 59
  Uniprot ID: Q8N0T1
  ENST ID: ENST00000615697
  CDS Start-End: 177-479
tggtgttacctggagcttaaaaagctgcacgcaagtgttaaacttctggaggaatactgttggcgttcaaaagcattgctgtttcagttaagtagttccttaattacttacaatgtagtaaggctacattgaaggaagatataaatttcagtcaagactacgactgagcaaagacaatggccaagaacaaattaagagggccgaagtccaggaatgtatttcacatagccagccaaaaaaactttaaggctaaaaacaaagcaaaaccagttaccactaatcttaagaagataaacattatgaatgaggaaaaagttaacagagtaaataaagcttttgtaaatgtacaaaaggaacttgcacatttcgcaaaaagcatttcacttgaacctctgcagaaagaactgattcctcagcagcgtcatgaaagcaaaccagttaatgttgatgaagctacaagattaatggctctgttgtaatata

SEQ ID NO: 119433 - DNA, 586 bp, Homo sapiens
  Payload ID: 3396
  Gene Symbol: C8orf59
  Gene Name: chromosome 8 open reading frame 59
  Uniprot ID: Q8N0T1
  ENST ID: ENST00000612977
  CDS Start-End: 211-513
ccggaacttcctagacgccgtacgtgccagatggtgttacctggagcttaaaaagctgcacgcaagtgttaaacttctgtaggaggaatactgttggcgttcaaaagcattgctgtttcagttaagtagttccttaattacttacaatgtagtaaggctacattgaaggaagatataaatttcagtcaagactacgactgagcaaagacaatggccaagaacaaattaagagggccgaagtccaggaatgtatttcacatagccagccaaaaaaactttaaggctaaaaacaaagcaaaaccagttaccactaatcttaagaagataaacattatgaatgaggaaaaagttaacagagtaaataaagcttttgtaaatgtacaaaaggaacttgcacatttcgcaaaaagcatttcacttgaacctctgcagaaagaactgattcctcagcagcgtcatgaaagcaaaccagttaatgttgatgaagctacaagattaatggctctgttgtaatatactggtgatgcatctaattctccacaaagaccaataaattgaatgttttatacaattttatttttaaaaa

SEQ ID NO: 119434 - DNA, 859 bp, Homo sapiens
  Payload ID: 3396
  Gene Symbol: C8orf59
  Gene Name: chromosome 8 open reading frame 59
  Uniprot ID: Q8N0T1
  ENST ID: ENST00000619594
  CDS Start-End: 73-375
ctagacgccgtacgtgccagatggtgttacctggagcttaaaaagctgcacgcaagtgttaaacttctgacaatggccaagaacaaattaagagggccgaagtccaggaatgtatttcacatagccagccaaaaaaactttaaggctaaaaacaaagcaaaaccagttaccactaatcttaagaagataaacattatgaatgaggaaaaagttaacagagtaaataaagcttttgtaaatgtacaaaaggaacttgcacatttcgcaaaaagcatttcacttgaacctctgcagaaagaactgattcctcagcagcgtcatgaaagcaaaccagttaatgttgatgaagctacaagattaatggctctgttgtaatatactggtgatgcatctaattctccacaaagaccaataaattgaatgttttatacaattttatttttaaaaatcttgttaatgtacaggcattggcacattttaaaaacaaactacataaacagatctttcctataacctaggaaagtggaatgtcagaagtcaacaaaatgtgataaacttaaagtgctaaaacagaaggcacttcacaaaatctgttcactgaaacagttatatatcctcgtttacatccttcactttacaagtggcagtgaacgtctgtttggatagaaggacatacagaaatacaggcagtttagtggcagtaaaaatataagacaagtaatgagtccttggccaacttgtttttgatgacctgtagtgtcctttaactttcctccttaagaagaaaaaacagaaggattcacaattagaagaaaagttgaaatccagaatatagttacttttgggagtggggacgttt

SEQ ID NO: 119435 - DNA, 563 bp, Homo sapiens
  Payload ID: 3396
  Gene Symbol: C8orf59
  Gene Name: chromosome 8 open reading frame 59
  Uniprot ID: Q8N0T1
  ENST ID: ENST00000611854
  CDS Start-End: 204-506
agaattagatacatactctgtactcaaagagcagaaaatctactaggagtgaaagacttggaaataatatatgcaccaactttaaaaataatcaagagtaagatagaattttttagatttaattggtacctttaaaaacttaaaattgacttacggttcataaatgtgggcaatttaattgaatttattttcttttctagacaatggccaagaacaaattaagagggccgaagtccaggaatgtatttcacatagccagccaaaaaaactttaaggctaaaaacaaagcaaaaccagttaccactaatcttaagaagataaacattatgaatgaggaaaaagttaacagagtaaataaagcttttgtaaatgtacaaaaggaacttgcacatttcgcaaaaagcatttcacttgaacctctgcagaaagaactgattcctcagcagcgtcatgaaagcaaaccagttaatgttgatgaagctacaagattaatggctctgttgtaatatactggtgatgcatctaattctccacaaagaccaataaattgaatgttttataca

SEQ ID NO: 119436 - DNA, 1036 bp, Homo sapiens
  Payload ID: 3397
  Gene Symbol: C8orf74
  Gene Name: chromosome 8 open reading frame 74
  Uniprot ID: Q6P047
  ENST ID: ENST00000304519
  CDS Start-End: 30-914
ccgtctcctggcaaccagatgcaggggccatggcactcttaacaccccagggagtgaaagaagtcttccaacttcagagaccacaaggtcgggagcgcctgcggaggcttctgaactgggaggagtttgacgaacagagagactcccggaggagcatcctgctggacaccctctacgagagcatcatctttgcagtgggcaaaggcttcccatgggtggaggtggcccaggtggtcaagttcacagaagagctgctaagggaaaccaaaggctgctccattactgaggctgtgacgatcctggggaacaagcttagagattaccggggccatttcaacaccacccacctgctggccctctgtgactacttccaccacaccttcatccgccactacaaactctaccagtatgtcctgggccaggaccagcaggtcgacctgaccgttgcccacctggaggtgtgcatgccaccccatcccctcccgctggccgagggcatggacagggacttgtggatccacgagcagcaggtggccacactgacggaggccgaggcacagaagcgcgccgacgtgctgctcctgaaagaggcgctgcgcctggagcgggagaactcgctgcagaaggcgttcgctgccgccgcgcctgcgcagcccggccaggtcctggagagacaggagttggagagcctcatctgccaggcagtccacacccagatggagctcctgcaggagctgctgcagcgccagatccagaacacattcgccatcttggacctgaagcttcagaagaagactctgaacctcaacgcccccacccctatcccgccccccatcaccagccacgcaggccaggaggaagccctgaagccccaaagagcgagcaaaggaaagaaagcgaaggcaaggaagtagaaggtcccgactgccacacgagactgactggggaccagccacccataaccatgagccttgcggcacggtgagctcagcacccacagagagacttcttgtgattaaaagaaacaaacccatgc

SEQ ID NO: 119437 - DNA, 2338 bp, Homo sapiens
  Payload ID: 3397
  Gene Symbol: C8orf74
  Gene Name: chromosome 8 open reading frame 74
  ENST ID: ENST00000521818
  CDS Start-End: 1-298
actcttaacaccccagggagtgaaagaagtcttccaacttcagagaccacaaggtcgggagcgcctgcggaggcttctgaactgggaggagtttgacgaacagagagactcccggaggagcatcctgctggacaccctctacgagagcatcatctttgcagtgggcaaaggcttcccatgggtggaggtggcccaggtggtcaagttcacagaagagctgctaagggaaaccaaaggtgctggcctccaggggcttggggaccatcttcaggaagttcccagcagccaatgcaaatgagggccactccctgttattgaagagcaacttgcaggcacagatctgtccgcccggcagccagcggcttctccctgagacttaatccctccactttctgagtcaccaggaacttctcaacccgaggcccagggagtgtggtccgaggccaagaaagtgtgtctcataagccggcttccaacaagctttgctgaaacccagaaccagccaagagtgtctgggggccgaaagttagaattcagcccagggactccttccctgttgacccaggacaaggtctacacttggtttgtatgacctcttaggagcaggtcacagcccatggccacagtggggcatcggccaggatgataagccgccaggacacccaggcacggctgctgagcacattcacactactgagcctggcagacttctcttttcagatctgggttttgtgtacggctgctggggctgaacagaagggctcagaggctggccttcgccaatgaggcagacacagccacccacagctgcaggatgcaggtgaccccaccccatgctccgtcaggccaggccaggctggaggaggagcagggcaccttctggcaagttcagagaaggtgtgatgagtcatctgatgaagctcacacactgtcgcacacacacaggcccagagtccagcttgctgatcaaaaatgatggcctcatgcctgctcaccctctgggatccctcaatgggcagcctctgctgtcctccatgcggccaccgacttccctctgggatggccccaacctctcacgtctggcctcagtacctctccaccaggttcttaaccccaaggaatttgataatcctatgtacgctatccttggaggtcctggtgttccgtgatgaagtcaactctttcacatggcacatagggctgtcatgaaccaccctgtccaaactgaccacaagccctgggtcccccagctcagtccgcagaatccagttttgcctcctggacagctgggtgtggccctgtgcacgcagccatgctgtgcccctctcacttccggccttcactgctcctggcccctctgcttggggtggcctttcccaccatcctctggactccagcctggtgcccccgacacggggcatgtgcagacgccctggcctctcagagctccttcttatctcactgcatccctgcggggaagctcctgccaattgatggcaggcctgcacgctctgatgcccagctctgagtgaaaggacaggaagggacacagggcgtgtggggccaggggttctctgctgttctgagggcagcagcagccaagagcttctggtcagtgaagcaagacctggaccctgccctaggctgatccccgccgaggccttggcccttccttccgacacagctcgttcctcctgctgccagaattggctccctggaacctggctccgctcaccccctacctgctggaaacccttctgccatgtctgggtgggcctggcctttggggcctgctctgccagcccagcagcctccatggtgaaagccttggccacaggcaacatcccccagcacctggcacatgggaatgttccctaaataaatccttttgtgtgtgtgtgagacaagctctcaccctgtcatccagactggactgcagtggcacgatctgtagccttgacctcctgggctcaagtgatccttctatctcaacctcctgagtagctgggactaaaggcatgcaccaccatgctggctatttttttttttttatagtgttcgggtctttctatgttgcccaggctggtcttgaactcccaggctcaagggatacccctgccatggcctctgaaagtgctgtggccgcccattcccttgtgtccattcaagaagtctctccttctctgcagagcacctcctgggagctgggcactgctctggcacttggcacccagcagtgaacagaaaagaccgcctctcgctccctcgcagcttgagtgatagtggagggaaaatgaccaagaacaaatcacacaagtaaaatgcacaagatcaaaga

SEQ ID NO: 119438 - DNA, 1201 bp, Homo sapiens
  Payload ID: 3397
  Gene Symbol: C8orf74
  Gene Name: chromosome 8 open reading frame 74
  ENST ID: ENST00000523289
  CDS Start-End: 6-305
gggccatggcactcttaacaccccagggagtgaaagaagtcttccaacttcagagaccacaaggtcgggagcgcctgcggaggcttctgaactgggaggagtttgacgaacagagagactcccggaggagcatcctgctggacaccctctacgagagcatcatctttgcagtgggcaaaggcttcccatgggtggaggtggcccaggtggtcaagttcacagaagagctgctaagggaaaccaaaggttcagtccaggagcccacacagcccaccagctgtgtaggaatgccagcagaggcctgatgatggcaatgacggtgacaatggcattacttattgagtgtttactgtgtaccaggcactgtggaaagcaccacatatgcatgctgtcgcctaatctcacgaggtagagatttttattgcctctattttacaggctgctccattactgaggctgtgacgatcctggggaacaagcttagagattaccggggccatttcaacaccacccacctgctggccctctgtgactacttccaccacaccttcatccgccactacaaactctaccagtatgtcctgggccaggaccagcaggtcgacctgaccgttgcccacctggaggtgtgcatgccaccccatcccctcccgctggccgagggcatggacagggacttgtggatccacgagcagcaggtggccacactgacggaggccgaggcacagaagcgcgccgacgtgctgctcctgaaagaggcgctgcgcctggagcgggagaactcgctgcagaaggcgttcgctgccgccgcgcctgcgcagcccggccaggtcctggagagacaggagttggagagcctcatctgccaggcagtccacacccagatggagctcctgcaggagctgctgcagcgccagatccagaacacattcgccatcttggacctgaagcttcagaagaagactctgaacctcaacgcccccacccctatcccgccccccatcaccagccacgcaggccaggaggaagccctgaagccccaaagagcgagcaaaggaaagaaagcgaaggcaaggaagtagaaggtcccgactgccacacgagactgactggggaccagccacccataaccatgagccttgcggcacggtgagctcagcacccacagagagacttcttgtgattaaaagaaacaaaccca

SEQ ID NO: 119439 - DNA, 1919 bp, Homo sapiens
  Payload ID: 3397
  Gene Symbol: C8orf74
  Gene Name: chromosome 8 open reading frame 74
  ENST ID: ENST00000523723
  CDS Start-End: 14-313
agatgcaggggccatggcactcttaacaccccagggagtgaaagaagtcttccaacttcagagaccacaaggtcgggagcgcctgcggaggcttctgaactgggaggagtttgacgaacagagagactcccggaggagcatcctgctggacaccctctacgagagcatcatctttgcagtgggcaaaggcttcccatgggtggaggtggcccaggtggtcaagttcacagaagagctgctaagggaaaccaaaggttcagtccaggagcccacacagcccaccagctgtgtaggaatgccagcagaggcctgatgatggcaatgacggtgacaatggcattacttattgagtgtttactgtgtaccaggcactgtggaaagcaccacatatgcatgctgtcgcctaatctcacgaggtagagatttttattgcctctattttacagaaactactactgacttctaacatcatagttgggccagttttaataaatggaataaaaaagacaaagaaagagaacactgatgcccagagaggccaaataacttctgcaagtgatgaagttgtgcagcctgaggttagcctgcatctgcctgaatccccagtctgtgctcataccagacataccctactgcccctgacagaggagccgagcttcaaggaatggccccagcatcagtgccatcttcagtcccatcttcagtccaggtgttccctaggcgcaatggtggctgctgtgtgaccgtgaatggtggctgagaacagaacacacagctattgaatccttggtgcccaagtcacagggcaggaggatgatgcatctccagccagcgtggtcctcctttggccagtccgggcccatcctgatgaggtcaggagggatgcagctgctcctcttcccccatgggagtgtcaggcccaaccagcctgccctctctcctctccctgcagtttaccaggtggctttggaaaggggtcaccctgaagggaccacttgtgctgcagtaggaggtgggaagatcaacagaccacggaccccgggacaggcaggagccacagaagaggtctcaagcaaaggtggcaagctctcagggctcttcctgacaatcctgcctgtccccaggccgtggacagcaggtcagccacaaagctaactcccaagaacagcacctggcccagtctccttccctggctcctccgttcccttccctgggcagacagtgccccagccaagctttcacagacatttctgacctatcaaaaagcaccagggctggggcaatgaaaagaaatagacaccaatcccttccctacacagggagtggtgatggggaaggcagctctaccaccaggttcccgacccctcacacctgggctgaagctcaggtcctgactttgccacaggttagctttaggcaagtctcatcctttttctgggcctcagtttccccatttgtagagaaaaacgattgtacaagctcaacatttctccttggtccagagagatgtgctccttggtccagagagactacttgccccaaatagatttgagaagcattgcaaacgctccatgccttttggtgatctgctaagctcatttgcatattttgttgagctcattagcatattaaagctctatttaatctccctggatccaacatctcttaaagggtctctctggctgtgaaacattcattttgatatacaggtgactcttgaagaacacgagatttagggccgccaacctcctgtgcggttgaaaacccatgtgtaactttggactcttccagaatttacttactcatagcctaccgttgaccagaagcttactgataatataaacagtcgattcccatacattttgtatgtaatatgtattatgtactgtgttcttacaataaagtaggctgaagaaaag

SEQ ID NO: 119440 - DNA, 1341 bp, Homo sapiens
  Payload ID: 3398
  Gene Symbol: C8orf76
  Gene Name: chromosome 8 open reading frame 76
  Uniprot ID: Q96K31
  ENST ID: ENST00000276704
  CDS Start-End: 53-1195
ccgccttttccggcgggccccgcttcctcgttgcccccgccgcgggcgcgagatggattccgggtgctggttgttcggcggcgagttcgaggactcggtgttcgaggagaggccggagcggcggtcaggaccgcccgcgtcctactgcgccaagctctgcgagccgcagtggttttatgaagaaacagaaagcagtgatgatgttgaagtgctgactctcaagaaattcaaaggagacctggcctacagacgacaagagtatcagaaagcactgcaggagtattccagtatctctgaaaaattgtcatcaaccaattttgccatgaaaagggatgtccaggaaggtcaggctcggtgtctggctcacctgggtaggcatatggaggcgctggagattgctgcaaacttggaaaataaagcaaccaacacagaccatttaaccacggtactctacctccagcttgctatttgttcaagtttgcagaacttggagaaaacaattttctgcctgcagaaactgatttctttgcatccttttaatccttggaactggggcaaattggcagaggcttacctgaatctggggccagctctttcagcagcacttgcgtcatctcagaaacagcacagtttcacctcaagtgacaaaactatcaaatccttctttccacactcaggaaaagactgtcttttgtgttttcctgaaaccttgcctgagagctctttattttctgtggaagcgaatagcagtaatagccagaaaaatgagaaagctctgacaaatatccaaaactgtatggcagaaaagagagaaacagtgttgatagagactcagctgaaagcatgtgcctcttttatacgaaccaggcttctgcttcagtttacccaacctcagcaaacatcgtttgctttggagaggaacttaaggactcagcaggaaattgaagataaaatgaaagggttcagcttcaaagaagacactttgctgttgatagctgaggttatgggagaagatatcccagaaaaaataaaagatgaagttcacccagaggtgaagtgtgttggctccgtagccctgactgccttggtgactgtatcctcagaagaatttgaagacaagtggttcagaaagatcaaagaccatttctgtccatttgaaaatcagttccatacagagatacaaatcttggcttagtgggttataaaaaacaaaaccacaaatatcttgtactgtattaattgtccttgtttacttcagacaggatccattgctaatcatggagtataaatgattatttatgttttataaaactggcttctgtctcaaatgatttctactgc

SEQ ID NO: 119441 - DNA, 2186 bp, Homo sapiens
  Payload ID: 3399
  Gene Symbol: C8orf82
  Gene Name: chromosome 8 open reading frame 82
  ENST ID: ENST00000313465
  CDS Start-End: 177-437
cggaaggccagggcgggcgagcccccgaggcccgagggagagggaagagcgccgggcccgggtcgcggaggcgggcgccgccggaacgcgaagcgcggggctactgcgggcaggcgcgagttcgcgcagcaccgcccccggcgtgacctgctggtcgcttccggcgcgggaggagaatgtggccgccttgcgggacgctccggaccctggccttggcgcggtcgcggggagcccgggcctgcagcggggatgggggcgtttcctacacgcagggccagagtccggagccgcggacccgcgagtatttctactacgtggaccaccagggccagcttttcctggatgattccaaaatgaagaatttcatcacctgcttcaaaggtaatgctgtgcctccctctccagccccttctttctcccttccgggcagcccctgatgggctccccgactctgccgacgggcccagcgcaccaaggagtgggcgtcctgcgctcaggagccccgctgagtgaggccaggcgaacctcttaccgtcggcgcctgccctcggtatggtcctgggcccggaggccttgggagcccagcgcgctgagtacacgcacccttcatcccccagacccgcagttcctggtcaccttcttctcccgcctgagacccaaccgcagcgggcgctacgaggccgctttccccttcctctcgccctgcggcagagagcgcaacttcctgcgctgcgaggaccggccggtggtcttcacgcacctgctgaccgcggaccacgggcctccgcgcctctcctactgcggcggtggcgaggccctggccgtgcccttcgagccggcgcgcctgctgcccctggccgccaacgggcgcctgtaccacccggcgccggagcgtgcgggcggcgtgggcctggtgcgctccgccctggccttcgagctcagcgcctgcttcgagtacgggcccggcgcgcctgcgctgccctcgcacgtgcgctggcagggccgccgcctcgccctcaccatggacctggccccgctgctgctcgcggctcggtcgccctgagcggggccaagggaaaggcgggaggccgcgggcgcctctcgccccgctcccccgggactccacgccccggaaagcccgcgccacccgcgctcgcggcagcctagtgcgcctgcgcgctcggccccgcccccacccggcgctgtccttggtgctgccgcggcccggccctcccggacaccccgctccccacggcgcgcgccccccgcgcacccgactccggcgccctccggattggcctgcgctcgagacgtcaggcactggcggcgggcgcggggctctggtgcgcgtgcgcgagcgtcccccgccccctcccagcccggcgactgctcgggcccggccgccacctgcacggcgggggagccgctcgccgcgggagcgtcaggtgaggggacgcccgacccaaggtcaccaggcgtgggggcgctgggggatcggggaccatcccggctctgaccctggtgcgctccgagaagggcgtgggtcctggagggggatggggaacgcggaggccacgccctccctgagcccggccgaaaatcaaccggctctcgtgggtagcagaggaggccgtgggggatacaggcaccaggtcgcagcgctgcagaggtgcgcaagggccgcccaaagaccagcttgggcctcgcactgcgcccgaggcagacacagggcgttccatcctcttccctccccgctcccgcacagaggggcgcccaggaggcagtgacagtcgtcgcggaatcctgcgtgtgacaccccgcccctgcccagcggattagggagttgtcctctggtaaaaggatttctgggctgcttccagcttggggccctcatccctgccctggcaggcctttctacaccgatctgcatctagtggggggtcagcgtgagcagcagcgccgtgagttctgaggccaagaaccttctccacttgagaagccttcctgggggaggctgagtgggccaggcctggagccacgtaccaacactttatacccaggggaatggatcccaagggcccagataacgcccccaacttcttggggttcacacgcgtcctgagacatctgggaactgcctctgcctgggccaaagctattccattaaaactttattgctgtgctta

SEQ ID NO: 119442 - DNA, 1637 bp, Homo sapiens
  Payload ID: 3399
  Gene Symbol: C8orf82
  Gene Name: chromosome 8 open reading frame 82
  Uniprot ID: Q6P1X6
  ENST ID: ENST00000534680
  CDS Start-End: 217-867
gcggggcggaccggaaggggcgtcaccggcacacgcctctcggaaggccagggcgggcgagcccccgaggcccgagggagagggaagagcgccgggcccgggtcgcggaggcgggcgccgccggaacgcgaagcgcggggctactgcgggcaggcgcgagttcgcgcagcaccgcccccggcgtgacctgctggtcgcttccggcgcgggaggagaatgtggccgccttgcgggacgctccggaccctggccttggcgcggtcgcggggagcccgggcctgcagcggggatgggggcgtttcctacacgcagggccagagtccggagccgcggacccgcgagtatttctactacgtggaccaccagggccagcttttcctggatgattccaaaatgaagaatttcatcacctgcttcaaagacccgcagttcctggtcaccttcttctcccgcctgagacccaaccgcagcgggcgctacgaggccgctttccccttcctctcgccctgcggcagagagcgcaacttcctgcgctgcgaggaccggccggtggtcttcacgcacctgctgaccgcggaccacgggcctccgcgcctctcctactgcggcggtggcgaggccctggccgtgcccttcgagccggcgcgcctgctgcccctggccgccaacgggcgcctgtaccacccggcgccggagcgtgcgggcggcgtgggcctggtgcgctccgccctggccttcgagctcagcgcctgcttcgagtacgggcccggcgcgcctgcgctgccctcgcacgtgcgctggcagggccgccgcctcgccctcaccatggacctggccccgctgctgctcgcggctcggtcgccctgagcggggccaagggaaaggcgggaggccgcgggcgcctctcgccccgctcccccgggactccacgccccggaaagcccgcgccacccgcgctcgcggcagcctagtgcgcctgcgcgctcggccccgcccccacccggcgctgtccttggtgctgccgcggcccggccctcccggacaccccgctccccacggcgcgcgccccccgcgcacccgactccggcgccctccggattggcctgcgctcgagacgtcaggcactggcggcgggcgcggggctctggtgcgcgtgcgcgagcgtcccccgccccctcccagcccggcgactgctcgggcccggccgccacctgcacggcgggggagccgctcgccgcgggagcgtcagaggggcgcccaggaggcagtgacagtcgtcgcggaatcctgcgtgtgacaccccgcccctgcccagcggattagggagttgtcctctggtaaaaggatttctgggctgcttccagcttggggccctcatccctgccctggcaggcctttctacaccgatctgcatctagtggggggtcagcgtgagcagcagcgccgtgagttctgaggccaagaaccttctccacttgagaagccttcctgggggaggctgagtgggccaggcctggagccacgtaccaacactttatacccaggggaatggatcccaagggcccagataacgcccccaacttcttggggttcacacgcgtcctgagacatctgggaactgcctctgcctgggccaa

SEQ ID NO: 119443 - DNA, 401 bp, Homo sapiens
  Payload ID: 3399
  Gene Symbol: C8orf82
  Gene Name: chromosome 8 open reading frame 82
  ENST ID: ENST00000527462
  CDS Start-End: 1-401
cccgagggagagggaagagcgccgggcccgggtcgcggaggcgggcgccgccggaacgcgaagcgcggggctactgcgggcaggcgcgagttcgcgcagcaccgcccccggcgtgacctgctggtcgcttccggcgcgggaggagaatgtggccgccttgcgggacgctccggaccctggccttggcgcggtcgcggggagcccgggcctgcagcggggatgggggcgtttcctacacgcagggccagagtccggagccgcggacccgcgagtatttctactacgtggaccaccagggccagtccccagccccggcgctgacttctcgccgctgccagggagacacccgggccgccctgcctttttttggaagccctgtcaaaaggcagctgcatgtccgg

SEQ ID NO: 119444 - DNA, 2476 bp, Homo sapiens
  Payload ID: 3399
  Gene Symbol: C8orf82
  Gene Name: chromosome 8 open reading frame 82
  Uniprot ID: Q6P1X6
  ENST ID: ENST00000524821
  CDS Start-End: 217-867
gcggggcggaccggaaggggcgtcaccggcacacgcctctcggaaggccagggcgggcgagcccccgaggcccgagggagagggaagagcgccgggcccgggtcgcggaggcgggcgccgccggaacgcgaagcgcggggctactgcgggcaggcgcgagttcgcgcagcaccgcccccggcgtgacctgctggtcgcttccggcgcgggaggagaatgtggccgccttgcgggacgctccggaccctggccttggcgcggtcgcggggagcccgggcctgcagcggggatgggggcgtttcctacacgcagggccagagtccggagccgcggacccgcgagtatttctactacgtggaccaccagggccagcttttcctggatgattccaaaatgaagaatttcatcacctgcttcaaagacccgcagttcctggtcaccttcttctcccgcctgagacccaaccgcagcgggcgctacgaggccgctttccccttcctctcgccctgcggcagagagcgcaacttcctgcgctgcgaggaccggccggtggtcttcacgcacctgctgaccgcggaccacgggcctccgcgcctctcctactgcggcggtggcgaggccctggccgtgcccttcgagccggcgcgcctgctgcccctggccgccaacgggcgcctgtaccacccggcgccggagcgtgcgggcggcgtgggcctggtgcgctccgccctggccttcgagctcagcgcctgcttcgagtacgggcccggcgcgcctgcgctgccctcgcacgtgcgctggcagggccgccgcctcgccctcaccatggacctggccccgctgctgctcgcggctcggtcgccctgagcggggccaagggaaaggcgggaggccgcgggcgcctctcgccccgctcccccgggactccacgccccggaaagcccgcgccacccgcgctcgcggcagcctagtgcgcctgcgcgctcggccccgcccccacccggcgctgtccttggtgctgccgcggcccggccctcccggacaccccgctccccacggcgcgcgccccccgcgcacccgactccggcgccctccggattggcctgcgctcgagacgtcaggcactggcggcgggcgcggggctctggtgcgcgtgcgcgagcgtcccccgccccctcccagcccggcgactgctcgggcccggccgccacctgcacggcgggggagccgctcgccgcgggagcgtcaggtgaggggacgcccgacccaaggtcaccaggcgtgggggcgctgggggatcggggaccatcccggctctgaccctggtgcgctccgagaagggcgtgggtcctggagggggatggggaacgcggaggccacgccctccctgagcccggccgaaaatcaaccggctctcgtgggtagcagaggaggccgtgggggatacaggcaccaggtcgcagcgctgcagaggtgcgcaagggccgcccaaagaccagcttgggcctcgcactgcgcccgaggcagacacagggcgttccatcctcttccctccccgctcccgcacagaggggcgcccaggaggcagtgacagtcgtcgcggaatcctgcgtgtgacaccccgcccctgcccagcggattagggagttgtcctctggtaaaaggatttctgggctgcttccagcttggggccctcatccctgccctggcaggcctttctacaccgatctgcatctagtggggggtcagcgtgagcagcagcgccgtgagttctgaggccaagaaccttctccacttgagaagccttcctgggggaggctgagtgggccaggcctggagccacgtaccaacactttatacccaggggaatggatcccaagggcccagataacgcccccaacttcttggggttcacacgcgtcctgagacatctgggaactgcctctgcctgggccaaagctattccattaaaactttattgctgtgcttacttatttctagtgactttaaataatcatgtgagttacaatttagggcaagatttaaacaccaaggccacttggtcctgtccctttccacatgactcgaaaggaggaagagctgatggacaggcaaatgtttggggaggccggccagatgaggctgggagacaggacacctgcagccctgttttccctggcttcgggtgggctggctggcttagcccagatccctacttttaaaactgggctccttgttcctgaaaccagaccccagccttcccatttctttacgacaagtacatgtatatggtcccccagcaaactccctgctccttgctgatctcagaggtcacactgctcccagagcccacttgggaagccacaccagaaacccagttggtggcccaaggcgtcccctgtcccaccccagctttcccagggccccatctatccccaaagacaggacacctttctggggaccggcatgggaagca

SEQ ID NO: 119445 - DNA, 802 bp, Homo sapiens
  Payload ID: 3399
  Gene Symbol: C8orf82
  Gene Name: chromosome 8 open reading frame 82
  ENST ID: ENST00000532827
  CDS Start-End: 1-784
cggggagttgggtcggtccgggccgaggctcctacatgggccgcgtccctgctgcgttgtgcagcttcggactctgtcctacaagtccccagccccggcgctgacttctcgccgctgccagggagacacccgggccgccctgcctttttttggaagccctgtcaaaaggcagctgcatgtccgggaggcagcaggccaggtagtctccgcggaggaggtggtacaactgattacaaacttgaaaagagggaaaaggtgcgggaaagaattggctgaccagggagcagagcttttcctggatgattccaaaatgaagaatttcatcacctgcttcaaagacccgcagttcctggtcaccttcttctcccgcctgagacccaaccgcagcgggcgctacgaggccgctttccccttcctctcgccctgcggcagagagcgcaacttcctgcgctgcgaggaccggccggtggtcttcacgcacctgctgaccgcggaccacgggcctccgcgcctctcctactgcggcggtggcgaggccctggccgtgcccttcgagccggcgcgcctgctgcccctggccgccaacgggcgcctgtaccacccggcgccggagcgtgcgggcggcgtgggcctggtgcgctccgccctggccttcgagctcagcgcctgcttcgagtacgggcccggcgcgcctgcgctgccctcgcacgtgcgctggcagggccgccgcctcgccctcaccatggacctggccccgctgctgctcgcggctcggtcgccctgagcggggccaagggaaagg

SEQ ID NO: 119446 - DNA, 2250 bp, Homo sapiens
  Payload ID: 3400
  Gene Symbol: C8orf86
  Gene Name: chromosome 8 open reading frame 86
  Uniprot ID: Q6ZUL3
  ENST ID: ENST00000358138
  CDS Start-End: 26-697
aagagatgctcaggtcagggagggaatgagacccctggggaagggactcctcccagctgaggagttgattagaagcaatcttggagttggcaggagccttagagactgcctgagccagtccgggaagctggctgaggagcttgggagcaagagactaaaaccagccaagtttgggacagaagggaaggaaagggttgagcagcgaacagagagacaaagaacaggcagttccaaagagccaagaatgcaaatcatttgcagacgccgctggcgagagcctccaccaaggctgctgtgggggtgcctgatgccacgagcacagccacttctacacgtcacggcttatgagaatacaggccactgggagagactcgcatctgtggtttcttcaaaaacacagcagcccacagtgatctctcattcttccatttctatcacattcagtcattaccctccagccacactggactcctttcttgtcctggaacctatcaaactctttcctgtctcaagcctccgcagtcctctctgcttgaactgtggctcctgcagagaaagcatcagaatctccggggaactgattggaaatgcacattctccagccccgcccagaactcctgaattagaaaccctggggtgggacaagcaagccgtgctttctggggcacaggtgattctggtgtgtgctgaagtttaagaaccactggccgagaacattcttaggtctgctcttcttttgcccggcccctccctcgcggaggaattccttcttattcctctctgaagagtggctgctgccaaaaaacgtttgtgagatggcctgggttttctttgttgatttatcatttagtttggaagaaatcagaagtctctttaagaagccaatttgaaacattcaccccatgggaacagttctggatgaagtcagaagatctggaggcagcgcagtaacacacgtaggttttctggccatatggacatttcagagaaaacaacgcacagaggcctggagcaggtgaactggcttaagtagagagaaactaagtcatttggggatatttagcacctaatgtcaaggcagaaatgtctaagatgtaattaacagttatattctaatctcaatagtagctaagtacagacttaaacataagcctgtatataacaaaataaccccaggagaaccaaagaaaatctagaagttgctgctaaaaacagttatgttagtgatacctaggaaagttttttttcttttaacatgtcattgtggtttacaaatgaaaattgaggccgggcgtggtggctcacgcctgtaatcccagcacttttggaggccaaggtgggcgaatcacaaggtcaggagttcaagaccagtctggccaacatggtgaaaccccatctttactaaaaatacaaaaaattagctgggcgtggtggtgggcgcctgtaatctcagctactagggaggctgaggaaggagaatcgcttgaacctgggaggcggaggttgcagtgagccaagatcatgccaccgcactccagcctgggcaacagtgtgagactccatctcaaaacaaacaaacaaacaaatgaaacaaatgaaaattgaaacttcacccatttatggctattgcctaaagaatttataaatgcctgggtcattgcaagcatattgctgacatgtctctcggtctgcgttaccctggtggacatcacgacactcacctgacaggcagcagcttccttccagtaaaagcaaagaatctgaaaggaatggaaaaggctccacacagtgccattttatagaaggaaatgcaacaaggtcacagaccagaaggacagcagcccaggccggctgggcatggaggaagtcccaagatgctgctgggcatgaacagacctcctcatacagtgtgcctctgaagaaataatgcaattgtgtggggccagaggagccacaaatagaacaaagggaggaaaggaaaaatcaatatgcagtaaagaggaggaagggagcccggcgcgatgtctgaatctcgctggcaagaaaaggaaacaggtggtctaagcaggcaacccttcaccccacattgtaatgctggggcatggacgtgttccatagatcactcactgagaagtcttcacaagaacactccaaggcagacactactatccatcttccacacactgggggattgagagtcagaaggattatacagcttgttcaaattataaataaaagccctgagatttg

SEQ ID NO: 119447 - DNA, 1527 bp, Homo sapiens
  Payload ID: 3400
  Gene Symbol: C8orf86
  Gene Name: chromosome 8 open reading frame 86
  Uniprot ID: Q6ZUL3
  ENST ID: ENST00000437935
  CDS Start-End: 21-443
atgctcaggtcagggagggaatgagacccctggggaagggactcctcccagctgaggagttgattagaagcaatcttggagttggcaggagccttagagactgcctgagccagtccgggaagctggctgaggagcttgggagcaagagactaaaaccagccaagtttgggacagaagggaaggaaagggttgagcagcgaacagagagacaaagaacaggcagttccaaagagccaagaatgcaaatcatttgcagacgccgctggcgagagcctccaccaaggctgctgtgggggtgcctgatgccacgagcacagccacttctacacgtcacgcctccgcagtcctctctgcttgaactgtggctcctgcagagaaagcatcagaatctccggggaactgattggaaatgcacattctccagccccgcccagaactcctgaattagaaaccctggggtgggacaagcaagccgtgctttctggggcacaggtgattctggtgtgtgctgaagtttaagaaccactggccgagaacattcttaggtctgctcttcttttgcccggcccctccctcgcggaggaattccttcttattcctctctgaagagtggctgctgccaaaaaacgtttgtgagatggcctgggttttctttgttgatttatcatttagtttggaagaaatcagaagtctctttaagaagccaatttgaaacattcaccccatgggaacagttctggatgaagtcagaagatctggaggcagcgcagtaacacacgtaggttttctggccatatggacatttcagagaaaacaacgcacagaggcctggagcaggtgaactggcttaagtagagagaaactaagtcatttggggatatttagcacctaatgtcaaggcagaaatgtctaagatgtaattaacagttatattctaatctcaatagtagctaagtacagacttaaacataagcctgtatataacaaaataaccccaggagaaccaaagaaaatctagaagttgctgctaaaaacagttatgttagtgatacctaggaaagttttttttcttttaacatgtcattgtggtttacaaatgaaaattgaggccgggcgtggtggctcacgcctgtaatcccagcacttttggaggccaaggtgggcgaatcacaaggtcaggagttcaagaccagtctggccaacatggtgaaaccccatctttactaaaaatacaaaaaattagctgggcgtggtggtgggcgcctgtaatctcagctactagggaggctgaggaaggagaatcgcttgaacctgggaggcggaggttgcagtgagccaagatcatgccaccgcactccagcctgggcaacagtgtgagactccatctcaaaacaaacaaacaaacaaatgaaacaaatgaaaattgaaacttcacccatttatggctattgcctaaagaatttataaatgcctgggtcattgcaagcatattgctgacatgtctctcggtctgcgttaccctggtgg

SEQ ID NO: 119448 - DNA, 894 bp, Homo sapiens
  Payload ID: 3401
  Gene Symbol: C8orf88
  Gene Name: chromosome 8 open reading frame 88
  Uniprot ID: P0DMB2
  ENST ID: ENST00000517562
  CDS Start-End: 171-524
ctcgccccccgccgccgccaccgcggtcagccagcggaccagcggcaggagccgttccccgacgggcagcagggcgctcggcctccgcgtgtgggctgagcgcggcgacgctgctgccccgaaatccccgtggattttgagtcgtatggaacctcaaagtctttgtgacaatggaaaccaaaaaattaattggtaaaccgcttcaaccagcaagacctgttcgtcatctgacttctcccccaggagcagtgttccctttcaactttcaaaacgaatatccatgcaacactcagtgcatacaaagtggagttagcagatgtaagacgaatggaatgcaagccttttctcaaggtcttaatgagcaacagcaacagcagtctccagttaagaaagagagaattaaatacagcagagatttcctgttgaagctctcaagtgtttccatctgcagaaaaaaaccagactttctgcctgatcatcccattgtactgcaaaaaccagaaaacaaccaaagttttaagtagcattttaagaacagatgaatttaagtttggacatctgcaaatgaggtggatctagcaacaataactgtaatggactgtgacaattcaatttattcttaattttgatggttggctatttgacttctctaaaaatgagaaagagctattttaaaatataaagaattttctaatcagtttcagctttgcaggaggtttcctgcataaattgggaagtaacactggaaagtaggaatttggttagtgaagtgggaagactgtatatttataatttgcatactacttgcaattttttgtttttcatcacttgtaataatggaatggaaatgtaagctgtaaagactctcaaatataaaatatttgctacagtgta

SEQ ID NO: 119449 - DNA, 495 bp, Homo sapiens
  Payload ID: 3402
  Gene Symbol: C8orf89
  Gene Name: chromosome 8 open reading frame 89
  ENST ID: ENST00000613105
  CDS Start-End: 45-272
gcagcagcatctccctctcatcagcactgttgaaagaagaaaaaatgtcagtgctatctcctgaaatcaaatgtgagacttctaaattcaccagaagttcctttggcagttgtttgatttttgagagtagttggaagaaagcagttttagaaacacaaaagattaagaaagaatataccacagcatttggtctagaagagctcaaggaatgtatcaaaatgccatatttaccaggactgcaaagttgccaaaaaagtgctaaagaagactaaggagacatgcagtgtggcaccactttgggagaaatcaaaaggttctggcttcagtgatcctctcactggagcaccatctcaatacttagagagactttccaaaatagccatattggaatatgataccattcgtcaggaaacaaccacaaaatcaaaaaaaagcaagaaacgagacctccgagaccgctgaaaaatgtcgtacagtgtgatgctttcttcagtg

SEQ ID NO: 119450 - DNA, 507 bp, Homo sapiens
  Payload ID: 3402
  Gene Symbol: C8orf89
  Gene Name: chromosome 8 open reading frame 89
  ENST ID: ENST00000625134
  CDS Start-End: 45-341
gcagcagcatctccctctcatcagcactgttgaaagaagaaaaaatgtcagtgctatctcctgaaatcaaatgtgagacttctaaattcaccagaagttcctttggcagttgtttgatttttgagagtagttggaagaaagcagttttagaaacacaaaagattaagaaagaatataccacagcatttggtctagaagagctcaaggaatgtatcaaaatgccatatttaccaggactgcaaagttgccaaaaaagtgtaagttcaactccactagaggttcctaaaagactgccacgtgctgatgccgaggtgtctgcagtcaggttctggcttcagtgatcctctcactggagcaccatctcaatacttagagagactttccaaaatagccatattggaatatgataccattcgtcaggaaacaaccacaaaatcaaaaaaaagcaagaaacgagacctccgagaccgctgaaaaatgtcgtacagtgtgatgctttcttcagtg

SEQ ID NO: 119451 - DNA, 658 bp, Homo sapiens
  Payload ID: 3402
  Gene Symbol: C8orf89
  Gene Name: chromosome 8 open reading frame 89
  Uniprot ID: P0DMQ9
  ENST ID: ENST00000624510
  CDS Start-End: 45-530
gcagcagcatctccctctcatcagcactgttgaaagaagaaaaaatgtcagtgctatctcctgaaatcaaatgtgagacttctaaattcaccagaagttcctttggcagttgtttgatttttgagagtagttggaagaaagcagttttagaaacacaaaagattaagaaagaatataccacagcatttggtctagaagagctcaaggaatgtatcaaaatgccatatttaccaggactgcaaagttgccaaaaaagtgtaagttcaactccactagaggttcctaaaagactgccacgtgctgatgccgaggtgtctgcagtcaggctaaagaagactaaggagacatgcagtgtggcaccactttgggagaaatcaaaaggttctggcttcagtgatcctctcactggagcaccatctcaatacttagagagactttccaaaatagccatattggaatatgataccattcgtcaggaaacaaccacaaaatcaaaaaaaagcaagaaacgagacctccgagaccgctgaaaaatgtcgtacagtgtgatgctttcttcagtgacttttaagctttatattttctttttttatatgatatgatgcaaaatgatttatataaaaatggaaatgtaaataaataaatattttacattata

SEQ ID NO: 119452 - DNA, 4286 bp, Homo sapiens
  Payload ID: 3403
  Gene Symbol: C9orf114
  Gene Name: chromosome 9 open reading frame 114
  Uniprot ID: Q5T280
  ENST ID: ENST00000361256
  CDS Start-End: 42-1172
agtctcattggcagaggcgggaccgacggtgtgtgcggaacatggcggagcgcggcaggaagcggccgtgcggcccgggtgaacacggccaaaggattgagtggcgaaaatggaagcaacagaagaaagaggagaaaaaaaaatggaaggatctcaagctgatgaaaaaactggagcggcagcgggcacaggaggaacaggcaaagcgcctggaagaggaggaggcagcggcagagaaggaggaccgcgggcggccctacacactgagcgtagccctgccgggctccatcctggacaatgctcagtcgccggagcttcgcacctacttggccggtcagattgccagagcctgtgccatcttctgtgtggatgagatcgtggtgtttgatgaggagggccaggatgccaagactgtggagggggaattcacaggagttgggaagaaggggcaggcgtgcgtacagctggcccggatcctgcagtacctggagtgtccacagtacctgaggaaggcgttcttccccaagcaccaggatctacagtttgcagggctcctgaaccccctggacagcccccaccacatgcgtcaggatgaggaatccgagttccgagagggcatcgtggtggatcggcccacccggccaggccacggctcctttgtcaactgtggcatgaaaaaggaggtgaagattgacaagaacctggagcccgggcttcgggtgactgtgcgactgaaccagcagcagcacccagactgcaagacctaccatggcaaagtggtatcatcgcaggaccctcgcaccaaagctggtctctactggggctacaccgtccgactggcttcctgcctcagtgctgtgtttgctgaggcccccttccaagatgggtatgacctgaccatcgggacgtcagagcgcggctcagatgtggcctctgcccagcttcccaacttcaggcatgctcttgtggtgttcgggggcctccagggtctggaagctggagcggatgctgaccccaacctggaggtggctgaacccagtgtcctctttgacctgtacgtcaatacctgtcctggccagggtagccgtaccatccgcacggaggaagccatcctcatctccctggccgccctgcagcctggcctcatccaggcgggtgcccggcacacctgaaagttctaaggggccgaggacatcagtgaagcagcagtgaaaccaggggctctgcaggtcacttgggacggacgccaccagacttgtctccaaaaatcaccacctttaatactccccggcctgcacacacccacagtctcactgggctccaccctcacttactgcccgccgtgatggccttgaggctgcctgcccgcgccaggatgtttggcacaaagagcagccccgaagcccgctcaatgctctcgatgggcaccaggaagcgctccagtgggatggcctcatccacaggtgcgttgggcatcacgtaggtgcggagctcaatttgcccacctgctgcctccaggatcagcaccttgaagaagtgtgtgggcactgccacgtggttcttgccgatgacctggtactttacgtaggatttcccatcagcctctgtcctgtgggcagacccaggcacacgtgggcagggggcctggatgaacccaaagccacctcttccaggcagccttccctgatctgtcctctaacttctgtcaacctgcaggaccacgccctcactgtgagacttctgtagcctgcctggctcctccttgaggctggaactctctccagggtggttaactctttccctctgttttccttatgcccaacactgggtcaggcagagtgggcgacaataaacgctgctaggagaatcgagccttctgaatattcacattcgtctgaggggagacttaacgactgtccatctctccccacagaggtgagcaacaagtgggcaaggaccatgacaggtgatatcccagcaccagcacaggtgccaggacaccggacgggggctccccctcagcagagtctcctcccttccaccaggccctaggaggcacctgctaatgaaatttgatcagtgccccaaccaccgccttggccagcctatgccgagcccttaccatggaccaggccctggggaagcatgtgacatcaaccaagaggtcacaggttttgcagagggggacacaggtcatttgcccacagcaccaaggaactaggtgatgaggcctggactccatcccgagcctgtggattccagagtgagctgctcagcctggacctgttgcctctcagccccagccctctgcaggccagaaaaaccacggagcacacccagaggtgctcagttgcttccacctgagaggcagggctgcacaggagcaagagtggaggccctgggtcaggcagatctagattcaaactcccgagaagggtggagggaagtgctccaagcagagcagagactgaaggcgggagagcctggtgcaccgcggacctgcagggggaaggcatgagagctcggtgcactggggacctgcatggggaaggcgggagagctcggtgcactggggacctgcatggggaaggcgtgagagctcggtgcactggggacctgcatggggaaggcgggagagctcggtgcacctcggacctgcagagggaaggtgggagagcttggtgcaccgcagacctgcagggggaaggcgggagagcttggtgcactgcagacctgcggggggaaggtgggagagcttggtgcactgcagacctgcggggggttccatattggcagaacaagattgggtgggcatgccaagaggtgacagcagggagaagcgggggcagattcagggcctgctgctgcccatgggcagaggagagatggtcaggggtacccgacaggtctttggctgtggaggtggaatgaggggactcgaggcagggaagctgacaggcttgccaagaaaccagatgagtagggaactggtattgacccagagcctggggcaagcctggccctgtgagtggcagtaggggcctcaggtgagtgggaggttctgccgcccccctggtttccaccttacctgggcaggaagagtggccctgtgcagacatagacgttttggtagctgcgggtcaagctgcggctatatttctccaggttgttccaggcattctggttgaggtggggcacctggtaggagagatagggcttagcaggactgtggctgggacccttcctcctctatcagagggccgccccaggtcctgaggggatggacaggctcagagatatccagtgagacaagcggggggaaactgaggctcaaggaatgaaagtcactccctgaaacccagggctgatagagtgctagccaccaccctctgtccctcccacagcccaggtgtcaaagtcttttctcagctcccaagagtcgaatgaaggaagagcctgtctccacctttcagagaggactgaggcctgtccccagccccacccagggtctcctgggaagaccagcccttccaactaccaacccgttccttttcccagtctgagccacaggaagagcctagcggggaatgccatgaatcgacctccatcctgagctctccaggcctgggacaatggaaagtggatagggggctgtcttcccagaaggaagctgggtcagaggttggtgccccatgggctccacccagagccccatggcagtctccatccattggtgccaggacctgctgggaacaggctgagagggtggttggcccagtgcacagtgcctggcactaacaacctgatcgtgggccaggtgtctgcctcgaaactgcctgaaggcaggcagggtaggacaatgtctggaggctcacggttttatagactaggggtccccaacccctgggctacagaccggtaccagaaccgggccacacagcaggaggtgagcagcaggcgagcaagggaagcttcatctgtatttacagccacccccccattgatcccacagcagcctgagctccgcctcctgtcagatcagtggcggctggagattgtcataggagctggaaccctatggtgaactgcgcatgtgaggaggttgcgcgcttcttttgaaaacctaatgcctgatctgtcgttgttgcccatcacctccagataggactgtctagttgcaggaaaacaagctcagggctcccacggatcctacattactgtgagttgtatatttcactatatgttacaatgtaataataatagaaataaaatgtacataaatgtaa

SEQ ID NO: 119453 - DNA, 898 bp, Homo sapiens
  Payload ID: 3403
  Gene Symbol: C9orf114
  Gene Name: chromosome 9 open reading frame 114
  ENST ID: ENST00000467582
  CDS Start-End: 1-264
accaaagctggtctctactggggctacaccgtccgactggcttcctgcctcagtgctgtgtttgctgaggcccccttccaagatgggtatgacctgaccatcgggacgtcagagcgcggctcagatgtggcctctgcccagcttcccaacttcaggaagccatcctcatctccctggccgccctgcagcctggcctcatccaggcgggtgcccggcacacctgaaagttctaaggggccgaggacatcagtgaagcagcagtgaaaccaggggctctgcaggtcacttgggacggacgccaccagacttgtctccaaaaatcaccacctttaatactccccggcctgcacacacccacagtctcactgggctccaccctcacttactgcccgccgtgatggccttgaggctgcctgcccgcgccaggatgtttggcacaaagagcagccccgaagcccgctcaatgctctcgatgggcaccaggaagcgctccagtgggatggcctcatccacaggtgcgttgggcatcacgtaggtgcggagctcaatttgcccacctgctgcctccaggatcagcaccttgaagaagtgtgtgggcactgccacgtggttcttgccgatgacctggtactttacgtaggatttcccatcagcctctgtcctgtgggcagacccaggcacacgtgggcagggggcctggatgaacccaaagccacctcttccaggcagccttccctgatctgtcctctaacttctgtcaacctgcaggaccacgccctcactgtgagacttctgtagcctgcctggctcctccttgaggctggaactctctccagggtggttaactctttccctctgttttccttatgcccaacactgggtcaggcagagtgggcga

SEQ ID NO: 119454 - DNA, 4280 bp, Homo sapiens
  Payload ID: 3403
  Gene Symbol: C9orf114
  Gene Name: chromosome 9 open reading frame 114
  ENST ID: ENST00000622809
  CDS Start-End: 42-1208
agtctcattggcagaggcgggaccgacggtgtgtgcggaacatggcggagcgcggcaggaagcggccgtgcggcccgggtgaacacggccaaaggattgagtggcgaaaatggaagcaacagaagaaagaggagaaaaaaaaatggaaggatctcaagctgatgaaaaaactggagcggcagcgggcacaggaggaacaggcaaagcgcctggaagaggaggaggcagcggcagagaaggaggaccgcgggcggccctacacactgagcgtagccctgccgggctccatcctgacaatgctcagtcgccggagcttcgcacctacttggccggtcagattgccagagcctgtgccatcttctgtgtggatgagatcgtggtgtttgatgaggagggccaggatgccaagactgtggagggggaattcacaggagttggaagaaggggcaggcgtgcgtacagctggcccggatcctgcagtacctgagtgtccacagtacctgaggaaggcgttcttccccaagcaccaggatctacagtttgcagggctcctgaaccccctggacagcccccaccacatgcgtcaggatgaggaatccgagttccgagagggcatcgtggtggatcggcccacccggccaggccacggctcctttgtcaactgtggcatgaaaaaggaggtgaagattgacaagaacctggagcccgggcttcgggtgactgtgcgactgaaccagcagcagcacccagactgcaagacctaccatggcaaagtggtatcatcgcaggaccctcgcaccaaagctggtctctactggggctacaccgtccgactggcttcctgcctcagtgctgtgtttgctgaggcccccttccaagatgggtatgacctgaccatcgggacgtcagagcgcggctcagatgtggcctctgccagcttcccaacttcaggcatgctcttgtggtgttcgggggcctccagggtctggaagctggagcggatgctgaccccaacctggaggtggctgaacccagtgtcctctttgacctgtacgtcaatacctgtcctggccagggtagccgtaccatccgcacggaggaagccatcctcatctccctggccgccctgcagcctggcctcatccaggcgggtgcccggcacacctgaaagttctaaggggccgaggacatcagtgaagcagcagtgaaaccaggggctctgcaggtcacttgggacggacgccaccagacttgtctccaaaaatcaccacctttaatactccccggcctgcacacacccacagtctcactgggctccaccctcacttactgcccgccgtgatggccttgaggctgcctgcccgcgccaggatgtttggcacaaagagcagccccgaagcccgctcaatgctctcgatgggcaccaggaagcgctccagtgggatggcctcatccacaggtgcgttgggcatcacgtaggtgcggagctcaatttgcccacctgctgcctccaggatcagcaccttgaagaagtgtgtgggcactgccacgtggttcttgccgatgacctggtactttacgtaggatttcccatcagcctctgtcctgtgggcagacccaggcacacgtgggcagggggcctggatgaacccaaagccacctcttccaggcagccttccctgatctgtcctctaacttctgtcaacctgcaggaccacgccctcactgtgagacttctgtagcctgcctggctcctccttgaggctggaactctctccagggtggttaactctttccctctgttttccttatgcccaacactgggtcaggcagagtgggcgacaataaacgctgctaggagaatcgagccttctgaatattcacattcgtctgaggggagacttaacgactgtccatctctccccacagaggtgagcaacaagtgggcaaggaccatgacaggtgatatcccagcaccagcacaggtgccaggacaccggacgggggctccccctcagcagagtctcctcccttccaccaggccctaggaggcacctgctaatgaaatttgatcagtgccccaaccaccgccttggccagcctatgccgagcccttaccatggaccaggccctggggaagcatgtgacatcaaccaagaggtcacaggttttgcagagggggacacaggtcatttgcccacagcaccaaggaactaggtgatgaggcctggactccatcccgagcctgtggattccagagtgagctgctcagcctggacctgttgcctctcagccccagccctctgcaggccagaaaaaccacggagcacacccagaggtgctcagttgcttccacctgagaggcagggctgcacaggagcaagagtggaggccctgggtcaggcagatctagattcaaactcccgagaagggtggagggaagtgctccaagcagagcagagactgaaggcgggagagcctggtgcaccgcggacctgcagggggaaggcatgagagctcggtgcactggggacctgcatggggaaggcgggagagctcggtgcactggggacctgcatggggaaggcgtgagagctcggtgcactggggacctgcatggggaaggcgggagagctcggtgcacctcggacctgcagagggaaggtgggagagcttggtgcaccgcagacctgcagggggaaggcgggagagcttggtgcactgcagacctgcggggggaaggtgggagagcttggtgcactgcagacctgcggggggttccatattggcagaacaagattgggtgggcatgccaagaggtgacagcagggagaagcgggggcagattcagggcctgctgctgcccatgggcagaggagagatggtcaggggtacccgacaggtctttggctgtggaggtggaatgaggggactcgaggcagggaagctgacaggcttgccaagaaaccagatgagtagggaactggtattgacccagagcctggggcaagcctggccctgtgagtggcagtaggggcctcaggtgagtgggaggttctgccgcccccctggtttccaccttacctgggcaggaagagtggccctgtgcagacatagacgttttggtagctgcgggtcaagctgcggctatatttctccaggttgttccaggcattctggttgaggtggggcacctggtaggagagatagggcttagcaggactgtggctgggacccttcctcctctatcagagggccgccccaggtcctgaggggatggacaggctcagagatatccagtgagacaagcggggggaaactgaggctcaaggaatgaaagtcactccctgaaacccagggctgatagagtgctagccaccaccctctgtccctcccacagcccaggtgtcaaagtcttttctcagctcccaagagtcgaatgaaggaagagcctgtctccacctttcagagaggactgaggcctgtccccagccccacccagggtctcctgggaagaccagcccttccaactaccaacccgttccttttcccagtctgagccacaggaagagcctagcggggaatgccatgaatcgacctccatcctgagctctccaggcctgggacaatggaaagtggatagggggctgtcttcccagaaggaagctgggtcagaggttggtgccccatgggctccacccagagccccatggcagtctccatccattggtgccaggacctgctgggaacaggctgagagggtggttggcccagtgcacagtgcctggcactaacaacctgatcgtgggccaggtgtctgcctcgaaactgcctgaaggcaggcagggtaggacaatgtctggaggctcacggttttatagactaggggtccccaacccctgggctacagaccggtaccagaaccgggccacacagcaggaggtgagcagcaggcgagcaagggaagcttcatctgtatttacagccacccccccattgatcccacagcagcctgagctccgcctcctgtcagatcagtggcggctggagattgtcataggagctggaaccctatggtgaactgcgcatgtgaggaggttgcgcgcttcttttgaaaacctaatgcctgatctgtcgttgttgcccatcacctccagataggactgtctagttgcaggaaaacaagctcagggctcccacggatcctacattactgtgagttgtatatttcactatatgttacaatgtaataataatagaaataaaatgtacataaatgt

SEQ ID NO: 119455 - DNA, 1278 bp, Homo sapiens
  Payload ID: 3404
  Gene Symbol: C9orf116
  Gene Name: chromosome 9 open reading frame 116
  Uniprot ID: Q5BN46
  ENST ID: ENST00000371789
  CDS Start-End: 668-946
agtctcgggcggggagtggagccacggtcctcgccctgcagctcgccccgccctgctaatgggaccggccagcccgggaggcccctgacccttggggaagcccgctgggcgatggggaccctcgcctcccgccaagtgagctgtgaaccacgtcctgcgcaacctctcgctctccaaaactgtttgtaatatttaaacgatatttggcttaggagaatttcataaagttagccagatctcgggtctcaatttagactcggggtgctggggggcatagcatccctggagtacattggacagcaaaagtccaatcgttgcctgccgagtggacctgcagtgcttaaaccccgtcacccggctggcggggtcccaggccctggggtttctttcgcccgggagtccacgccctgatgctggggtggcccggtccccccgcgggtggctgggggcctggggctgcctcacacgacggtcccagcagggaatctctcgccgtcccgaccttcccggcccttggggagtcgcccggcaggttccggacccacccgcagaggaacccggcccacgcgcggcgcctttaaggcccctccgctcgctccccagtcacgtgacctggccgtcgcttggcaacaggacgccgccgagtcccgcttctcctccaggcacaatggctgaggaatgccccagagcgtgcgcggagcctgtggcgcccaaggccacggccccgccggagaggaccagcgactactaccgcgtgagcgcggacctgccgggcaggttcaacaacccggggtggttccggggctacaggacccagaaggctgtctccgtgtacaggaccagtaaccaggcttacgggagcagagcccccaccgtgcacgagatgcctcgggtggaatgttccggaacaatactctcaatgtttacctggagaaaagcatcgtgactggccccgataactgcatcacctcctgtgaccggctcaacttccaccccagttacaacatcaacaggccatccatctgcgattgaggggctggaaactccctctaggagtcctctgaccccagggcctcctggaaaatcatcatccctcatcacccacagtcgcccgattgtgacggcacagactgcgctgccttccctgaaaatattattcgtctgcggagtaggaaaatatgcaaacggggccgtgaagtcctgccatttcacatctaataagtacatgggaaagatgctaatggttgactttgcattaaaaacgttgtcacatcctga

SEQ ID NO: 119456 - DNA, 781 bp, Homo sapiens
  Payload ID: 3404
  Gene Symbol: C9orf116
  Gene Name: chromosome 9 open reading frame 116
  Uniprot ID: Q5BN46
  ENST ID: ENST00000371791
  CDS Start-End: 171-449
gtggggagccgggagcccagcagccccaggaaagacctggaagcacagggaccttttcaggaaacagagggctggagccaggttctgatcccgaccttgctcctggtcacgtgacctggccgtcgcttggcaacaggacgccgccgagtcccgcttctcctccaggcacaatggctgaggaatgccccagagcgtgcgcggagcctgtggcgcccaaggccacggccccgccggagaggaccagcgactactaccgcgtgagcgcggacctgccgggcaggttcaacaacccggggtggttccggggctacaggacccagaaggctgtctccgtgtacaggaccagtaaccaggcttacgggagcagagcccccaccgtgcacgagatgcctcgggtggaatgttccggaacaatactctcaatgtttacctggagaaaagcatcgtgactggccccgataactgcatcacctcctgtgaccggctcaacttccaccccagttacaacatcaacaggccatccatctgcgattgaggggctggaaactccctctaggagtcctctgaccccagggcctcctggaaaatcatcatccctcatcacccacagtcgcccgattgtgacggcacagactgcgctgccttccctgaaaatattattcgtctgcggagtaggaaaatatgcaaacggggccgtgaagtcctgccatttcacatctaataagtacatgggaaagatgctaatggttgactttgcattaaaaacgttgtcacatcctga

SEQ ID NO: 119457 - DNA, 678 bp, Homo sapiens
  Payload ID: 3404
  Gene Symbol: C9orf116
  Gene Name: chromosome 9 open reading frame 116
  Uniprot ID: Q5BN46
  ENST ID: ENST00000429260
  CDS Start-End: 22-432
cccgcttctcctccaggcacaatggctgaggaatgccccagagcgtgcgcggagcctgtggcgcccaaggccacggccccgccggagaggaccagcgactactaccgcgtgagcgcggacctgccgggcaggttcaacaacccggggtggttccggggctacaggacccagaaggctgtctccgtgtacaggaccagtaaccaggcttacgggagcagagcccccaccgtgcacgagatgcctaaagtattttatccaaattcgaataaattttcccaacaacttgcagcgggtggaatgttccggaacaatactctcaatgtttacctggagaaaagcatcgtgactggccccgataactgcatcacctcctgtgaccggctcaacttccaccccagttacaacatcaacaggccatccatctgcgattgaggggctggaaactccctctaggagtcctctgaccccagggcctcctggaaaatcatcatccctcatcacccacagtcgcccgattgtgacggcacagactgcgctgccttccctgaaaatattattcgtctgcggagtaggaaaatatgcaaacggggccgtgaagtcctgccatttcacatctaataagtacatgggaaagatgctaatggttgactttgcattaaaaacgttgtcacatcctga

SEQ ID NO: 119458 - DNA, 273 bp, Homo sapiens
  Payload ID: 3404
  Gene Symbol: C9orf116
  Gene Name: chromosome 9 open reading frame 116
  ENST ID: ENST00000419770
  CDS Start-End: 1-212
ggataagggcagtggggggcagggccgtggggggagaaagcccagttgtggtctcagctccactgatttgtgtcgggacccagaaggctgtctccgtgtacaggaccagtaaccaggcttacgggagcagagcccccaccgtgcacgagatgcctcgggtggaatgttccggaacaatactctcaatgtttacctggagaaaagcatcgtgactggccccgataactgcatcacctcctgtgaccggctcaacttccaccccagttacaacat

SEQ ID NO: 119459 - DNA, 1154 bp, Homo sapiens
  Payload ID: 3405
  Gene Symbol: C9orf129
  Gene Name: chromosome 9 open reading frame 129
  Uniprot ID: Q5T035
  ENST ID: ENST00000375419
  CDS Start-End: 365-955
gcgcaggattcggagctcagaggcccgggccgccggccgcctcccctccgtggctctagggcggaggcggaggcggggaccggggtatctcgctcgcgcagcctggagcccatgctgggctcagcccgaccctgctttggccgctgcccgccgggtctccagcgccgccggaccctcacgccgccaccttctctccagcccagcgccgctgcggccgcagcctcctgccgagcatcttccagatcccaatccctgagaatcagttctgggatgtaacagagcaagcggacattattctgggaccagcaagcctcggtcactgcagccaccacactacgtggcagccagacccggtccgtttggaatgcctgggatggtgccgccgcatgttcctcctcagatgctcaacattccgcagacctctctgcaagcaaagcccgtggccccacaggtgcccagcccagggggcgccccgggccagggtccatacccgtacagcctctctgagccagcacctctcactttggacacgagcgggaagaatctgacggagcagaacagctacagcaacattcctcacgaagggaagcacacgccgctgtatgagcggtccttgcccatcaacccggcccagagcggcagccccaaccacgtggattccgcctacttccctggctcttctacatcgtcatcttccgacaacgacgagggcagcggaggggcgacaaaatatacaatctattggggattccgtgccactgaccaccatgtacaaggaagggattcacaggcaagggggacagcagcccactggcatggggggcatgtctgctcacctaacgttttctggcggatttctcatggcccagcgcaacaactgacattccctactgagcaagcagctccgccagtgtgccctgccccagcgtcccgccgtctctcagcccctggatgagcccagggaaccggcactctactgaggacaaagcagggctcacctagcaatggaagctcttcaatacttaaggtagctaattcaatgtttgtaaaaggcatttacaacagaaaaccaaagattgaacttcagcttcagatttgtaaaccattcacatctctgcaacttaaaacagtaaataaagattatcaatgcacaa

SEQ ID NO: 119460 - DNA, 3409 bp, Homo sapiens
  Payload ID: 3406
  Gene Symbol: C9orf131
  Gene Name: chromosome 9 open reading frame 131
  Uniprot ID: Q5VYM1
  ENST ID: ENST00000312292
  CDS Start-End: 48-3287
gtgatgcaatgatgacctcagggtaaactgccagaaggctaagggaaatggaatggctgctggaggacctgcttggggctaagggggatatggggcttctctggggccaactgacccatgccctagcctgcagacactgcggcagcagctgcttccagagtccaggaaatctggtgacactattcttattcgtggtttggcagattcagagatggtggcagcttgggaggttgcgacagcttcatccctggtgctctgggaatatggtgcaaggcaaggaactaccacttctgcaccgtgtggccttccttgatcacctgtgtaagcagaaatcagaagtggaggaagaaggggaagaagaggaagagggggaagacgaggcatctctggatccactgaagccatgttctcctaccaaagaagctcccactggagagcaagccactccagccccaccccagccatcctgtggttctgagggcctcctcaaggctatagggataccagagcaaacagtcatgcagcccgtgagcccttccagatccttccccatcttccagattctgaccagctttcctgtgaggcacaagatagcatcagggaaccgccagcagcagagaaaaagccagctcttctggggtctcccctctctgcacagcgagtccttggaggccatcttcctgagctcaggtggcccctctcctctgaagtggtctgtttgttcttctgtcttcttcaacaagcttgccttcctacctaggtccaacctgttgcttccccagtatcactcctcagcccagttttctacccatggggcccatactatggaagatctagaagggatggcccccgatcctcagctgcttccacctccatcttctccttctgtctcatcactactcctccatctgaggcccttccctgtggaccacaagggagttttatctggcgctgaggcacccacacagtcccctggaactagccccctggaagttctccctggatatgagactcatttggaaaccacaggacacaaaaagatgccccaagcttttgagcctccgatgccacccccctgccaatccccagcttctctgtcagaacccagaaaagttagccctgaaggaggacttgctatatctaaggacttctggggaaccgtgggatacagagagaaacctcaggcctctgagtcttcaatgccagtcccttgccctcccctagactccctgccagaactccagagagagagttccctggaagatccatccagatataagccccagtgggaatgcagagaaaactcaggaaacctctgggcttttgagtctccagtcttggacctcaacccagagctctctggaaccagccctgaatgtgtcccaccagcatctgagacaccatggaagggcatgcaaagtagagaaaatatttgggtccctgcagacccagtttcacctcccagccttccctcagtccctctcctggagtctctagtaatgggcccccagggagtcctgtctgaatccaaagctttgtgggagaccatggggcagaaagagaacctctgggcatctgattccccagaccctgttcatagcacacctccaaccacccttatggaaccacacagaatcaatcctggggaatgcctcgctacatcagaagctacatggaaggatactgagcattccaggaattcctcggcttctaggtctccatctctggccctcagcccacccccagctcttgcaccggagctgctcagagttagatccatgggggtcctgtctgattctgaagctagatgtggggacatacaaaagacaaaaaactcctgggcctctaagcacccagcttgtaacttaccccaagacctgcatggagccagccctctgggagtcttgtctgattctcagtctattgtaggggaaatggagcaaaaagaaaactgtgttcctgtgttcccaggtaggggctccagcccatcctcaaactctgtttcaaagtcccacgtaagtgagcctatcgcagaccaaagcaactataagcctgacggggaggcagtggagcaaagaaagaaccactgggccactgagctcccagcccccagctcactctctactcctctaccagagccacacattgaccttgaacttgtgtggagaaatgtgcaacaaagagaagttccccaaggccccagccctctggcagtggatcccctacacccagtaccccagcctcccaccctagctgaagctgtgaagattgaacgcactcatcctggtctacccaagggagtaacgtgcccaggggttaaggcagaggccccactctcccagagatggactgtcccagagttgctcacccatcctgggatccatgcctggcagtggagtagagagctgaaactcaggctgaagaaactgcggcagagccctgcctccagagcccctggcccaagtcaatcattttgcagctcccctattctgagctccacaattccagacttctggggactcccttcctgcccaccacagcagatttatccccccaatccatgcccccactcttcaagttgtcatcctcaagaagttcagcgcacagtacctcagcctgtccagtcctcccactgtcatcacttccaatcctcttcccagcttcagccacaggagtctggcagggcggaacaagggtctcagagaggggagaaaatgaaggggaagatggtgagccaggtcccatcccaagggccatgtgtacacatggaggctggtgtggactatctatctccaggcccaggagaaccctcaaactctaaggttctggtctcaggcaagagaaaggacaaggcttcagcctcatcctcagccaaaaagagagagcaccctaggaaacccaaagcaggagaccatagaagagggactgcaaggttggggttatccacagtcacagggaagaaccaccctgcccaggccagaagcctagtagaggcccctgtaagcacatttccccaaaggtctcaacacaggggccagagctctcaacacactgctcttccccagctgcttctccccaaagcttcgggtccccaggatcagccagaggcagggcgaagagcaagtgacatcctgacccctcgccactgtaagcactgtccttgggcccacatggagaagtatctctccttccctaccctcaaggcttcccttaccaggggtttgcaaaaggtgttagccaaatgcctggataaccatcgacccctacccaccaaatctagtcagtagagaaaaggctggtaatactagcacttggtatgccaagacctgaagccaaaccagggggaaggtggggatgtggagacaagaaatggaaattctaataaactagctgaattagataaatccca

SEQ ID NO: 119461 - DNA, 3184 bp, Homo sapiens
  Payload ID: 3406
  Gene Symbol: C9orf131
  Gene Name: chromosome 9 open reading frame 131
  Uniprot ID: Q5VYM1
  ENST ID: ENST00000354479
  CDS Start-End: 51-3071
aaaaagaggcaaaggcagagaacaaaggaaggaggaagttaacttgtggaatgctgagaaaggaactaccacttctgcaccgtgtggccttccttgatcacctgtgtaagcagaaatcagaagtggaggaagaaggggaagaagaggaagagggggaagacgaggcatctctggatccactgaagccatgttctcctaccaaagaagctcccactggagagcaagccactccagccccaccccagccatcctgtggttctgagggcctcctcaaggctatagggataccagagcaaacagtcatgcagcccgtgagcccttccagatccttccccatcttccagattctgaccagctttcctgtgaggcacaagatagcatcagggaaccgccagcagcagagaaaaagccagctcttctggggtctcccctctctgcacagcgagtccttggaggccatcttcctgagctcaggtggcccctctcctctgaagtggtctgtttgttcttctgtcttcttcaacaagcttgccttcctacctaggtccaacctgttgcttccccagtatcactcctcagcccagttttctacccatggggcccatactatggaagatctagaagggatggcccccgatcctcagctgcttccacctccatcttctccttctgtctcatcactactcctccatctgaggcccttccctgtggaccacaagggagttttatctggcgctgaggcacccacacagtcccctggaactagccccctggaagttctccctggatatgagactcatttggaaaccacaggacacaaaaagatgccccaagcttttgagcctccgatgccacccccctgccaatccccagcttctctgtcagaacccagaaaagttagccctgaaggaggacttgctatatctaaggacttctggggaaccgtgggatacagagagaaacctcaggcctctgagtcttcaatgccagtcccttgccctcccctagactccctgccagaactccagagagagagttccctggaagatccatccagatataagccccagtgggaatgcagagaaaactcaggaaacctctgggcttttgagtctccagtcttggacctcaacccagagctctctggaaccagccctgaatgtgtcccaccagcatctgagacaccatggaagggcatgcaaagtagagaaaatatttgggtccctgcagacccagtttcacctcccagccttccctcagtccctctcctggagtctctagtaatgggcccccagggagtcctgtctgaatccaaagctttgtgggagaccatggggcagaaagagaacctctgggcatctgattccccagaccctgttcatagcacacctccaaccacccttatggaaccacacagaatcaatcctggggaatgcctcgctacatcagaagctacatggaaggatactgagcattccaggaattcctcggcttctaggtctccatctctggccctcagcccacccccagctcttgcaccggagctgctcagagttagatccatgggggtcctgtctgattctgaagctagatgtggggacatacaaaagacaaaaaactcctgggcctctaagcacccagcttgtaacttaccccaagacctgcatggagccagccctctgggagtcttgtctgattctcagtctattgtaggggaaatggagcaaaaagaaaactgtgttcctgtgttcccaggtaggggctccagcccatcctcaaactctgtttcaaagtcccacgtaagtgagcctatcgcagaccaaagcaactataagcctgacggggaggcagtggagcaaagaaagaaccactgggccactgagctcccagcccccagctcactctctactcctctaccagagccacacattgaccttgaacttgtgtggagaaatgtgcaacaaagagaagttccccaaggccccagccctctggcagtggatcccctacacccagtaccccagcctcccaccctagctgaagctgtgaagattgaacgcactcatcctggtctacccaagggagtaacgtgcccaggggttaaggcagaggccccactctcccagagatggactgtcccagagttgctcacccatcctgggatccatgcctggcagtggagtagagagctgaaactcaggctgaagaaactgcggcagagccctgcctccagagcccctggcccaagtcaatcattttgcagctcccctattctgagctccacaattccagacttctggggactcccttcctgcccaccacagcagatttatccccccaatccatgcccccactcttcaagttgtcatcctcaagaagttcagcgcacagtacctcagcctgtccagtcctcccactgtcatcacttccaatcctcttcccagcttcagccacaggagtctggcagggcggaacaagggtctcagagaggggagaaaatgaaggggaagatggtgagccaggtcccatcccaagggccatgtgtacacatggaggctggtgtggactatctatctccaggcccaggagaaccctcaaactctaaggttctggtctcaggcaagagaaaggacaaggcttcagcctcatcctcagccaaaaagagagagcaccctaggaaacccaaagcaggagaccatagaagagggactgcaaggttggggttatccacagtcacagggaagaaccaccctgcccaggccagaagcctagtagaggcccctgtaagcacatttccccaaaggtctcaacacaggggccagagctctcaacacactgctcttccccagctgcttctccccaaagcttcgggtccccaggatcagccagaggcagggcgaagagcaagtgacatcctgacccctcgccactgtaagcactgtccttgggcccacatggagaagtatctctccttccctaccctcaaggcttcccttaccaggggtttgcaaaaggtgttagccaaatgcctggataaccatcgacccctacccaccaaatctagtcagtagagaaaaggctggtaatactagcacttggtatgccaagacctgaagccaaaccagggggaaggtggggatgtggagacaagaaatggaaattctaataaactagctgaattaga

SEQ ID NO: 119462 - DNA, 810 bp, Homo sapiens
  Payload ID: 3406
  Gene Symbol: C9orf131
  Gene Name: chromosome 9 open reading frame 131
  ENST ID: ENST00000378745
  CDS Start-End: 43-810
gcaatgatgacctcagggtaaactgccagaaggctaagggaaatggaatggctgctggaggacctgcttggggctaagggggatatggggcttctctggggccaactgacccatgccctagcctgcagacactgcggcagcagctgcttccagagtccaggaaatctggaactaccacttctgcaccgtgtggccttccttgatcacctgtgtaagcagaaatcagaagtggaggaagaaggggaagaagaggaagagggggaagacgaggcatctctggatccactgaagccatgttctcctaccaaagaagctcccactggagagcaagccactccagccccaccccagccatcctgtggttctgagggcctcctcaaggctatagggataccagagcaaacagtcatgcagcccgtgagcccttccagatccttccccatcttccagattctgaccagctttcctgtgaggcacaagatagcatcagggaaccgccagcagcagagaaaaagccagctcttctggggtctcccctctctgcacagcgagtccttggaggccatcttcctgagctcaggtggcccctctcctctgaagtggtctgtttgttcttctgtcttcttcaacaagcttgccttcctacctaggtccaacctgttgcttccccagtatcactcctcagcccagttttctacccatggggcccatactatggaagatctagaagggatggcccccgatcctcagctgcttccacctccatcttctccttctgtctcatcactactcctccatctgaggcccttc

SEQ ID NO: 119463 - DNA, 3259 bp, Homo sapiens
  Payload ID: 3406
  Gene Symbol: C9orf131
  Gene Name: chromosome 9 open reading frame 131
  Uniprot ID: Q5VYM1
  ENST ID: ENST00000421362
  CDS Start-End: 51-3146
aaaaagaggcaaaggcagagaacaaaggaaggaggaagttaacttgtggaatgctgagaaagattcagagatggtggcagcttgggaggttgcgacagcttcatccctggtgctctgggaatatggtgcaaggcaaggaactaccacttctgcaccgtgtggccttccttgatcacctgtgtaagcagaaatcagaagtggaggaagaaggggaagaagaggaagagggggaagacgaggcatctctggatccactgaagccatgttctcctaccaaagaagctcccactggagagcaagccactccagccccaccccagccatcctgtggttctgagggcctcctcaaggctatagggataccagagcaaacagtcatgcagcccgtgagcccttccagatccttccccatcttccagattctgaccagctttcctgtgaggcacaagatagcatcagggaaccgccagcagcagagaaaaagccagctcttctggggtctcccctctctgcacagcgagtccttggaggccatcttcctgagctcaggtggcccctctcctctgaagtggtctgtttgttcttctgtcttcttcaacaagcttgccttcctacctaggtccaacctgttgcttccccagtatcactcctcagcccagttttctacccatggggcccatactatggaagatctagaagggatggcccccgatcctcagctgcttccacctccatcttctccttctgtctcatcactactcctccatctgaggcccttccctgtggaccacaagggagttttatctggcgctgaggcacccacacagtcccctggaactagccccctggaagttctccctggatatgagactcatttggaaaccacaggacacaaaaagatgccccaagcttttgagcctccgatgccacccccctgccaatccccagcttctctgtcagaacccagaaaagttagccctgaaggaggacttgctatatctaaggacttctggggaaccgtgggatacagagagaaacctcaggcctctgagtcttcaatgccagtcccttgccctcccctagactccctgccagaactccagagagagagttccctggaagatccatccagatataagccccagtgggaatgcagagaaaactcaggaaacctctgggcttttgagtctccagtcttggacctcaacccagagctctctggaaccagccctgaatgtgtcccaccagcatctgagacaccatggaagggcatgcaaagtagagaaaatatttgggtccctgcagacccagtttcacctcccagccttccctcagtccctctcctggagtctctagtaatgggcccccagggagtcctgtctgaatccaaagctttgtgggagaccatggggcagaaagagaacctctgggcatctgattccccagaccctgttcatagcacacctccaaccacccttatggaaccacacagaatcaatcctggggaatgcctcgctacatcagaagctacatggaaggatactgagcattccaggaattcctcggcttctaggtctccatctctggccctcagcccacccccagctcttgcaccggagctgctcagagttagatccatgggggtcctgtctgattctgaagctagatgtggggacatacaaaagacaaaaaactcctgggcctctaagcacccagcttgtaacttaccccaagacctgcatggagccagccctctgggagtcttgtctgattctcagtctattgtaggggaaatggagcaaaaagaaaactgtgttcctgtgttcccaggtaggggctccagcccatcctcaaactctgtttcaaagtcccacgtaagtgagcctatcgcagaccaaagcaactataagcctgacggggaggcagtggagcaaagaaagaaccactgggccactgagctcccagcccccagctcactctctactcctctaccagagccacacattgaccttgaacttgtgtggagaaatgtgcaacaaagagaagttccccaaggccccagccctctggcagtggatcccctacacccagtaccccagcctcccaccctagctgaagctgtgaagattgaacgcactcatcctggtctacccaagggagtaacgtgcccaggggttaaggcagaggccccactctcccagagatggactgtcccagagttgctcacccatcctgggatccatgcctggcagtggagtagagagctgaaactcaggctgaagaaactgcggcagagccctgcctccagagcccctggcccaagtcaatcattttgcagctcccctattctgagctccacaattccagacttctggggactcccttcctgcccaccacagcagatttatccccccaatccatgcccccactcttcaagttgtcatcctcaagaagttcagcgcacagtacctcagcctgtccagtcctcccactgtcatcacttccaatcctcttcccagcttcagccacaggagtctggcagggcggaacaagggtctcagagaggggagaaaatgaaggggaagatggtgagccaggtcccatcccaagggccatgtgtacacatggaggctggtgtggactatctatctccaggcccaggagaaccctcaaactctaaggttctggtctcaggcaagagaaaggacaaggcttcagcctcatcctcagccaaaaagagagagcaccctaggaaacccaaagcaggagaccatagaagagggactgcaaggttggggttatccacagtcacagggaagaaccaccctgcccaggccagaagcctagtagaggcccctgtaagcacatttccccaaaggtctcaacacaggggccagagctctcaacacactgctcttccccagctgcttctccccaaagcttcgggtccccaggatcagccagaggcagggcgaagagcaagtgacatcctgacccctcgccactgtaagcactgtccttgggcccacatggagaagtatctctccttccctaccctcaaggcttcccttaccaggggtttgcaaaaggtgttagccaaatgcctggataaccatcgacccctacccaccaaatctagtcagtagagaaaaggctggtaatactagcacttggtatgccaagacctgaagccaaaccagggggaaggtggggatgtggagacaagaaatggaaattctaataaactagctgaattaga

SEQ ID NO: 119464 - DNA, 571 bp, Homo sapiens
  Payload ID: 3406
  Gene Symbol: C9orf131
  Gene Name: chromosome 9 open reading frame 131
  ENST ID: ENST00000416537
  CDS Start-End: 1-29
tggtgcaaggcaaggtgggtgacctgtgactgtacagctggatgaatgactgctgacaccacatgtgaggtcattggtatgaatgtgggcccaggaactaccacttctgcaccgtgtggccttccttgatcacctgtgtaagcagaaatcagaagtggaggaagaaggggaagaagaggaagagggggaagacgaggcatctctggatccactgaagccatgttctcctaccaaagaagctcccactggagagcaagccactccagccccaccccagccatcctgtggttctgagggcctcctcaaggctatagggataccagagcaaacagtcatgcagcccgtgagcccttccagatccttccccatcttccagattctgaccagctttcctgtgaggcacaagatagcatcagggaaccgccagcagcagagaaaaagccagctcttctggggtctcccctctctgcacagcgagtccttggaggccatcttcctgagctcaggtggcccctctcctctgaagtggtctgtttgttcttctgtcttcttcaacaagcttgccttccta

SEQ ID NO: 119465 - DNA, 395 bp, Homo sapiens
  Payload ID: 3406
  Gene Symbol: C9orf131
  Gene Name: chromosome 9 open reading frame 131
  ENST ID: ENST00000537671
  CDS Start-End: 352-395
gagaaaggtaaaaacaccttcaaataaggaagaggaacaggctatgacctaatgcttgcttggaccaatataagcatgccagggcaaatatttaggctaaattgtggaagctaagaacataaagtaaattgatttattacggctagcagatatttaagaatgttaacagaggtctttgaataaattttgcttctaagagatgttactatttattcctaataagatggagaggaaagtctttgaagaggaacctctactttactttttacatcctcaaaacaaccctgtgtaattcagagatggtggcagcttgggaggttgcgacagcttcatccctggtgctctgggaatatggtgcaaggcaaggaactaccacttctgcaccgtgtggcctt

SEQ ID NO: 119466 - DNA, 579 bp, Homo sapiens
  Payload ID: 3406
  Gene Symbol: C9orf131
  Gene Name: chromosome 9 open reading frame 131
  ENST ID: ENST00000534880
  CDS Start-End: 540-579
ggaatgctgagaaaggtaaaaacaccttcaaataaggaagaggaacaggctatgacctaatgcttgcttggaccaatataagcatgccagggcaaatatttaggctaaattgtggaagctaagaacataaagtaaattgatttattacggctagcagatatttaagaatgttaacagaggtctttgaataaattttgcttctaagagatgttactatttattcctaataagatggagaggaaagtctttgaagaggaacctctactttactttttacatcctcaaaacaaccctgtgtagaactaccacttctgcaccgtgtggccttccttgatcacctgtgtaagcagaaatcagaagtggaggaagaaggggaagaagaggaagagggggaagacgaggcatctctggatccactgaagccatgttctcctaccaaagaagctcccactggagagcaagccactccagccccaccccagccatcctgtggttctgagggcctcctcaaggctatagggataccagagcaaacagtcatgcagcccgtgagcccttccagatccttccccatcttcc

SEQ ID NO: 119467 - DNA, 873 bp, Homo sapiens
  Payload ID: 3407
  Gene Symbol: C9orf135
  Gene Name: chromosome 9 open reading frame 135
  Uniprot ID: Q5VTT2
  ENST ID: ENST00000377197
  CDS Start-End: 88-777
gagacgccgaatcttggtacttacgttcctgccgggcaggacaggtgcatagggaactcctcagaggtctgtacctcgagggctcccatggatagccttgacagatcctgccaggactggtgcgacaggaagcaacactggttggagatcggaccaccggacttggtggagcgcaagggctccctgaccctccgctcccatcacaagaaatactcgaagccggtgttggtgtattcctggcaccgtgacagagaagcttttcccaaaggttatgatatagagggtcctgagaaagttaaaaaactgtgtaattcaacatatcggcgactgggaaccgatgaatccccaatttggacatcagaaacacatgaaaagttgtcacaaatgtgtttaaacacagaatgggttgaaatgaagagcaaggctttattgaatgaggaaacagtgagctccgggattatcgaaagggtcaccggattgcctgccacaggttttggagctgtctttcctagacatccaccggattggagcaaaatgtgtgcattgacaacgtactcagaagattatgttccaccatatgattatcagccacatgcttatccctgtcaagatgattattccatagtccacagaaaatgccgttctcagttcacggatctaaatggttctaaaagatttggcatcaacacttggcatgatgagagtgggatttatgctaattcagatgtaaaacagaaactctatcccttgactagtgggcctattgtgccaatttaaaaataatgtatagaatcagcatctctgactaatgaaaaatggatgtagcagttgatgattttctatcttaataaatgcaatggaagtgttactata

SEQ ID NO: 119468 - DNA, 748 bp, Homo sapiens
  Payload ID: 3407
  Gene Symbol: C9orf135
  Gene Name: chromosome 9 open reading frame 135
  Uniprot ID: Q5VTT2
  ENST ID: ENST00000527647
  CDS Start-End: 54-533
ggcaggacaggtgcatagggaactcctcagaggtctgtacctcgagggctcccatggatagccttgacagatcctgccaggactggtgcgacaggaagcaacactggttggagatcggaccaccggacttggtggagcgcaagggctccctgaccctccgctcccatcacaagaaatactcgaagccggtgttggtgtattcctggcaccgtgacagagaagcttttcccaaaggttatgatatagagggtcctgagaaagttaaaaaactgtgtaattcaacatatcggcgactgggaaccgatgaatccccaatttggacatcagaaacacatgaaaagttgtcacaaatgtgtttaaacacagaatgggttgaaatgaagagcaaggctttattgaatgaggaaacagtgagctccgggattatcgaaagggtcaccggattgcctgccacaggttttggagctgtctttcctagacatccaccggattggagcaaaatgcttatccctgtcaagatgattattccatagtccacagaaaatgccgttctcagttcacggatctaaatggttctaaaagatttggcatcaacacttggcatgatgagagtgggatttatgctaattcagatgtaaaacagaaactctatcccttgactagtgggcctattgtgccaatttaaaaataatgtatagaatcagcatctctgactaatgaaaaatggatgtagcagttgatgattttc

SEQ ID NO: 119469 - DNA, 550 bp, Homo sapiens
  Payload ID: 3407
  Gene Symbol: C9orf135
  Gene Name: chromosome 9 open reading frame 135
  ENST ID: ENST00000480564
  CDS Start-End: 1-448
ggagcgcaagggctccctgaccctccgctcccatcacaagaaatactcgaagccggtgttggtgtattcctggcaccgtgacagagaagcttttcccaaaggttatgatatagagggtcctgagaaagttaaaaaactgtgtaattcaacatatcggcgactgggaaccgatgaatccccaatttggacatcagaaacacatgaaaagttgtcacaaatgtgtttaaacacagaatgggttgaaatgaagagcaaggctttattgaatgaggaaacagtgagctccgggattatcgaaagggtcaccggattgcctgccacaggttttggagctgtctttcctagacatccaccggattggagcaaaatgttagtagtccctaaactgctacaactgtacaaaatgtttcttgattcagaaggtttgtttgcaggggcaaaggtatgacagggtgagccaaggtcaacaaaatgccctttacatgacatcttcgacttgcctttaaccaaatgttttctcctttcacatgcacaacattaataaccgtaa

SEQ ID NO: 119470 - DNA, 502 bp, Homo sapiens
  Payload ID: 3407
  Gene Symbol: C9orf135
  Gene Name: chromosome 9 open reading frame 135
  ENST ID: ENST00000495399
  CDS Start-End: 1-113
ggaagcaacactggttggagatcggaccaccggacttggtggagcgcaagggctccctgaccctccgctcccatcacaagaaatactcgaagccggtgttggtgtattcctgatttggacatcagaaacacatgaaaagttgtcacaaatgtgtttaaacacagaatgggttgaaatgaagagcaaggctttattgaatgaggaaacagtgagctccgggattatcgaaagggtcaccggattgcctgccacaggttttggagctgtctttcctagacatccaccggattggagcaaaatgttagtagtccctaaactgctacaactgtacaaaatgtttcttgattcagaaggtttgtttgcaggggcaaaggtatgacagggtgagccaaggtcaacaaaatgccctttacatgacatcttcgacttgcctttaaccaaatgttttctcctttcacatgcacaacattaataaccgtaataataaaacagtaaatcctca

SEQ ID NO: 119471 - DNA, 697 bp, Homo sapiens
  Payload ID: 3407
  Gene Symbol: C9orf135
  Gene Name: chromosome 9 open reading frame 135
  ENST ID: ENST00000529446
  CDS Start-End: 54-206
ggcaggacaggtgcatagggaactcctcagaggtctgtacctcgagggctcccatggatagccttgacagatcctgccaggactggtgcgacaggaagcaacactggttggagatcggaccaccggacttggtggagcgcaagggctccctgaccctccgctcccatcacaagaaatactcgaagccggtgttggtgtattcctgatttggacatcagaaacacatgaaaagttgtcacaaatgtgtttaaacacagaatgggttgaaatgaagagcaaggctttattgaatgaggaaacagtgagctccgggattatcgaaagggtcaccggattgcctgccacaggttttggagctgtctttcctagacatccaccggattggagcaaaatgtgtgcattgacaacgtactcagaagattatgttccaccatatgattatcagccacatgcttatccctgtcaagatgattattccatagtccacagaaaatgccgttctcagttcacggatctaaatggttctaaaagatttggcatcaacacttggcatgatgagagtgggatttatgctaattcagatgtaaaacagaaactctatcccttgactagtgggcctattgtgccaatttaaaaataatgtatagaatcagcatctctgactaatgaaaaatggatgtagcagttgatgattttc

SEQ ID NO: 119472 - DNA, 825 bp, Homo sapiens
  Payload ID: 3407
  Gene Symbol: C9orf135
  Gene Name: chromosome 9 open reading frame 135
  ENST ID: ENST00000529131
  CDS Start-End: 53-205
gcaggacaggtgcatagggaactcctcagaggtctgtacctcgagggctcccatggatagccttgacagatcctgccaggactggtgcgacaggaagcaacactggttggagatcggaccaccggacttggtggagcgcaagggctccctgaccctccgctcccatcacaagaaatactcgaagccggtgttggtgtattcctgatttggacatcagaaacacatgaaaagttgtcacaaatgtgtttaaacacagaatgggttgaaatgaagagcaaggctttattgaatgaggaaacagtgagctccgggattatcgaaagggtcaccggattgcctgccacaggttttggagctgtctttcctagacatccaccggattggagcaaaatgtgtgcattgacaacgtactcagaagattatgttccaccatatgattatcagccacatgttcttccctatcttcctcctcttcatttcaactcttctctaagccttcatagcaaaggatattttctctacccatttggagaactctataatctcccaggtttgatcattgacattctaaagtcctcaaaactgcttatccctgtcaagatgattattccatagtccacagaaaatgccgttctcagttcacggatctaaatggttctaaaagatttggcatcaacacttggcatgatgagagtgggatttatgctaattcagatgtaaaacagaaactctatcccttgactagtgggcctattgtgccaatttaaaaataatgtatagaatcagcatctctgactaatgaaaaatggatgtagcagttgatga

SEQ ID NO: 119473 - DNA, 812 bp, Homo sapiens
  Payload ID: 3408
  Gene Symbol: C9orf142
  Gene Name: chromosome 9 open reading frame 142
  Uniprot ID: Q9BUH6
  ENST ID: ENST00000371620
  CDS Start-End: 27-641
cgccgggttcccgctcgcccggcgccatggatccgctgtcgccgccgctctgcacgctgccgccgggccccgagccgccccgcttcgtgtgctactgcgaaggggaggaaagcggggagggggaccgcggcggcttcaacctctacgtgaccgacgccgcggagctttggagcacctgcttcacgccggacagcctggcggccctcaaagcccgttttggcctgagtgcggctgaggacatcaccccccggttcagggcagcctgtgagcagcaagctgtggctctgactctgcaggaggacagagcatccctgacgctttcaggggggccctcggcactggcctttgacctctccaaggtaccaggcccagaggcagcccccaggctgcgggcgctgacactgggcctggcaaaacgcgtgtggagcctggagcggcgactggcagctgcagaagagacagctgtcagcccgaggaagagcccccggcctgcagggcctcagctcttcttaccagacccagatccccagagaggtggccctggacctggagtcaggaggcggtgtccaggagagtcgctcatcaaccccgggttcaagagtaagaaaccagctggtggcgtggacttcgatgagacctgaaggtgcagcacaagcgtggccccgcggggagtccgcctatgaggggagaggcagtctttgaggcccccatcagagaccccccgccaccacctccacctgcctgtcctgggccaggactaacacggctcctcaaattccttccctgtcaaataaacagctcccttggttgga

SEQ ID NO: 119474 - DNA, 2717 bp, Homo sapiens
  Payload ID: 3409
  Gene Symbol: C9orf152
  Gene Name: chromosome 9 open reading frame 152
  Uniprot ID: Q5JTZ5
  ENST ID: ENST00000400613
  CDS Start-End: 611-1330
cagagcgcgagcttagcactccccagccccagtcccagctctgccaggaaaggggagacttcaccgtggcactgggaattggattctaaactttaggatcaagcaatggaaggacctggaataagacaccttcttgacccccctgaagggctctgagcagctgggcttgcctttctctttgctcccccagtcctccccttacttctcggtctcccactccccatcactcctttccctgcctcctcctgcctgtctccatcttcctccctctctttcttctctcgccccattaatccccgcttgtcactatcacctccttcctccagtctttcccccttcgctgccccttctttcctctgacatttccttctcctcttactgccactgtctcccacctttctcctcccccacatttctccctatccctacctcctcttccccttcatctttctccttcccccttatttttctatctccttcctcagtcccactcctctttccaccctccttttgcccgtcacttctccttctccctcactgccccctccctctctctcccctccccaggtcctgccccacccagctgtgtttgcttttctcccggatccggatggaggggttgccctgcccgtgcccagccctgccccacttctggcagcttaggtctcacttaatggctgagggctccaggactcaggcccctgggaaagggcccccactcagcatccagttcctgcgagcccagtatgaaggcttgaagaggcagcagaggacccaggcccacctcctggtgcttccaaaaggaggaaacacacctgctcctgcagaatcgatggtcaatgctgtttggattaacaaggagagaagaagctcactgtccctggaagaggcagattctgaggtggaggggaggctggaggaggctgcccagggctgccttcaggcccccaagtctccatggcacacgcacctggagatgcattgtttggtccaaacctccccccaggacaccagtcatcaagtacatcataggggcaagcttgtgggatctgatcaaaggctccctcctgaaggagacacacacttgtttgaaaccaatcagatgactcagcaaggaaccggaatcccagaggctgcccagcttccatgccaggtgggcaatacccaaacaaaggcagtggaatctggcttaaaattcagcactcaatgtcctctttccataaagaacccacacaggtctggcaaaccagcttactatccatttccccagaggaaaacacccaggatctcccaagctgcccggaacctgggcttatatggctcagcgtgaagctttctattctgccagatgtcttgaccttgaggccacctatggccttatagaagaaccaaggaggcagagccacaacgaggtctctagctatgagcaagaactggactaacctaattataggaattgtgggagacgaacttcacaatggtaacatggttttacccttccaataagaagagacttcccaggccaaattgcccacagtttaggatgaagaggactgtctggtcagtgcagccccattctgacattactatgaggtcctggatatccattccttggggaggaccagtaagacatctgctccatccctggaactggataattttggaacataaaccagggacctagccaacagaatgccttagcaatgcccaggggtcaatgggcgtggcattcttgttttcaatgtcttctgatgatttctcatatattctggagaagacaagctctgagaattcagatgctttttctggtggctatgtctggggggccatctcacttagaagtcacaacactcattggcagtgatcacatcatttcaatttgggcttcccaaagtatggtcacccagggtatgaaggtgagatcaatgctacctaccattttgtgtctttaaggggtctttagaaagggctaatcatctgtcactgctcactgagacatgtacattccagcatcatcacagagttatctccttccttccttccttccttccttccttccttccttctgtctctccctccctccctcccttcctcccttctttccttctttctttcctctcttccttcttgccttctttcctgccttcctgcctatcttttctctctctctctctctgcaaattaagttcttattaaaaactgccaatcattgacgatatataatgatgagatcctgaacaaaagaggcaaagaaatgctcctacttgaaaaatacacattccctatagactgcctcctgtttagtccaacttagatcactcagatccttcctgggatcaaatatatttttaaacctaagacaaagcgaagcaggtgtcacttgggtgatagggaaaaaagcttgtatttcctggttaatgtttagcttttgtaatgctatttaaacacacctaaggtgcctttccctcatctcaggtgctttctctgtaaagtttcactcccacctttcttttctctgcatggccgtccagtcttgcccatctacatccagagctgttaactagtagtgtcattacctgtgaaaaacatgtagaagcttccttgaaccacccagaaatccactcaaatttggggattgtcattccttttgtgaataattaatacaattcagttgttttttaaatattctaataaaaaaggaaattttctcaaaaaaa

SEQ ID NO: 119475 - DNA, 1845 bp, Homo sapiens
  Payload ID: 3410
  Gene Symbol: C9orf153
  Gene Name: chromosome 9 open reading frame 153
  Uniprot ID: Q5TBE3
  ENST ID: ENST00000339137
  CDS Start-End: 135-422
ggggctgggccttggggctgctggatgaatgagacccagcctctgccctgggagtgcagagactcaagacagatatgaccacgtgaagagacaactgtaaaacaagtggaattagagaataaaatcccagcacgatgttcctcactggagacaccagtccagctgaggacaatagagaagccacccttcctcaatgttcacttccagaattatatgcatgtattgagaattttaataaggagagcaagaaatcaaatcttctaaaaatgcatggtatttcacttaacgaagcacaggaagtacttgctagaaacctgaatgtcatgtcattcaccaggggcgctgatgtgagaggagatctccaacctgttatcaggaaaacaattcatgaatctaagggatctggaatggagatattttaaggggcttgcgaagtggaggcgcactactgcaatttcattcggagacataaaatacaacactgagaagagatttgtagagagccaggacatgcctgacgttattttcccccctatagttcgcaagtctttggtcatttatcctcaaattgattatcaaaatgaaggaagttattctcttaaatggaatatgtagtgtattaaaatattttggacgtagatttttgcttttgagagcattgatttaatacacaaaaagtaaagaagccaagtacccaatagaacatctgaagtgagtgtgtacaacacacatgaaggtatattgtaaaattaagccgttaatacagagcaaaaggtccgatttaatctgctaacgtgagaagtggtttggacggtgcaacccatttggaccagggctaaagcaaatataggtcatatgaaaagaaaaggtgtaactgaagaacactcaagcaagcatagctttttaaggaattttaagcacacaaggaagttcatcatcataaagtatttggtacattcaacaaacaaattaacatctgagcatatagagatcaatatgagaacttaaatataatctattaactgtccagtgacaaagaaggaaacagcatccatgaaataagaacagaaagatttgtaaaagaacaaattggaaatcttggaaatgaaagatatagtcattgaaaattataataataacccttgataattatcccagtggtagcctggatatatctgaagagagagggctaacaagttggaagacagcattgaaaagcttagagatcatagcactgtaagacagaaaaataagagtattggacggtagaatgagaagttcagaaatgtatacgatggaattagcagaaaaaaaataggagaatggaaattaagtgatatgtgaaaataaaatgacagaaaaatctcaagaaacacatgagaccttgaactgaaaaatctcagactgattagcaagatattgaaaataaatctatacccagaaatactgtagcaaaactatggaccactaagcagtaaaggaaaatataatctacgaaagagagatggattacatacaaagaaatgacaaattgacaatagaatgctcattaacaatagaggtcagaggacaatagtgtcatatacttacaatgctgaaggaaaatagctgtctgtaattctataagcagccaaactctctctgaggagtagggggtaaaataaaaatgttaaaaaatacatgggcctaaaaatgtttactatccataatcccttgcttaaaaaaaactactaataaagtatgtattttagtaagaacccagagggaatgcaagaaataatggcaagcaaattgttaacaatatatgtgtgtatgattgtgtagatattaaaatacatttccgga

SEQ ID NO: 119476 - DNA, 409 bp, Homo sapiens
  Payload ID: 3410
  Gene Symbol: C9orf153
  Gene Name: chromosome 9 open reading frame 153
  Uniprot ID: Q5TBE3
  ENST ID: ENST00000376001
  CDS Start-End: 82-387
gtgcagagactcaagacagatatgaccacgtgaagagacaactgtaaaacaagtggaattagagaataaaatcccagcacgatgttcctcactggagacaccagtccagctgaggacaatagagaagccacccttcctcaatgttcacttccagaattatatgcatgtattgagaattttaataaggagagcaagaaatcaaatcttctaaaaatgcatggtatttcacttaacgaagcacaggaagtacttgctagaaacctgaatgtcatgtcattcaccaggggcgctgatgtgagaggagatctccaacctgttatcagtgtcaataaaatgaacaagcctggaaaacatagaaagaccccatctccaaaaataaataaataaataaataaataaataaaaatta

SEQ ID NO: 119477 - DNA, 1738 bp, Homo sapiens
  Payload ID: 3410
  Gene Symbol: C9orf153
  Gene Name: chromosome 9 open reading frame 153
  Uniprot ID: Q5TBE3
  ENST ID: ENST00000613665
  CDS Start-End: 28-315
ggaattagagaataaaatcccagcacgatgttcctcactggagacaccagtccagctgaggacaatagagaagccacccttcctcaatgttcacttccagaattatatgcatgtattgagaattttaataaggagagcaagaaatcaaatcttctaaaaatgcatggtatttcacttaacgaagcacaggaagtacttgctagaaacctgaatgtcatgtcattcaccaggggcgctgatgtgagaggagatctccaacctgttatcaggaaaacaattcatgaatctaagggatctggaatggagatattttaaggggcttgcgaagtggaggcgcactactgcaatttcattcggagacataaaatacaacactgagaagagatttgtagagagccaggacatgcctgacgttattttcccccctatagttcgcaagtctttggtcatttatcctcaaattgattatcaaaatgaaggaagttattctcttaaatggaatatgtagtgtattaaaatattttggacgtagatttttgcttttgagagcattgatttaatacacaaaaagtaaagaagccaagtacccaatagaacatctgaagtgagtgtgtacaacacacatgaaggtatattgtaaaattaagccgttaatacagagcaaaaggtccgatttaatctgctaacgtgagaagtggtttggacggtgcaacccatttggaccagggctaaagcaaatataggtcatatgaaaagaaaaggtgtaactgaagaacactcaagcaagcatagctttttaaggaattttaagcacacaaggaagttcatcatcataaagtatttggtacattcaacaaacaaattaacatctgagcatatagagatcaatatgagaacttaaatataatctattaactgtccagtgacaaagaaggaaacagcatccatgaaataagaacagaaagatttgtaaaagaacaaattggaaatcttggaaatgaaagatatagtcattgaaaattataataataacccttgataattatcccagtggtagcctggatatatctgaagagagagggctaacaagttggaagacagcattgaaaagcttagagatcatagcactgtaagacagaaaaataagagtattggacggtagaatgagaagttcagaaatgtatacgatggaattagcagaaaaaaaataggagaatggaaattaagtgatatgtgaaaataaaatgacagaaaaatctcaagaaacacatgagaccttgaactgaaaaatctcagactgattagcaagatattgaaaataaatctatacccagaaatactgtagcaaaactatggaccactaagcagtaaaggaaaatataatctacgaaagagagatggattacatacaaagaaatgacaaattgacaatagaatgctcattaacaatagaggtcagaggacaatagtgtcatatacttacaatgctgaaggaaaatagctgtctgtaattctataagcagccaaactctctctgaggagtagggggtaaaataaaaatgttaaaaaatacatgggcctaaaaatgtttactatccataatcccttgcttaaaaaaaactactaataaagtatgtattttagtaagaacccagagggaatgcaagaaataatggcaagcaaattgttaacaatatatgtgtgtatgattgtgtagatattaaaatacatttccgga

SEQ ID NO: 119478 - DNA, 333 bp, Homo sapiens
  Payload ID: 3410
  Gene Symbol: C9orf153
  Gene Name: chromosome 9 open reading frame 153
  Uniprot ID: Q5TBE3
  ENST ID: ENST00000617985
  CDS Start-End: 28-333
ggaattagagaataaaatcccagcacgatgttcctcactggagacaccagtccagctgaggacaatagagaagccacccttcctcaatgttcacttccagaattatatgcatgtattgagaattttaataaggagagcaagaaatcaaatcttctaaaaatgcatggtatttcacttaacgaagcacaggaagtacttgctagaaacctgaatgtcatgtcattcaccaggggcgctgatgtgagaggagatctccaacctgttatcagtgtcaataaaatgaacaagcctggaaaacatagaaagaccccatctccaaaaataaataaataa

SEQ ID NO: 119479 - DNA, 713 bp, Homo sapiens
  Payload ID: 3411
  Gene Symbol: C9orf16
  Gene Name: chromosome 9 open reading frame 16
  Uniprot ID: Q9BUW7
  ENST ID: ENST00000372994
  CDS Start-End: 149-400
ccggcctctgggcggagatctgctgccgcgttctacccttccggcccgtgttctatccgccgcctccaccttccatccggcgccggctttcggcgcgacggtcgccgcgttccatcgtcgcgcggcccttcgggcgcccgagcccgcaatgtcgggccccaacggagacctggggatgccggtggaggcgggagcggaaggcgaggaggacggcttcggggaagcagaatacgctgccatcaactccatgctggaccagatcaactcctgtctggaccacctggaggagaagaatgaccacctccacgcccgcctccaggagctgctggagtccaaccggcagacacgcctggagttccagcagcagctcggggaggcccccagtgatgccagcccctaggctccaagagcccccaaccgggacccaaccctgcctccctgggctaggctctggcctgggcactcaccccctggcttagacaccttctcaagggctggccttcagggacccctggtgggtctgcctgcctgggccacccttcctgcctgggcctccccttggcctacctgggccagcccccaccacctggcatgccctcctggggccaagagtgggcctgcaacccacccacttgcctgcccacccaactcctgggcgctccccactctgcccaggccttgagtgtccacattaaatgggtctcccacaccgc

SEQ ID NO: 119480 - DNA, 4387 bp, Homo sapiens
  Payload ID: 3412
  Gene Symbol: C9orf172
  Gene Name: chromosome 9 open reading frame 172
  Uniprot ID: C9J069
  ENST ID: ENST00000436881
  CDS Start-End: 1-2931
atgacccgtacggaccctccggacctgctggtgtcgaccgtgtaccaggacatcaaggtggcgaccccgggacccgcgtccaagtgctcgccatgtgagcgatccgtggcccggcctgctgagcccgcgcctttcaacaagcgccactgccgcagcttcgacttcctggaggcgctggacgggccggccatggagaccctgccggagccaccgccgccggagtccgctgtgccgcgcgcccggacccgcgaagccgagccacgccgccgcgcccgctccaagagtgcgccccgcgcgcccccgggcctgacgcccgcgcccgcctcgccgccggtgttgccccgccgagggcgggaggcccagcgtgcggcgcgggccgaggcatcgccgcgccgggagcccgcgtacccggcgctccgcgcccttgccaacgagctgcatcccatcaagttgcagccgcagcggggcggccccggccgcgtcgcgcccctgtgcgccgccgcgggccgctgcgcaccgcccgagccacccgcgggtcccgccccccacgtgcgctgccgcctggacatcaagccagacgacgcagtgctccagcacgccacccggggctcgcggtcctgcgggcccaccgaggccgcgcactgggcccgccccgccccgcagttccacggcctcacggtgcccgggccccgccacatggcgctgtcgcgcaccccgacgcccagcgactcatactgtgcggatccccgggcgttctactgcgacgggcccctgcctgggccccgggactacgccgagcgccgcagtctgcccttcaccaccccgccgggccccacccagttcttctatacagaggagccccaaggcttccggggcagctttgcagccagtcccggcccaaccttcgacgcctactaccccaggccctatccgtccgaggagctctcggggcccagtccaaggcgcatgggcggctactacgcaggagaggtgcgcaccttcccaatccaggaaccgccctcccgctcctactatggggaggctccacgagcctacggcctgccctacgggccccgctatgtccccgaggagccccgggcccactccaccgcccgccccttttacacggaggacttcggaaggtaccgcgagcgtgacgtcctggctcggacgtacccgcacccgcgcagcagcccggcctgggcggactggggcccgcgaccgtaccgcaccctgcaagtggtgccgccctctgaccccgacccgttgctcgcctcctggcacggcggcaccggcaccagtccgccccggctggccaccgacagccgccactactcgcgctcctgggacaacattctggccccggggccgcgccgagaagacccgttgggccgcggccgcagctacgagaacctgctggggcgcgaggtgcgggagccgcgaggcgtgtcccccgaaggccggcgcccgcccgtcgtcgtgaacctgtccacctctcccagacgctacgccgcactgtccctgtccgagacgtcgctgacggagaagggccgcgcgggcgagggcctgggccgcaactggtacgtgacgcccgagatcaccatcactgacaatgacctgcgcgccaccgagcgcccgagcgccagggcctgggagttgcccgggggccgcacgcggccacctccccacgcggcccccgacggccccacctctggccgccagcggagcctagagcagctggacgagctcatcacggacctggtcatcgactcgcgacccaccgccggccaggcctcagagcccgcggccgactgcctgggcccccaactgcgccgactgctggactcgcggcccgcgggctccggggcccccgcgctggcgccgccacgctcgccccccgcctcggccggcagcgccgaggagcccgcggccccgggagaggcggccgacgcgtcccccgaacccagcgccgacgaggacgacctgatgacctgctccaatgcgcgctgccggcgcaccgagaccatgttcaacgcctgcctctacttcaagtcctgccacagctgctacacctactactgctcgcgcctgtgccgccgcgaggactgggacgcccacaaggcgcgctgcgtgtacggccgcgtgggcagcgtgtgccgccacgtactgcagttttgccgcgacagcggcccggtgcaccgcgctttctcgcgcatcgcgcgtgtcggcttcctgtcgcgcggccgcggcgtgctcttcctgggcttcccaagtccaggctcggccgacaacttcctgcgctttggcctggaggggctgctgctatcccccacctacctatcgctgcgtgagctggccacacacgcggcgcccctgggcagctacgcgcgcgagctggcggccgctgggcgcctctacgaaccggcagagtgcttcctgctcagcgtgtccgtggccgtgggacccggcaccgcgccaccggggacaccggccctgcccgcgcccgcgccacgcagccacgggccaacagtgcgcaagttcgccaaggtagcgctggcggccggcagccccgcgcggccgcccccggcgcggagccgcgagcccgacatggagacgctgatcctgacgccaccgccgggcacggcgggcctggatcaggacggcgaggcgggccggcgcgcgcgcgaggtggccttcatccacatccagcgcgagctgcggctgcgcggcgtcttcctgcgccacgagttcccgcgcgtctacgagcagctttgcgagttcgtcgaggccaacaggcgcttcacgcccaccaccatctaccccacggaccggcgcaccggccgccccttcatgtgcatgatcatggccgcctccgagccgcgcgcgctcgactgggtggccagcgccaacctgctggacgacatcatgtgaggcgccgggcccaccaggcctagcccaggcgctggcccgaaccctgccctgcccactcaggccccgcccggcccacccagggccgcccccgagccccgccagggccccaccccgacttcttctaggccccgcctctaattccccagccttccaagctccgctcagttcggcctccagctccgcccaggcccccaccccccggcccttcgtccccgtagtgttcctcacaggcccttcgccttcccacccccagcaacccctctccctcctccgggcctcctccctctcccagctcgccctcgaggatccccagaagaagtcggtcctcgccctcggtgctccccgctgggaggcggggtgggcctgaggaccgccgagctctgccttcactcggaggggtcactactgcacagaccccacccgtagagatccggtccccgtcggtccgcggggctctcgctggagcctccccgactccggtttcccctcgtccagaagcccgacgtaaccaaagcccagtctgtcactttaaacacgccccgccccgcctcccgcggctgtgttgcctcctcgctggagaacaccctggtcgacctctgtgcgtccgtgtgcgcgagcgcgtcccgccgaggcggtgggcagggcggacggtgcgcagtgcgttcccgctggtcggagccagcacactaaccacgccacgcgccctgccgtcccttcgcctccagccgctgcagtctgggccctgcaggagctgggaaaaaccgcagggaggtcttcaggccgatatgcaagtctcccagccgaaggggcaggggacctgaacaggggaagcagagcacctgggcctggccagagctgacacctggctaggagaggaaggaccaagggacggggcgttcccaggtgggagcctggagggcaaagcgtggtgcgagcaggtgagggagagagctagttggtaagcgtggaagcccacccgagggggcttgacctgtcccgagaggtccccgcacacccgctctggccgcacgccgtactgcgggcgtggaggcgcaagcccggcggcccggcctccacctgtcccccaagtgcaccctggtccgcgcccagagctctctggagggtggggtatgcgggagaggggtggaggccaaacgcaagggccctcctggagtccccagccctacttcggagccaggggagggggcaccaagtgagagaaattgggcacccccgcctccgctcctgctttcgcacccggcacgcccatctcgtccccgcgcgtctgcaccggccaggcgtcccgcttgcccacccgccgccgcgccccgcgccccctaccccagggcctctgcattcggccccacccctgagggccggccgggaacgcccctggaccggaataatttccagggggcaagagctttcgaaccaagtaaaatagaacttgaatgta

SEQ ID NO: 119481 - DNA, 1207 bp, Homo sapiens
  Payload ID: 3413
  Gene Symbol: C9orf173
  Gene Name: chromosome 9 open reading frame 173
  Uniprot ID: Q8N7X2
  ENST ID: ENST00000388931
  CDS Start-End: 27-1187
ttggggaagagagccaggagactctgatgatgaattctgaccagaaggcagtgaaattcctggcaaatttttacatcaatggaggcaaacactggacccatggtcacctgaggcagacacaaccagagcccacccagcccaaggcatctgtgctgttgttgggcccggagccggggatggcctgggatgagacacagcccccaaagatgaaggagatcccagttggcctcaggttacagacgggcaccccccaggagtccctgcccacctacacccagaccctgagggaactattgctggagcaacgccccctgatcacagctgacctggaagtccccagccccaccaggtaccaggtgccgagcccgtccgtacgagagtcctccccacacccccactacagcatcggctgcaagcaccagggccgagagggcggtggccgcagggcatggcagactttgtggttccagagcgaaagccccttcacgcagaaagctgacttcgaccaagagcaaaagtggccctcgccagcccactaccagctgctcagccggcccgccttccccgccttcagcttcagaggctgccactccgcttccaagacacctgaaggccacacccacctagggctgcctggggctagggggctgggcctcagggtgcagccccagtccctgcttcaggcctctttgcaggcacctggcaagagatgccctggccccaacacctacaatatccttcctgggagccgcctgcagagcccccgctcgccggccttctcgatgagccgctcccctgcgttcacctcctggctcagcacctccttctctttcggcagcccgaacccctggcccagccgcctaccacgtggaggactgcaactcacgcttcccttcggcgcctggcgtggtcatccagggtgtacgcagacccaagcgccacgacacaggccccttctgcacgctctagagccagctgggcacaacctgcttggcccggccaccgagtggaaccatggcctcccccggggctttcccaggcctcccctgggacttggggccccagcctggccttctgaccctctgggcaccccgatgcacccttctggctggccaacccttctatgggctgtggacaaggctggcccagcctggatcccccatctgcccatctccccgctacactgagatgctgttggttttcccga

SEQ ID NO: 119482 - DNA, 1191 bp, Homo sapiens
  Payload ID: 3413
  Gene Symbol: C9orf173
  Gene Name: chromosome 9 open reading frame 173
  Uniprot ID: Q8N7X2
  ENST ID: ENST00000412566
  CDS Start-End: 27-953
ttggggaagagagccaggagactctgatgatgaattctgaccagaaggcagtgaaattcctggcaaatttttacatcaatggaggcaaacactggacccatggtcacctgaggcagacacaaccagagcccacccagcccaaggcatctgtgctgttgttgggcccggagccggggatggcctgggatgagacacagcccccaaagatgaaggagatcccagttggcctcaggttacagacgggcaccccccaggagtccctgcccacctacacccagaccctgagggaactattgctggagcaacgccccctgatcacagctgacctggaagtccccagccccaccaggtaccaggtgccgagcccgtccgtacgagagtcctccccacacccccactacagcatcggctgcaagcaccagggccgagagggcggtggccgcagggcatggcagactttgtggttccagagcgaaagccccttcacgcagaaagctgacttcgaccaagagcaaaagtggccctcgccagcccactaccagctgctcagccggcccgccttccccgccttcagcttcagaggctgccactccgcttccaagacacctgaaggccacacccacctagggctgcctggggctagggggctgggcctcagggtgcagccccagtccctgcttcaggcctctttgcaggcacctggcaagagatgccctggccccaacacctacaatatccttcctgggagccgcctgcagagcccccgctcgccggccttctcgatgagccgctcccctgcgttcacctcctggctcagcacctcccgaacccctggcccagccgcctaccacgtggaggactgcaactcacgcttcccttcggcgcctggcgtggtcatccagggtgtacgcagacccaagcgccacgacacaggccccttctgcacgctctagagccagctgggcacaacctgcttggcccggccaccgagtggaaccatggcctcccccggggctttcccaggcctcccctgggacttggggccccagcctggccttctgaccctctgggcaccccgatgcacccttctggctggccaacccttctatgggctgtggacaaggctggcccagcctggatcccccatctgcccatctccccgctacactgagatgctgttggttttcccga

SEQ ID NO: 119483 - DNA, 1015 bp, Homo sapiens
  Payload ID: 3413
  Gene Symbol: C9orf173
  Gene Name: chromosome 9 open reading frame 173
  Uniprot ID: Q8N7X2
  ENST ID: ENST00000611378
  CDS Start-End: 2-997
gatgatgaattctgaccagaaggcagtgaaattcctggcaaatttttacatcaatggaggcaaacactggacccatggtcacctgaggcagacacaaccagagcccacccagcccaaggcatctgtgctgttgttgggcccggagccggggatggcctgggatgagacacagcccccaaagatgaaggagatcccagttggcctcaggttacagacgggcaccccccaggagtccctgcccacctacacccagaccctgagggaactattgctggagcaacgccccctgatcacagctgacctggaagtccccagccccaccaggtaccaggtgccgagcccgtccgtacgagagtcctccccacacccccactacagcatcggctgcaagcaccagggccgagagggcggtggccgcagggcatggcagactttgtggttccagagcgaaagccccttcacgcagaaagctgacttcgaccaagagcaaaaggcctctttgcaggcacctggcaagagatgccctggccccaacacctacaatatccttcctgggagccgcctgcagagcccccgctcgccggccttctcgatgagccgctcccctgcgttcacctcctggctcagcacctccttctctttcggcagcccgaacccctggcccagccgcctaccacgtggaggactgcaactcacgcttcccttcggcgcctggcgtggtcatccagggtgtacgcagacccaagcgccacgacacaggccccttctgcacgctctagagccagctgggcacaacctgcttggcccggccaccgagtggaaccatggcctcccccggggctttcccaggcctcccctgggacttggggccccagcctggccttctgaccctctgggcaccccgatgcacccttctggctggccaacccttctatgggctgtggacaaggctggcccagcctggatcccccatctgcccatctccccgctacactgagatgctgttggttttccc

SEQ ID NO: 119484 - DNA, 1012 bp, Homo sapiens
  Payload ID: 3413
  Gene Symbol: C9orf173
  Gene Name: chromosome 9 open reading frame 173
  ENST ID: ENST00000622761
  CDS Start-End: 1-252
aaggcagtgaaattcctggcaaatttttacatcaatggaggcaaacactggacccatggtcacctgaggcagacacaaccagagcccacccagcccaaggcatctgtgctgttgttgggcccggagccggggatggcctgggatgagacacagcccccaaagatgaaggagatcccagttggcctcaggttacagacgggcaccccccaggagtccctgcccacctacacccagaccctgagggaactatagggcggtggccgcagggcatggcagactttgtggttccagagcgaaagccccttcacgcagaaagctgacttcgaccaagagcaaaagtggccctcgccagcccactaccagctgctcagccggcccgccttccccgccttcagcttcagaggctgccactccgcttccaagacacctgaaggccacacccacctagggctgcctggggctagggggctgggcctcagggtgcagccccagtccctgcttcaggcctctttgcaggcacctggcaagagatgccctggccccaacacctacaatatccttcctgggagccgcctgcagagcccccgctcgccggccttctcgatgagccgctcccctgcgttcacctcctggctcagcacctcccgaacccctggcccagccgcctaccacgtggaggactgcaactcacgcttcccttcggcgcctggcgtggtcatccagggtgtacgcagacccaagcgccacgacacaggccccttctgcacgctctagagccagctgggcacaacctgcttggcccggccaccgagtggaaccatggcctcccccggggctttcccaggcctcccctgggacttggggccccagcctggccttctgaccctctgggcaccccgatgcacccttctggctggccaacccttctatgggctgtggacaaggctggcccagcctggatcccccatctgcccatctccccgctacactgagatgctgttggttttcccga

SEQ ID NO: 119485 - DNA, 1025 bp, Homo sapiens
  Payload ID: 3413
  Gene Symbol: C9orf173
  Gene Name: chromosome 9 open reading frame 173
  ENST ID: ENST00000620243
  CDS Start-End: 27-788
ttggggaagagagccaggagactctgatgatgaattctgaccagaaggcagtgaaattcctggcaaatttttacatcaatggaggcaaacactggacccatggtcacctgaggcagacacaaccagagcccacccagcccaaggcatctgtgctgttgttgggcccggagccggggatggcctgggatgagacacagcccccaaagatgaaggagatcccagttggcctcaggttacagacgggcaccccccaggagtccctgcccacctacacccagaccctgagggaactattgctggagcaacgccccctgatcacagctgacctggaagtccccagccccaccaggtaccaggtgccgagcccgtccgtacgagagtcctccccacacccccactacagcatcggctgcaagcaccagggccgagagggcggtggccgcagggcatggcagactttgtggttccagagcgaaagccccttcacgcagaaagctgacttcgaccaagagcaaaaggcctctttgcaggcacctggcaagagatgccctggccccaacacctacaatatccttcctgggagccgcctgcagagcccccgctcgccggccttctcgatgagccgctcccctgcgttcacctcctggctcagcacctcccgaacccctggcccagccgcctaccacgtggaggactgcaactcacgcttcccttcggcgcctggcgtggtcatccagggtgtacgcagacccaagcgccacgacacaggccccttctgcacgctctagagccagctgggcacaacctgcttggcccggccaccgagtggaaccatggcctcccccggggctttcccaggcctcccctgggacttggggccccagcctggccttctgaccctctgggcaccccgatgcacccttctggctggccaacccttctatgggctgtggacaaggctggcccagcctggatcccccatctgcccatctccccgctacactgagatgctgttggttttcccg

SEQ ID NO: 119486 - DNA, 948 bp, Homo sapiens
  Payload ID: 3413
  Gene Symbol: C9orf173
  Gene Name: chromosome 9 open reading frame 173
  ENST ID: ENST00000620716
  CDS Start-End: 26-418
tggggaagagagccaggagactctgatgatgaattctgaccagaaggcagtgaaattcctggcaaatttttacatcaatggaggcaaacactggacccatggtcacctgaggcagacacaaccagagcccacccagcccaaggcatctgtgctgttgttgggcccggagccggggatggcctgggatgagacacagcccccaaagatgaaggagatcccagttggcctcaggttacagacgggcaccccccaggagtccctgcccacctacacccagaccctgagggaactattgctggagcaacgccccctgatcacagctgacctggaagtccccagccccaccagagggcggtggccgcagggcatggcagactttgtggttccagagcgaaagccccttcacgcagaaagctgacttcgaccaagagcaaaaggcacctggcaagagatgccctggccccaacacctacaatatccttcctgggagccgcctgcagagcccccgctcgccggccttctcgatgagccgctcccctgcgttcacctcctggctcagcacctccttctctttcggcagcccgaacccctggcccagccgcctaccacgtggaggactgcaactcacgcttcccttcggcgcctggcgtggtcatccagggtgtacgcagacccaagcgccacgacacaggccccttctgcacgctctagagccagctgggcacaacctgcttggcccggccaccgagtggaaccatggcctcccccggggctttcccaggcctcccctgggacttggggccccagcctggccttctgaccctctgggcaccccgatgcacccttctggctggccaacccttctatgggctgtggacaaggctggcccagcctggatcccccatctgcccatctccccgctacactgagatgctgttggttttcccg

SEQ ID NO: 119487 - DNA, 1151 bp, Homo sapiens
  Payload ID: 3414
  Gene Symbol: C9orf24
  Gene Name: chromosome 9 open reading frame 24
  Uniprot ID: Q8NCR6
  ENST ID: ENST00000297623
  CDS Start-End: 200-988
ggagggggcatcagtgtggggtgggagcaggaaggctgttggggaaggaagctgagagatcctctgcaggaggggattatagcagctaagggcacctgccaggctggaggtgtggcctgtctaggggaagggtggtcactgatgtccagcaggagcccttgacaggtagagcccaccacggcatctccaagaccacaccatgttcctgttctcccgtaagaccaggacccctatcagtacctacagtgactcctacagggctcccacctccatcaaggaggtctataaggacccacccctgtgtgcctgggaagccaacaagtttctgactccgggtctgactcataccatggagcgacatgtggatcccgaagccctgcagaagatggccaaatgtgctgtacaggactacacttatagggggtccatatcaggccacccctacttgcctgagaagtactggctttctcaagaggaagcagacaaatgcagcccaaactacctgggcagtgactggtacaacacatggaggatggaaccttacaacagcagctgctgcaacaagtataccacctaccttcctcggctgcctaaggaggccaggatggagacagcagttcgaggaatgcccttggaatgccctcctaggccggagcggctcaatgcctacgagcgcgaagtgatggtgaacatgctgaactcactgtcgcggaaccagcagctgccgcggatcacgccccgatgcgggtgcgtggacccgctgcccggccgcctgcccttccatggttacgaaagtgcttgctcgggccgccactactgtctgcgcgggatggactactacgccagcggggcgccctgcaccgaccgccgcctgcggccttggtgccgggagcaaccgactatgtgtacctccctacgagcaccggcccggaatgcagtgtgctgttacaactcccccgccgtcatactacccatatccgaaccttagatgggacacaagtcacttcaagaagtctggtggtccccagagaaacaactatgttatccatcctgagtttgtgtctgagacctatcccgactatcgttgctggtagagcctgggcttgctgtgccaagggggcagagcaataaataaactcttcaaccccaaa

SEQ ID NO: 119488 - DNA, 648 bp, Homo sapiens
  Payload ID: 3414
  Gene Symbol: C9orf24
  Gene Name: chromosome 9 open reading frame 24
  Uniprot ID: Q8NCR6
  ENST ID: ENST00000379124
  CDS Start-End: 97-591
cgataggtctgggtgttctgggaggacccctaaaagggagcagctctgccaggtcagagcttgaggtagcatgtgtgccgcttccaggaggccaggatggagacagcagttcgaggaatgcccttggaatgccctcctaggccggagcggctcaatgcctacgagcgcgaagtgatggtgaacatgctgaactcactgtcgcggaaccagcagctgccgcggatcacgccccgatgcgggtgcgtggacccgctgcccggccgcctgcccttccatggttacgaaagtgcttgctcgggccgccactactgtctgcgcgggatggactactacgccagcggggcgccctgcaccgaccgccgcctgcggccttggtgccgggagcaaccgactgtaagatgtgtacctccctacgagcaccggcccggaatgcagtgtgctgttacaactcccccgccgtcatactacccatatccgaaccttagatgggacacaagtcacttcaagaagtctggtggtccccagagaaacaactatgttatccatcctgagtttgtgtctgagacctatcccgactatcgttgctggtagagcctgggcttgctgtgccaagggggcagagcaataaataaactcttcaaccccaaa

SEQ ID NO: 119489 - DNA, 496 bp, Homo sapiens
  Payload ID: 3414
  Gene Symbol: C9orf24
  Gene Name: chromosome 9 open reading frame 24
  Uniprot ID: Q8NCR6
  ENST ID: ENST00000379126
  CDS Start-End: 104-439
ggcgtggcgataggtctgggtgttctgggaggacccctaaaagggagcagctctgccaggtcagagcttgaggtagcatgtgtgccgcttccaggaggccaggatggagacagcagttcgaggaatgcccttggaatgccctcctaggccggagcggctcaatgcctacgagcgcgaagtgatggtgaacatgctgaactcactgtcgcggaaccagcagctgccgcggatcacgccccgatgcggatgtgtacctccctacgagcaccggcccggaatgcagtgtgctgttacaactcccccgccgtcatactacccatatccgaaccttagatgggacacaagtcacttcaagaagtctggtggtccccagagaaacaactatgttatccatcctgagtttgtgtctgagacctatcccgactatcgttgctggtagagcctgggcttgctgtgccaagggggcagagcaataaataaactcttcaaccccaaa

SEQ ID NO: 119490 - DNA, 596 bp, Homo sapiens
  Payload ID: 3414
  Gene Symbol: C9orf24
  Gene Name: chromosome 9 open reading frame 24
  Uniprot ID: Q8NCR6
  ENST ID: ENST00000379127
  CDS Start-End: 45-539
gctgaagggcgggagaagttgcggcgtggcgataggaggccaggatggagacagcagttcgaggaatgcccttggaatgccctcctaggccggagcggctcaatgcctacgagcgcgaagtgatggtgaacatgctgaactcactgtcgcggaaccagcagctgccgcggatcacgccccgatgcgggtgcgtggacccgctgcccggccgcctgcccttccatggttacgaaagtgcttgctcgggccgccactactgtctgcgcgggatggactactacgccagcggggcgccctgcaccgaccgccgcctgcggccttggtgccgggagcaaccgactgtaagatgtgtacctccctacgagcaccggcccggaatgcagtgtgctgttacaactcccccgccgtcatactacccatatccgaaccttagatgggacacaagtcacttcaagaagtctggtggtccccagagaaacaactatgttatccatcctgagtttgtgtctgagacctatcccgactatcgttgctggtagagcctgggcttgctgtgccaagggggcagagcaataaataaactcttcaaccccaaa

SEQ ID NO: 119491 - DNA, 712 bp, Homo sapiens
  Payload ID: 3414
  Gene Symbol: C9orf24
  Gene Name: chromosome 9 open reading frame 24
  Uniprot ID: Q8NCR6
  ENST ID: ENST00000379133
  CDS Start-End: 166-549
tgacagccgccaacacagagccctggagaggtggggagctgctgaagggcgggagaagttgcggcgtggcgataggtctgggtgttctgggaggacccctaaaagggagcagctctgccaggtcagagcttgaggtagcatgtgtgccgcttccaggaggccaggatggagacagcagttcgaggaatgcccttggaatgccctcctaggccggagcggctcaatgcctacgagcgcgaagtgatggtgaacatgctgaactcactgtcgcggaaccagcagctgccgcggatcacgccccgatgcgggtgcgtggacccgctgcccggccgcctgcccttccatggttacgaaagtgcttgctcgggccgccactactgtctgcgcgggatggactactacgccagcggggcgccctgcaccgaccgccgcctgcggccttggtgccgggagcaaccgactatgtgtacctccctacgagcaccggcccggaatgcagtgtgctgttacaactcccccgccgtcatactacccatatccgaaccttagatgggacacaagtcacttcaagaagtctggtggtccccagagaaacaactatgttatccatcctgagtttgtgtctgagacctatcccgactatcgttgctggtagagcctgggcttgctgtgccaagggggcagagcaataaataaactcttcaaccccaaa

SEQ ID NO: 119492 - DNA, 376 bp, Homo sapiens
  Payload ID: 3414
  Gene Symbol: C9orf24
  Gene Name: chromosome 9 open reading frame 24
  ENST ID: ENST00000444429
  CDS Start-End: 1-376
tgcctgggaagccaacaagtttctgactccgggtctgactcataccatggagcgacatgtggatcccgaagccctgcagaagatggccaaatgtgctgtacaggactacacttatagggggtccatatcaggccacccctacttgcctgagaagtactggctttctcaagaggaagcagacaaatgcagcccaaactacctgggcagtgactggtacaacacatggaggatggaaccttacaacagcagctgctgcaacaagtataccacctaccttcctcggctgcctaaggtatctgttgcacccagcacagacgtctggggactgggacacgcataccccaccacctcccaaactacagtgactgatatttca

SEQ ID NO: 119493 - DNA, 1966 bp, Homo sapiens
  Payload ID: 3415
  Gene Symbol: C9orf3
  Gene Name: chromosome 9 open reading frame 3
  Uniprot ID: Q8N6M6
  ENST ID: ENST00000277198
  CDS Start-End: 187-1887
agtaaccccgagtctgcggaagtggtgacccgtgggacgcggctgagacaggagactgaaaggaaccataatttgtgacatcagttgttttctttgataagcagctatttatgattctggaagattaaggcagataggaaaccccatctgagattttaataaatccctcaaacaataaaccacatcatggacatacagctggaccctgccagagatgacctgcctctcatggccaacaccagccacatacttgtgaagcactatgtactggatttggatgtggattttgaaagtcaagtcattgaggggaccatagtgcttttcctcgaggatggaaacagattcaagaaacagaatagctctattgaggaagcctgccaatcagaatcaaacaaagcctgcaaatttgggatgcctgaaccctgccatattcccgtgacaaatgcaaggaccttctcatctgaaatggaatataatgattttgcaatctgtagtaaaggtgaaaaagatacttctgataaagatggtaaccatgacaaccaggaacatgcttctgggatttctagctcaaagtactgctgtgacacagggaatcatgggagtgaggattttttgctagtgttggactgctgtgatttatctgtgttaaaagtcgaggaggtggatgttgctgctgtgccaggtctggaaaaatttacaaggtctcctgagctcacggttgtttctgaggagttcaggaatcagattgtacgtgaacttgtgactttgcctgcaaatcgttggagggagcagttagactattacgctcgctgcagccaggctcctggctgtggggaactcctctttgacactgacacttggagcttgcagataaggaagacaggggctcagacagctactgactttcctcatgctatcaggatatggtacaaaactaaacctgaagggcgatcggttacatggacctcagaccagagtggcaggccatgtgtttatactgtgggatctcccataaacaacagggccctttttccatgccaggagccacccgttgccatgtcaacatggcaggctacagttcgagcagctgcatcttttgttgttttaatgagtggggaaaattctgccaaaccaacgcagctttgggaagagtgctcaagctggtattactatgtaactatgccaatgccagcctccaccttcacaattgcagtgggatgctggacagaaatgaagatggagacatggtcatcaaatgatttggcaacagagagacccttctcaccttctgaggccaacttcaggcatgttggtgtttgcagtcacatggaatacccctgccgcttccagaatgcttctgccaccacccaggagatcattcctcatcgggtctttgcccctgtgtgcctcacgggtgcctgccaagagacccttctgcggctgatccctccttgcctctcagcagcacattctgttctgggagcacacccgttctctcggctggatgttctcatcgtccctgccaactttccaagtctggggatggccagcccacacatcatgttcctctctcagagcatcttgacaggagggaaccatctctgtgggacccgcctctgccatgaaattgcccatgcctggtttggcctagccatcggggcccgagactggacggaggagtggctgagtgaaggcttcgccactcacttggaggatgtgttttgggccacagcacagcagctggccccctatgaggcccgggagcagcaggagctgagggcttgtctgcgctggcgtcgcctccaggacgagatgcaatgctcccccgaggagatgcaggtgttaaggtttccacatgttggcggatgcagtggaagcttctcttgagatctttgccacactgttcaacatgtttgaccactctgtcctaaaaacgctttcttcttaaagcactttctcctcctgg

SEQ ID NO: 119494 - DNA, 2820 bp, Homo sapiens
  Payload ID: 3415
  Gene Symbol: C9orf3
  Gene Name: chromosome 9 open reading frame 3
  Uniprot ID: Q8N6M6
  ENST ID: ENST00000297979
  CDS Start-End: 176-2338
gtctgcggaagtggtgacccgtgggacgcggctgagacaggagactgaaaggaaccataatttgtgacatcagttgttttctttgataagcagctatttatgattctggaagattaaggcagataggaaaccccatctgagattttaataaatccctcaaacaataaaccacatcatggacatacagctggaccctgccagagatgacctgcctctcatggccaacaccagccacatacttgtgaagcactatgtactggatttggatgtggattttgaaagtcaagtcattgaggggaccatagtgcttttcctcgaggatggaaacagattcaagaaacagaatagctctattgaggaagcctgccaatcagaatcaaacaaagcctgcaaatttgggatgcctgaaccctgccatattcccgtgacaaatgcaaggaccttctcatctgaaatggaatataatgattttgcaatctgtagtaaaggtgaaaaagatacttctgataaagatggtaaccatgacaaccaggaacatgcttctgggatttctagctcaaagtactgctgtgacacagggaatcatgggagtgaggattttttgctagtgttggactgctgtgatttatctgtgttaaaagtcgaggaggtggatgttgctgctgtgccaggtctggaaaaatttacaaggtctcctgagctcacggttgtttctgaggagttcaggaatcagattgtacgtgaacttgtgactttgcctgcaaatcgttggagggagcagttagactattacgctcgctgcagccaggctcctggctgtggggaactcctctttgacactgacacttggagcttgcagataaggaagacaggggctcagacagctactgactttcctcatgctatcaggatatggtacaaaactaaacctgaagggcgatcggttacatggacctcagaccagagtggcaggccatgtgtttatactgtgggatctcccataaacaacagggccctttttccatgccaggagccacccgttgccatgtcaacatggcaggctacagttcgagcagctgcatcttttgttgttttaatgagtggggaaaattctgccaaaccaacgcagctttgggaagagtgctcaagctggtattactatgtaactatgccaatgccagcctccaccttcacaattgcagtgggatgctggacagaaatgaagatggagacatggtcatcaaatgatttggcaacagagagacccttctcaccttctgaggccaacttcaggcatgttggtgtttgcagtcacatggaatacccctgccgcttccagaatgcttctgccaccacccaggagatcattcctcatcgggtctttgcccctgtgtgcctcacgggtgcctgccaagagacccttctgcggctgatccctccttgcctctcagcagcacattctgttctgggagcacacccgttctctcggctggatgttctcatcgtccctgccaactttccaagtctggggatggccagacccagtaaagacaaaactggccacacaagtgactcgggagcatctgttatcaagcatggacttaatccggagaagatcttcatgcaggtgcattatttaaagggctacttccttcttcggtttcttgccaaaagacttggagatgaaacctatttttcatttttaagaaaatttgtgcacacatttcatggacagctgattctttcccaggatttccttcaaatgctactggagaacattccagaagaaaaaaggcttgagctgtctgttgaaaacatctaccaagactggcttgagagttccggaataccaaagccgctgcagagggagcgtcgcgccggggcggagtgcgggcttgcgcggcaagtgcgcgccgaggtcacgaaatggattggagtgaaccggagaccccgaaaacggaagcgcagggagaaggaagaggtgtttgaaaagcttcttccagaccagctggtcttgcttctggagcatctcttggagcagaagactctgagcccccgaactctgcaaagcctccagaggacataccacctccaggatcaggatgcagaggttcgccatcggtggtgtgaactcattgttaagcacaagttcacgaaagcctacaaaagtgtggagaggttccttcaggaggatcaggccatgggtgtgtacctctacggggagctgatggtgagtgaggacgccagacagcagcagctcgcccgtaggtgcttcgagcggaccaaggagcagatggataggtcctcagcccaggtggtggccgaaatgttattttaacgaggaaagaccacagcaagattctttcattcgtctcctcctagcctgggggaccaggctcgaactgaccctggacatcaaaggagggattatgtggctgctaaagccatcggcccacagccctgttcacatcttggtgcttctctttcccagaggctggtcccagccaggcacacacaaaaggcagattctcgtaaacgcagcctccctccctggaggctgcctcctgccctggatctggagtggagctgctctgagattttgagttcttctgcagagatgattaaatatatccaagagacattggaaaacctgctgaacattttacattggtctgctcagcacatggctggatgcggatatttctataattccagaaagtcacacagctcctctgtatgagaccagtgggcgccatttaaaagaacaggatgagaatctaagatatattattaataaatgtaatggattttttttttgta

SEQ ID NO: 119495 - DNA, 3136 bp, Homo sapiens
  Payload ID: 3415
  Gene Symbol: C9orf3
  Gene Name: chromosome 9 open reading frame 3
  Uniprot ID: Q8N6M6
  ENST ID: ENST00000375315
  CDS Start-End: 136-2595
gagactgaaaggaaccataatttgtgacatcagttgttttctttgataagcagctatttatgattctggaagattaaggcagataggaaaccccatctgagattttaataaatccctcaaacaataaaccacatcatggacatacagctggaccctgccagagatgacctgcctctcatggccaacaccagccacatacttgtgaagcactatgtactggatttggatgtggattttgaaagtcaagtcattgaggggaccatagtgcttttcctcgaggatggaaacagattcaagaaacagaatagctctattgaggaagcctgccaatcagaatcaaacaaagcctgcaaatttgggatgcctgaaccctgccatattcccgtgacaaatgcaaggaccttctcatctgaaatggaatataatgattttgcaatctgtagtaaaggtgaaaaagatacttctgataaagatggtaaccatgacaaccaggaacatgcttctgggatttctagctcaaagtactgctgtgacacagggaatcatgggagtgaggattttttgctagtgttggactgctgtgatttatctgtgttaaaagtcgaggaggtggatgttgctgctgtgccaggtctggaaaaatttacaaggtctcctgagctcacggttgtttctgaggagttcaggaatcagattgtacgtgaacttgtgactttgcctgcaaatcgttggagggagcagttagactattacgctcgctgcagccaggctcctggctgtggggaactcctctttgacactgacacttggagcttgcagataaggaagacaggggctcagacagctactgactttcctcatgctatcaggatatggtacaaaactaaacctgaagggcgatcggttacatggacctcagaccagagtggcaggccatgtgtttatactgtgggatctcccataaacaacagggccctttttccatgccaggagccacccgttgccatgtcaacatggcaggctacagttcgagcagctgcatcttttgttgttttaatgagtggggaaaattctgccaaaccaacgcagctttgggaagagtgctcaagctggtattactatgtaactatgccaatgccagcctccaccttcacaattgcagtgggatgctggacagaaatgaagatggagacatggtcatcaaatgatttggcaacagagagacccttctcaccttctgaggccaacttcaggcatgttggtgtttgcagtcacatggaatacccctgccgcttccagaatgcttctgccaccacccaggagatcattcctcatcgggtctttgcccctgtgtgcctcacgggtgcctgccaagagacccttctgcggctgatccctccttgcctctcagcagcacattctgttctgggagcacacccgttctctcggctggatgttctcatcgtccctgccaactttccaagtctggggatggccagcccacacatcatgttcctctctcagagcatcttgacaggagggaaccatctctgtgggacccgcctctgccatgaaattgcccatgcctggtttggcctagccatcggggcccgagactggacggaggagtggctgagtgaaggcttcgccactcacttggaggatgtgttttgggccacagcacagcagctggccccctatgaggcccgggagcagcaggagctgagggcttgtctgcgctggcgtcgcctccaggacgagatgcaatgctcccccgaggagatgcaggtgttaagacccagtaaagacaaaactggccacacaagtgactcgggagcatctgttatcaagcatggacttaatccggagaagatcttcatgcaggtgcattatttaaagggctacttccttcttcggtttcttgccaaaagacttggagatgaaacctatttttcatttttaagaaaatttgtgcacacatttcatggacagctgattctttcccaggatttccttcaaatgctactggagaacattccagaagaaaaaaggcttgagctgtctgttgaaaacatctaccaagactggcttgagagttccggaataccaaagccgctgcagagggagcgtcgcgccggggcggagtgcgggcttgcgcggcaagtgcgcgccgaggtcacgaaatggattggagtgaaccggagaccccgaaaacggaagcgcagggagaaggaagaggtgtttgaaaagcttcttccagaccagctggtcttgcttctggagcatctcttggagcagaagactctgagcccccgaactctgcaaagcctccagaggacataccacctccaggatcaggatgcagaggttcgccatcggtggtgtgaactcattgttaagcacaagttcacgaaagcctacaaaagtgtggagaggttccttcaggaggatcaggccatgggtgtgtacctctacggggagctgatggtgagtgaggacgccagacagcagcagctcgcccgtaggtgcttcgagcggaccaaggagcagatggataggtcctcagcccaggtggtggccgaaatgttattttaacgaggaaagaccacagcaagattctttcattcgtctcctcctagcctgggggaccaggctcgaactgaccctggacatcaaaggagggattatgtggctgctaaagccatcggcccacagccctgttcacatcttggtgcttctctttcccagaggctggtcccagccaggcacacacaaaaggcagattctcgtaaacgcagcctccctccctggaggctgcctcctgccctggatctggagtggagctgctctgagattttgagttcttctgcagagatgattaaatatatccaagagacattggaaaacctgctgaacattttacattggtctgctcagcacatggctggatgcggatatttctataattccagaaagtcacacagctcctctgtatgagaccagtgggcgccatttaaaagaacaggatgagaatctaagatatattattaataaatgtaatggattttttttttgtatacgtgtttgcttctaaatttcatactgtttaaaaataataaaggccaggtgcggtggc

SEQ ID NO: 119496 - DNA, 704 bp, Homo sapiens
  Payload ID: 3415
  Gene Symbol: C9orf3
  Gene Name: chromosome 9 open reading frame 3
  ENST ID: ENST00000427193
  CDS Start-End: 1-423
agctcaaagtactgctgtgacacagggaatcatgggagtgaggattttttgctagtgttggactgctgtgatttatctgtgttaaaagtcgaggaggtggatgttgctgctgtgccaggtctggaaaaatttacaaggtctcctgagctcacggttgtttctgaggagttcaggaatcagattgtacgtgaacttgtgactttgcctgcaaatcgttggagggagcagttagactattacgctcgctgcagccaggctcctggctgtggggaactcctctttgacactgacacttggagcttgcagataaggaagacaggggctcagacagctactgactttcctcatgctatcaggatatggtacaaaactaaacctgaagggcgatcggttacatggacctcagaccagagtggcaggtaagaaaataaaatgactggaagcttctagataaatctgtatctcaagtgagaaagagaatgactttttttgaatttgatcttcacgtcacttactgtatgcaaagctttcaagtatatttaaaacataaatttattatgttagctttcaataaatttctttttttaaattagacaaatataagaaaatctgtaaattggtaccttttcttttaagttccattagtggcttccccatttcccacctgtactgtatcccagctgagaataaaacttgtatcaaaa

SEQ ID NO: 119497 - DNA, 2288 bp, Homo sapiens
  Payload ID: 3415
  Gene Symbol: C9orf3
  Gene Name: chromosome 9 open reading frame 3
  ENST ID: ENST00000428313
  CDS Start-End: 1-1806
ctctttgacactgacacttggagcttgcagataaggaagacaggggctcagacagctactgactttcctcatgctatcaggatatggtacaaaactaaacctgaagggcgatcggttacatggacctcagaccagagtggcaggccatgtgtttatactgtgggatctcccataaacaacagggccctttttccatgccaggagccacccgttgccatgtcaacatggcaggctacagttcgagcagctgcatcttttgttgttttaatgagtggggaaaattctgccaaaccaacgcagctttgggaagagtgctcaagctggtattactatgtaactatgccaatgccagcctccaccttcacaattgcagtgggatgctggacagaaatgaagatggagacatggtcatcaaatgatttggcaacagagagacccttctcaccttctgaggccaacttcaggcatgttggtgtttgcagtcacatggaatacccctgccgcttccagaatgcttctgccaccacccaggagatcattcctcatcgggtctttgcccctgtgtgcctcacgggtgcctgccaagagacccttctgcggctgatccctccttgcctctcagcagcacattctgttctgggagcacacccgttctctcggctggatgttctcatcgtccctgccaactttccaagtctggggatggccagcccacacatcatgttcctctctcagagcatcttgacaggagggaaccatctctgtgggacccgcctctgccatgaaattgcccatgcctggtttggcctagccatcggggcccgagactggacggaggagtggctgagtgaaggcttcgccactcacttggaggatgtgttttgggccacagcacagcagctggccccctatgaggcccgggagcagcaggagctgagggcttgtctgcgctggcgtcgcctccaggacgagatgcaatgctcccccgaggagatgcaggtgttaagacccagtaaagacaaaactggccacacaagtgactcgggagcatctgttatcaagcatggacttaatccggagaagatcttcatgcaggtgcattatttaaagggctacttccttcttcggtttcttgccaaaagacttggagatgaaacctatttttcatttttaagaaaatttgtgcacacatttcatggacagctgattctttcccaggatttccttcaaatgctactggagaacattccagaagaaaaaaggcttgagctgtctgttgaaaacatctaccaagactggcttgagagttccggaataccaaagccgctgcagagggagcgtcgcgccggggcggagtgcgggcttgcgcggcaagtgcgcgccgaggtcacgaaatggattggagtgaaccggagaccccgaaaacggaagcgcagggagaaggaagaggtgtttgaaaagcttcttccagaccagctggtcttgcttctggagcatctcttggagcagaagactctgagcccccgaactctgcaaagcctccagaggacataccacctccaggatcaggatgcagaggttcgccatcggtggtgtgaactcattgttaagcacaagttcacgaaagcctacaaaagtgtggagaggttccttcaggaggatcaggccatgggtgtgtacctctacggggagctgatggtgagtgaggacgccagacagcagcagctcgcccgtaggtgcttcgagcggaccaaggagcagatggataggtcctcagcccaggtggtggccgaaatgttattttaacgaggaaagaccacagcaagattctttcattcgtctcctcctagcctgggggaccaggctcgaactgaccctggacatcaaaggagggattatgtggctgctaaagccatcggcccacagccctgttcacatcttggtgcttctctttcccagaggctggtcccagccaggcacacacaaaaggcagattctcgtaaacgcagcctccctccctggaggctgcctcctgccctggatctggagtggagctgctctgagattttgagttcttctgcagagatgattaaatatatccaagagacattggaaaacctgctgaacattttacattggtctgctcagcacatggctggatgcggatatttctataattccagaaagtcacacagctcctctgtatgagaccagtgggcgccatttaaaagaacaggatgagaatctaagatatattattaataaatgtaatggattttttttttgta

SEQ ID NO: 119498 - DNA, 1605 bp, Homo sapiens
  Payload ID: 3415
  Gene Symbol: C9orf3
  Gene Name: chromosome 9 open reading frame 3
  ENST ID: ENST00000424143
  CDS Start-End: 1-1527
gttgtttctgaggagttcaggaatcagattgtacgtgaacttgtgactttgcctgcaaatcgttggagggagcagttagactattacgctcgctgcagccaggctcctggctgtggggaactcctctttgacactgacacttggagcttgcagataaggaagacaggggctcagacagctactgactttcctcatgctatcaggatatggtacaaaactaaacctgaagggcgatcggttacatggacctcagaccagagtggcaggccatgtgtttatactgtgggatctcccataaacaacagggccctttttccatgccaggagccacccgttgccatgtcaacatggcaggctacagttcgagcagctgcatcttttgttgttttaatgagtggggaaaattctgccaaaccaacgcagctttgggaagagtgctcaagctggtattactatgtaactatgccaatgccagcctccaccttcacaattgcagtgggatgctggacagaaatgaagatggagacatggtcatcaaatgatttggcaacagagagacccttctcaccttctgaggccaacttcaggcatgttggtgtttgcagtcacatggaatacccctgccgcttccagaatgcttctgccaccacccaggagatcattcctcatcgggtctttgcccctgtgtgcctcacgggtgcctgccaagagacccttctgcggctgatccctccttgcctctcagcagcacattctgttctgggagcacacccgttctctcggctggatgttctcatcgtccctgccaactttccaagtctggggatggccagacccagtaaagacaaaactggccacacaagtgactcgggagcatctgttatcaagcatggacttaatccggagaagatcttcatgcaggtgcattatttaaagggctacttccttcttcggtttcttgccaaaagacttggagatgaaacctatttttcatttttaagaaaatttgtgcacacatttcatggacagctgattctttcccaggatttccttcaaatgctactggagaacattccagaagaaaaaaggcttgagctgtctgttgaaaacatctaccaagactggcttgagagttccggaataccaaagccgctgcagagggagcgtcgcgccggggcggagtgcgggcttgcgcggcaagtgcgcgccgaggtcacgaaatggattggagtgaaccggagaccccgaaaacggaagcgcagggagaaggaagaggtgtttgaaaagcttcttccagaccagctggtcttgcttctggagcatctcttggagcagaagactctgagcccccgaactctgcaaagcctccagaggacataccacctccaggatcaggatgcagaggttcgccatcggtggtgtgaactcattgttaagcacaagttcacgaaagcctacaaaagtgtggagaggttccttcaggaggatcaggtaggtgtcatctttcagcagatggggattctgtaaaggctgtccctgcacttcacacaggaatccacgttctcagtatctctttcataacaaataattaaatctgttacagag

SEQ ID NO: 119499 - DNA, 514 bp, Homo sapiens
  Payload ID: 3415
  Gene Symbol: C9orf3
  Gene Name: chromosome 9 open reading frame 3
  ENST ID: ENST00000451893
  CDS Start-End: 1-436
agatgaaacctatttttcatttttaagaaaatttgtgcacacatttcatggacagctgattctttcccaggatttccttcaaatgctactggagaacattccagaagaaaaaaggcttgagctgtctgttgaaaacatctaccaagactggcttgagagttccggaataccaaagccgctgcagagggagcgtcgcgccggggcggagtgcgggcttgcgcggcaagtgcgcgccgaggtcacgaaatggattggagtgaaccggagaccccgaaaacggaagcgcagggagaaggaagaggtgtttgaaaagactttaaattggagtcatctaagaaatagagagagaagaagaaagaagtggattacttttaaaacactaggaggaattttatttactgtaaagcagatgagaaatttgtttgcccaagtttagaatttcagtatgttactttgcagaagtttggactgcctgtcttttgattttgtattaaaacttgatttgtcattgtaa

SEQ ID NO: 119500 - DNA, 873 bp, Homo sapiens
  Payload ID: 3415
  Gene Symbol: C9orf3
  Gene Name: chromosome 9 open reading frame 3
  ENST ID: ENST00000445181
  CDS Start-End: 1-553
tgcggaccccgggcgggcgcagggcgcgggctccggcgccgccgctgcgtcctccccggccgcgggcgagccgctgcagagggagcgtcgcgccggggcggagtgcgggcttgcgcggcaagtgcgcgccgaggtcacgaaatggattggagtgaaccggagaccccgaaaacggaagcgcagggagaaggaagaggtgtttgaaaagcttcttccagaccagctggtcttgcttctggagcatctcttggagcagaagactctgagcccccgaactctgcaaagcctccagaggacataccacctccaggatcaggatgcagaggttcgccatcggtggtgtgaactcattgttaagcacaagttcacgaaagcctacaaaagtgtggagaggttccttcaggaggatcaggccatgggtgtgtacctctacggggagctgatggtgagtgaggacgccagacagcagcagctcgcccgtaggtgcttcgagcggaccaaggagcagatggataggtcctcagcccaggtggtggccgaaatgttattttaacgaggtgattctctccctttcctttctgtcatttagttctaaccagatactccttttaggagccaactaaatcagtaagccgaatagttagccaagactacccgcagcatcaatagtcggctccctggcccagggcctggagagtaactggccaagtgggtgctgggctggtatgggagccccgggtccctggagcaccttgcctggctgtggcagtcaccgggaagcagaggctgtccacctggaggcacagcggcactccttggcactattttggccacttcaggttttataatctgttgaaacaaaaattgtggggg

SEQ ID NO: 119501 - DNA, 895 bp, Homo sapiens
  Payload ID: 3415
  Gene Symbol: C9orf3
  Gene Name: chromosome 9 open reading frame 3
  ENST ID: ENST00000478473
  CDS Start-End: 1-541
gcgggcgcagggcgcgggctccggcgccgccgctgcgtcctccccggccgcgggcgagccgctgcagagggagcgtcgcgccggggcggagtgcgggcttgcgcggcaagtgcgcgccgaggtcacgaaatggattggagtgaaccggagaccccgaaaacggaagcgcagggagaaggaagaggtgtttgaaaagcttcttccagaccagctggtcttgcttctggagcatctcttggagcagaagactctgagcccccgaactctgcaaagcctccagaggacataccacctccaggatcaggatgcagaggttcgccatcggtggtgtgaactcattgttaagcacaagttcacgaaagcctacaaaagtgtggagaggttccttcaggaggatcaggccatgggtgtgtacctctacggggagctgatggtgagtgaggacgccagacagcagcagctcgcccgtaggtgcttcgagcggaccaaggagcagatggataggtcctcagcccaggtggtggccgaaatgttattttaacgagtccaggccttcgcgtctcctgcgccagcagacggtgcccacggagctcccagctgaggcgctgcttctccgggctgtcgattggacccgccctccggtgcctactgagctgatatcagttctcattttacacactggctcagttcagcaggaacaggagtcgagcccttgagcaaaaagccttcgtgtctgaaagaccacagcaagattctttcattcgtctcctcctagcctgggggaccaggctcgaactgaccctggacatcaaaggagggattatgtggctgctaaagccatcggcccacagccctgttcacatcttggtgcttctctttcccagaggctggtccc

SEQ ID NO: 119502 - DNA, 2327 bp, Homo sapiens
  Payload ID: 3416
  Gene Symbol: C9orf40
  Gene Name: chromosome 9 open reading frame 40
  Uniprot ID: Q8IXQ3
  ENST ID: ENST00000376854
  CDS Start-End: 276-860
aggttcgaatctccgccgcttcgcggttgcttctcaacgtccgggccgcatctcggcggcggcgagggctgagcgcgggagctgcctccgagccggagccccagccctaggccctgcgcgagctgccccgccctaccccctccagcgtcctgtcgcctcctcgcccgacttcggcctgtccctctctcacgcgctcagtcctcgctcttcgccccccgcagctatcggcactcggtctcccgcgcctggcgggctccgcccgagcctctgggcccatggccaagcggcgtgcggccgagccggtgacgttccacgtgccttggaagcggctcctgctttgcgacttcgctgagcagccgccgccaccgcctctctggatccggccgcccggggtcgcgcatgctgggcagctcctcggcgtcccagagcagcaccgaaagcgcaaaatcgacgcagggaccatggcagagccctcggcttcgcccagcaagcgccgtgacagcggggacaacagcgccccgagcggccaggagcgtgaggaccacggtctggagacaggcgatccgccgctgccgccgccgcccgtactgccggggccgggggaggagctcccgggcgcccggctcccggggggcggtggcgacgacggggcggggcgcgcaggacccccgcggggagactggggggtcgcatcgcgccagcacaatgaagaattttggcagtataataccttccagtactggaggaatcctttgcctcctattgatctggcagacattgaagatttaagtgaagacaccctgacagaagcaacacttcagggcaggaatgaaggggctgaggttgacatggagtcctgatgtaaggagccgaagcagtgggattggctgatttgaggagatgtctctaagtgaattctcgtattcttaagggaaaagttattttccatacttgaagttatatttccaaacctgagaaatgaagaaagattgttctgacattaaatacctacagttactactgaacctcttaataaggatttgtcaaggatagagtacagttgtaggggaagtattttatgtatgcattcttagagcaaaaagttttgtttaaattctagaattgaaggtactgatcttataaaaagaaattctagcagttttagaaataggtgggaaaaactcaaatattcctcctatctgcaccaaaaagtttatttgtggtatataaaatgaatattgttttataataacttgttaataaagtactttctaatacattctattgactctgttagttgaacaaatagctgacttgaacatctatgcaaacttaagatgggcgggattgttgtaaaagctattgttttaaaagagctttctaaatgtaaagtagtgataatttcaatttgggtagcgtgtttgcaaagcttccaatatttgatgttggttaagctctactatgggcaactgaagatggataaagaaaaatgaaaactgaatcggtgcctgcttccccctgttttcccaggattagaggaaaaaatttattgtataatcagcttcttggttttgaattgcttcgaggcatggttttattccttattactttagacctgtagttttcaacactgacagcactttaaaaatctttgcctgggcctcactcttgagagattctcatttaatagttctgaggtgggtcttggatataactatttttttaaacacctgtcctgtttccctccattcctctcatgtgcagacagggttgagaaccagtagactaatggtcgtttttcctgtttaaaggagataactaatttgagctgaagcaatgcttcttaattagctttgtttttgttttgctctgttggtggctttgttacaactgaattattgtgttattactatttcattgttaaagaaataaagtaagcaatttgtgatgtgagtatcagtgattaagttaactaacttttgtactgcatccagaatgttggttttgcaattgagtaactggttcttgcttgcattttttgttgttgatgacattagatccaaaattcaagacaaatggtaaatgccattgagagggaaagagaaaaacttgattttttttgtgtaatgaaggatttaagaatgggttgacattaataagaatgctttagaacagaagacaaactgtattgcattgtggtcagacatggttcaaagtcttgtactgccacttcctacctatgtatctttaagccagttatttttcatctccaagcctcaaatttctcacctgtaaaatgagaaataataaatagtatctacctcaga

SEQ ID NO: 119503 - DNA, 2130 bp, Homo sapiens
  Payload ID: 3417
  Gene Symbol: C9orf43
  Gene Name: chromosome 9 open reading frame 43
  Uniprot ID: Q8TAL5
  ENST ID: ENST00000288462
  CDS Start-End: 447-1832
cctttaggacccgaggcaggctctgggcccgccgggtccgttaatctcaccgcgccgcaaggggccacgttttaccacttgatttagcaaccctaagcggtttggaatctgctttgctctcacaggacctcagcccgtcgtgatcagattctcccactttcttttttctttcctggaatggagtgggcagtctttttccatctctaccgaagttgatgttcatttttaatcttttcgcccctcacgcttttgtaataatggtactaagactgagtgttatttagattttattgttgttgtttgtgtttaacgcgaactatttaggcagcccagggataatgctggccatatagagatgcgcctgattaggtctcaggagtcaattcggactgggcagagcactagaatgctgcagggttggcctttggcctaaaccatttctagctatggacttgccagatgagagccagtgggacgaaaccacctgtggcttggctgtttgtcagcacccacaatgctgggcaactatccgccgcattgagaggggccatcctcgaatcctcggctcatcctgcaaaactcccctggatgctgaagataaactcccagtgctcaccgtggtagacatcttagattccggctttgcagctcatcatttaccagaatgtacctttactaaggcccattctttattgtctcagagttcaaagttttactccaaatttcatggcaggcctccgaagggtttacctgacaaaagtttgatcaactgtactaacagacttcccaaatttccagtgttgaatttgaatgagacgcaacttccctgccctgaagatgttagaaatatggttgtattgtggatcccagaagaaacagagatacatgtgagccagcatgggaagaagaaaagaaagaactcggcagtgaaaagcaagtcatttctgggtctctctggaaatcagtccgcaggaacacgagtaggaacaccagggatgatcgtgcctcccccaaccccagtgcaattgtctgaacaattcagttcagatttcctacctctctgggctcaatccgaagcgttacctcaggatctactgaaggaacttttgccaggtggaaagcaaaccatgctctgtccagagatgaagataaaattggccatgatgaaaaagaatcttcccttggaaaagaaccgacctgacagtgtgatttcttctaagatgtttctatctatacaccgcctcaccctggaaagaccagcactgcgatatcctgaacgtttgaagaaattacataacctgaagacagaaggttacaggaaacagcagcagcggcagcagcagcagcagcagcaacagaagaaggtgaaaacacctattaagaaacaggaggctaaaaagaaagccaagagtgatccagggatccagagcacttcacataaacatccagttaccaccgttcatgaccgtctctatggttacagaactctgccaggtcagaacagtgacatgaagcagcagcagcagatggaaaaaggaaccacttcgaaacaggattccacggagagaccaaagatgaactactatgaccatgcggatttccaccacagtgtaaaaagtcctgaattgtatgaaacagaacccactaacaaggacattagtgctccagtggacgctgtgccagaagcccaggctgccaggcaaaagaagatctcctttaacttttcagaaattatggctagcacaggctggaactctgagctcaaactacttaggattcttcaggacactgatgatgaggatgaggaggaccagtcctctggggcagagtgagaagcctctggaggaatagactgaaggcatcccctggggcagccgtgttccaaagcgggatggctggtatcctgagggcagcaacgtttcacataagggcaagaggagaggggcttctgctctctggagcctttaccagggcctgagctctgagcttagggattccattttctttgttcacctctacttgcctctaaaataaatgtaggagaaaaatccccagcctttttaaatttagattatttcctttccattagggtcagaataattttggtgattaaacacaactgcttttcaa

SEQ ID NO: 119504 - DNA, 2049 bp, Homo sapiens
  Payload ID: 3417
  Gene Symbol: C9orf43
  Gene Name: chromosome 9 open reading frame 43
  Uniprot ID: Q8TAL5
  ENST ID: ENST00000374165
  CDS Start-End: 366-1751
gcggccgggcgcagcgcgtgggagacgaaggcgtggctgactcggcggggcggatccctttaggacccgaggcaggctctgggcccgccgggtccgttaatctcaccgcgccgcaaggggccacgttttaccacttgatttagcaaccctaagcggtttggaatctgctttgctctcacaggacctcagcccgtcgtgatcagattctcccactttcttttttctttcctggaatggagtgggcagtctttttccatctctaccgaagttgatgttcatttttaatcttttcgcccctcacgcttttgtaataatgagcactagaatgctgcagggttggcctttggcctaaaccatttctagctatggacttgccagatgagagccagtgggacgaaaccacctgtggcttggctgtttgtcagcacccacaatgctgggcaactatccgccgcattgagaggggccatcctcgaatcctcggctcatcctgcaaaactcccctggatgctgaagataaactcccagtgctcaccgtggtagacatcttagattccggctttgcagctcatcatttaccagaatgtacctttactaaggcccattctttattgtctcagagttcaaagttttactccaaatttcatggcaggcctccgaagggtttacctgacaaaagtttgatcaactgtactaacagacttcccaaatttccagtgttgaatttgaatgagacgcaacttccctgccctgaagatgttagaaatatggttgtattgtggatcccagaagaaacagagatacatgtgagccagcatgggaagaagaaaagaaagaactcggcagtgaaaagcaagtcatttctgggtctctctggaaatcagtccgcaggaacacgagtaggaacaccagggatgatcgtgcctcccccaaccccagtgcaattgtctgaacaattcagttcagatttcctacctctctgggctcaatccgaagcgttacctcaggatctactgaaggaacttttgccaggtggaaagcaaaccatgctctgtccagagatgaagataaaattggccatgatgaaaaagaatcttcccttggaaaagaaccgacctgacagtgtgatttcttctaagatgtttctatctatacaccgcctcaccctggaaagaccagcactgcgatatcctgaacgtttgaagaaattacataacctgaagacagaaggttacaggaaacagcagcagcggcagcagcagcagcagcagcaacagaagaaggtgaaaacacctattaagaaacaggaggctaaaaagaaagccaagagtgatccagggatccagagcacttcacataaacatccagttaccaccgttcatgaccgtctctatggttacagaactctgccaggtcagaacagtgacatgaagcagcagcagcagatggaaaaaggaaccacttcgaaacaggattccacggagagaccaaagatgaactactatgaccatgcggatttccaccacagtgtaaaaagtcctgaattgtatgaaacagaacccactaacaaggacattagtgctccagtggacgctgtgccagaagcccaggctgccaggcaaaagaagatctcctttaacttttcagaaattatggctagcacaggctggaactctgagctcaaactacttaggattcttcaggacactgatgatgaggatgaggaggaccagtcctctggggcagagtgagaagcctctggaggaatagactgaaggcatcccctggggcagccgtgttccaaagcgggatggctggtatcctgagggcagcaacgtttcacataagggcaagaggagaggggcttctgctctctggagcctttaccagggcctgagctctgagcttagggattccattttctttgttcacctctacttgcctctaaaataaatgtaggagaaaaatccccagcctttttaaatttagattatttcctttccattagggtcagaataattttggtgattaaacacaactgcttttcaa

SEQ ID NO: 119505 - DNA, 4829 bp, Homo sapiens
  Payload ID: 3418
  Gene Symbol: C9orf47
  Gene Name: chromosome 9 open reading frame 47
  Uniprot ID: Q6ZRZ4
  ENST ID: ENST00000334490
  CDS Start-End: 69-677
aaaaacgctgtccggcgccaggcgcccacctgcaagcccaagccggtgctcggccagttacaaaagaaatggtcaggatctggacaacgataatgatagtattaatcctcctattaagaatcggcccaaacaaaccctcgctgtcagggcgacaggcgcccgcccaagcccagacctcggacctggttccaagcctgttcccgctgggtctctgggcgcccggtttctgcacctggagctcgcccgatgaggacaaggtctggaggccggcctgggaacaggggccgaagggcgagccggaccctaggggattgaggccgaggaagccggttccggggacgggcaacagggactcagggaccagaaggcggctgcaggacgcgaccgagcaggaccccaggcccgggaacgacgtcgcgagcgctgagactgccgggcctcccagcccatctggcattcgagcgcaggaccgggcgccccggcaccgccgcgcgccacccgctaggatgccggtggccccagcgccctcagccgacggagagccgctgcaggaacagggaggaggccttttccaccgcacccggagcgtttacaacgggctggagctgaatacctggatgaaagtggagaggctgttcgtggagaagttccatcagtcgttttccttggacaattaacaagttaggcttccacagtgccagggcctggggatgctggacgtgggagagggttgtggtcgttagcctgggaaaatcattcttttaaacaatattcgccggaaaattagttttttcctaacatttctcaaacaaggcaattagggccgtcagaatcggtgctggaagacgaagtccccacagtgcaataatgaggttcccacggaaaatcagtacgttgtgttcgtaactgagataacagctagagaaggggctttgggctttttgagtctcccaatagtcagtctctctctctctctctctctctctcttcctctgactttctggctttggacactcccaatggtatatttctttgtggtgtttttatatttggatataagagaggaacttcttgttggatttttaagggaacacacttcgttttgacccttccaataaggaaaggggagctacaggaacagagagctctttagaaggttacttttaaatggaggcccccccattcatggtacccactcccacttggacctctgagacctccagaattaggcatcattctaaaatctggacattagaagtcacagactttgtatataaccacatattcataatttatcttttcaatgttttttattcatagatgaaaatcttgcaggcatagttaagaaaaatataattcctagaaagtacaagggaaggattatgctctgcagatacatgactaacaaggatagctggccatgcccagggctggtgttggttgaggaggtggtgatggtgcggggcatgtgtgtgtgtgtgtgtgtgtgcgcttgaggagttgtggaagtgttcatatctgtaaagtattatttcatggatgcagaccttaatgctaggttgaataactttgttgccatagaagaagaaccgcacgtcaggcttttttcattagcaaaccagtaagcactcactttgggcctctgaaatcacttccatcacctaacaccagagatacaaactgaagctagcccttaagagcctccccctaagatttagagagaatgatttctcaaccagttttcatctttgaaagtgccatttctccctttatcattgtgatttttattcaaatgcatgagtctctgattttctaccatatacaaagggtagagactacagtttcctatagaagaaacttcacatagtggccgaaggatcttatttctcaaaattcaggaactggtttcctctttctggaaattatgacattaacttgatttcatggtatctctttcatcttcctcaatgcctgtgctgtatgtatatttttattatatactgtaggtatatttttattaccaaaaaaaggagaatttgagcatgccacaatcttgaaaaatctgaggttgccctgctgtagaaccctttaactgccaggactttgtactgtttcccaagtgttaccagagccaggccgccagccttatgcagtctgtttaccttagctggaaccagggtgctgtgctgtgggttctatgaaactttctgtttcttcatatttggctttgtaattcctttcttatcagttttggaggcatttcctattattcctctgccatatgttttctgccaaattaattgccttaagattttccttaagcttttggaaatgtataatgtttgagaaaaaagaaaaagaatagactgagtggaatcgtatctagtttcagttaataacatgtttcagttgatgttactgttatagctactgggcataaagtctccttcccttttttgaatcctatttttgaggcattgaagctgtgtctgtaagagacaataggccagttgggttaaatcagtgacgagattgtccagtgcagattggtgcccagtgagtggatcttcactgctcacaggccggactggggtcagctcacacagcgaggtgacggtccgctcctcaagcagtggatggtgctcttcggccttgcagatgccgctccattttcctggcttcaaaattttccagatatttcagtgcccccagaatgacatgctaacattctgctggcatgggagcatgaggcagtttgtctctaaaacatgccagagaatctcttgtcactacctaggcaaagaaccagtggcaaggtggcagcctcccaaagagctcatccctaatgtgacatcctggaatcagatggcacggacaccggcccagccccttcccagctctgtgactaaggacaagtgacaccccccctcccccagcctcggtctcctcctgtgtacattcagaaggcagatgctgccatgaggccatgtgtgctatgtccatggtgcaaggtggcacgcatgccgagtcaccaggtgagactgccgctttgggaagggataggaaggatctccggtagccttcgtgggcaggatgcctcttatttgaatgtgcctttagccacctcacagagcctatttccacatccctgtggattcatccctgtggaaatcttgagaatcatttatcctatgctgtcatgaagcagcagcagaatggagaaggtttaaaaagactcatggacaggcaaagcggtcaaacacctcctggctcagacgcacttgccttcccacacacaagtctggaagctcaggatggtgttcacggaggcagatgctcggggccggggcctgagtttcctggggcacagcctccatatctggggttccctggactatgcccagatagctcataatgtcccagccttatttgtgatggagaaggacttggggaaaagccaccgggaagcagtaagtctaaccagggaagtgcactgacttgcatgctttgaagaagagaagggagaaaagatacaaaaccctcacctggtttgtctgtaacagttgttatttctcaggggagctgcattaatgggccaagcctgtgcagctgggtgtgtgaagcatgcattttgcaatggactgtctccaaaagcagagcgaggtcacccaagaaatctagagcaagggaaaatactcattagcaaaggaattttgctggagccttgtaacggccgactcattatttcctttccaagttattttaaatgaaattttaaaaaacatcttgctttccaagaaattttgcttgttggcatatgtttggtgttttgattcagtttggaggatgaactagttaatttccctgggagtacatgcctattaaaaatatagcatcctgcatctgaccaagatgctatcttactatcttattgtgcctatcttttatgcggagagagaaaggggggtgttgggaaggagaccagactgtggaaacattttctttattttttctctttttcttccttttatagtttgtttatttttcaacttgacatgggtagagaaagcgaatcgctagtatagaaagcacatctggaatccatccggcctcctctctctggctcaccctcctcccagcaatgtttctccttggaagttgggggaaggtaggcacctctgaccttggcagggtctaacttggggtcatccactgcatactcatcttccagaaggcgtcttattcctcctcgacaaaaaaaaaatgtgttggtattaaaatgctttgaggtaggctggatgaacccagcttagtgaggatgacatgaaaacccttagctaatggggtctttattgagtagaactcaggtaagttcagatgtaagcagtgtctctcagtaaacatgaaaagactgaagatgcagacaatcaaatacttaagtctcttgaagagctgggtggtgggcgggggtcttcccaggtggtcagggagatgtgttagtgtagcacttggaagagagtggaacgaccaggcaaggatgtgccgtggaggtgggcagtgggagcagcccagtgtcagcatctgtattggttagaagaccaccgctaatgaggaggagcgtctctaccctgcagctgtctgtactcctgtgtcttccgtaatgtgccaagctctctgaatatatgcaaaactagtctgcaaaaagccatatgtctcagcatctggctttatttctaagtgttcaggtggaatttaagccgcgatcaaatttacaatgtcactgccagctctggacacttacttttggaataaagcaaagagtgaacact

SEQ ID NO: 119506 - DNA, 859 bp, Homo sapiens
  Payload ID: 3418
  Gene Symbol: C9orf47
  Gene Name: chromosome 9 open reading frame 47
  ENST ID: ENST00000375850
  CDS Start-End: 76-783
cccaaacaaaaacgctgtccggcgccaggcgcccacctgcaagcccaagccggtgctcggccagttacaaaagaaatggtcaggatctggacaacgataatgatagtattaatcctcctattaagaatcggcccaaacaaaccctcgctgtcagggcgacaggcgcccgcccaagcccagacctcggacctggttccaagcctgttcccgctgggtctctgggcgcccggtttctgcacctggagctcgcccgatgaggacaagaggccgaggaagccggttccggggacgggcaacagggactcagggaccagaaggcggctgcaggacgcgaccgagcaggaccccaggcccgggaacgacgtcgcgagcgctgagactgccgggcctcccagcccatctggcattcgagcgcaggaccgggcgccccggcaccgccgcgcgccacccgctaggatgccggtggccccagcgccctcagccgacggaggtgagaggcgggcccgggcggggcgcggaaccagggtggggggctgggggccgaaggacccacctttccaacaaaatccccaccgatcccgggcgcgacggggacttgggcgcgccacggcggccggagcgctccacatcagcacccctcccccagagccgctgcaggaacagggaggaggccttttccaccgcacccggagcgtttacaacgggctggagctgaatacctggatgaaagtggagaggctgttcgtggagaagttccatcagtcgttttccttggacaattaacaagttaggcttccacagtgccagggcctggggatgctggacgtgggagagggttgtggtcgttagcctgggaaaa

SEQ ID NO: 119507 - DNA, 4837 bp, Homo sapiens
  Payload ID: 3418
  Gene Symbol: C9orf47
  Gene Name: chromosome 9 open reading frame 47
  Uniprot ID: Q6ZRZ4
  ENST ID: ENST00000375851
  CDS Start-End: 134-685
agagcgcggagagggaccaggcaggcgccggaggggacccgcgcggaaaaggaagaagcccaaacaaaaacgctgtccggcgccaggcgcccacctgcaagcccaagccggtgctcggccagttacaaaagaaatggtcaggatctggacaacgataatgatagtattaatcctcctattaagaatcggcccaaacaaaccctcgctgtcagggcgacaggcgcccgcccaagcccagacctcggacctggttccaagcctgttcccgctgggtctctgggcgcccggtttctgcacctggagctcgcccgatgaggacaagaggccgaggaagccggttccggggacgggcaacagggactcagggaccagaaggcggctgcaggacgcgaccgagcaggaccccaggcccgggaacgacgtcgcgagcgctgagactgccgggcctcccagcccatctggcattcgagcgcaggaccgggcgccccggcaccgccgcgcgccacccgctaggatgccggtggccccagcgccctcagccgacggagagccgctgcaggaacagggaggaggccttttccaccgcacccggagcgtttacaacgggctggagctgaatacctggatgaaagtggagaggctgttcgtggagaagttccatcagtcgttttccttggacaattaacaagttaggcttccacagtgccagggcctggggatgctggacgtgggagagggttgtggtcgttagcctgggaaaatcattcttttaaacaatattcgccggaaaattagttttttcctaacatttctcaaacaaggcaattagggccgtcagaatcggtgctggaagacgaagtccccacagtgcaataatgaggttcccacggaaaatcagtacgttgtgttcgtaactgagataacagctagagaaggggctttgggctttttgagtctcccaatagtcagtctctctctctctctctctctctctcttcctctgactttctggctttggacactcccaatggtatatttctttgtggtgtttttatatttggatataagagaggaacttcttgttggatttttaagggaacacacttcgttttgacccttccaataaggaaaggggagctacaggaacagagagctctttagaaggttacttttaaatggaggcccccccattcatggtacccactcccacttggacctctgagacctccagaattaggcatcattctaaaatctggacattagaagtcacagactttgtatataaccacatattcataatttatcttttcaatgttttttattcatagatgaaaatcttgcaggcatagttaagaaaaatataattcctagaaagtacaagggaaggattatgctctgcagatacatgactaacaaggatagctggccatgcccagggctggtgttggttgaggaggtggtgatggtgcggggcatgtgtgtgtgtgtgtgtgtgtgcgcttgaggagttgtggaagtgttcatatctgtaaagtattatttcatggatgcagaccttaatgctaggttgaataactttgttgccatagaagaagaaccgcacgtcaggcttttttcattagcaaaccagtaagcactcactttgggcctctgaaatcacttccatcacctaacaccagagatacaaactgaagctagcccttaagagcctccccctaagatttagagagaatgatttctcaaccagttttcatctttgaaagtgccatttctccctttatcattgtgatttttattcaaatgcatgagtctctgattttctaccatatacaaagggtagagactacagtttcctatagaagaaacttcacatagtggccgaaggatcttatttctcaaaattcaggaactggtttcctctttctggaaattatgacattaacttgatttcatggtatctctttcatcttcctcaatgcctgtgctgtatgtatatttttattatatactgtaggtatatttttattaccaaaaaaaggagaatttgagcatgccacaatcttgaaaaatctgaggttgccctgctgtagaaccctttaactgccaggactttgtactgtttcccaagtgttaccagagccaggccgccagccttatgcagtctgtttaccttagctggaaccagggtgctgtgctgtgggttctatgaaactttctgtttcttcatatttggctttgtaattcctttcttatcagttttggaggcatttcctattattcctctgccatatgttttctgccaaattaattgccttaagattttccttaagcttttggaaatgtataatgtttgagaaaaaagaaaaagaatagactgagtggaatcgtatctagtttcagttaataacatgtttcagttgatgttactgttatagctactgggcataaagtctccttcccttttttgaatcctatttttgaggcattgaagctgtgtctgtaagagacaataggccagttgggttaaatcagtgacgagattgtccagtgcagattggtgcccagtgagtggatcttcactgctcacaggccggactggggtcagctcacacagcgaggtgacggtccgctcctcaagcagtggatggtgctcttcggccttgcagatgccgctccattttcctggcttcaaaattttccagatatttcagtgcccccagaatgacatgctaacattctgctggcatgggagcatgaggcagtttgtctctaaaacatgccagagaatctcttgtcactacctaggcaaagaaccagtggcaaggtggcagcctcccaaagagctcatccctaatgtgacatcctggaatcagatggcacggacaccggcccagccccttcccagctctgtgactaaggacaagtgacaccccccctcccccagcctcggtctcctcctgtgtacattcagaaggcagatgctgccatgaggccatgtgtgctatgtccatggtgcaaggtggcacgcatgccgagtcaccaggtgagactgccgctttgggaagggataggaaggatctccggtagccttcgtgggcaggatgcctcttatttgaatgtgcctttagccacctcacagagcctatttccacatccctgtggattcatccctgtggaaatcttgagaatcatttatcctatgctgtcatgaagcagcagcagaatggagaaggtttaaaaagactcatggacaggcaaagcggtcaaacacctcctggctcagacgcacttgccttcccacacacaagtctggaagctcaggatggtgttcacggaggcagatgctcggggccggggcctgagtttcctggggcacagcctccatatctggggttccctggactatgcccagatagctcataatgtcccagccttatttgtgatggagaaggacttggggaaaagccaccgggaagcagtaagtctaaccagggaagtgcactgacttgcatgctttgaagaagagaagggagaaaagatacaaaaccctcacctggtttgtctgtaacagttgttatttctcaggggagctgcattaatgggccaagcctgtgcagctgggtgtgtgaagcatgcattttgcaatggactgtctccaaaagcagagcgaggtcacccaagaaatctagagcaagggaaaatactcattagcaaaggaattttgctggagccttgtaacggccgactcattatttcctttccaagttattttaaatgaaattttaaaaaacatcttgctttccaagaaattttgcttgttggcatatgtttggtgttttgattcagtttggaggatgaactagttaatttccctgggagtacatgcctattaaaaatatagcatcctgcatctgaccaagatgctatcttactatcttattgtgcctatcttttatgcggagagagaaaggggggtgttgggaaggagaccagactgtggaaacattttctttattttttctctttttcttccttttatagtttgtttatttttcaacttgacatgggtagagaaagcgaatcgctagtatagaaagcacatctggaatccatccggcctcctctctctggctcaccctcctcccagcaatgtttctccttggaagttgggggaaggtaggcacctctgaccttggcagggtctaacttggggtcatccactgcatactcatcttccagaaggcgtcttattcctcctcgacaaaaaaaaaatgtgttggtattaaaatgctttgaggtaggctggatgaacccagcttagtgaggatgacatgaaaacccttagctaatggggtctttattgagtagaactcaggtaagttcagatgtaagcagtgtctctcagtaaacatgaaaagactgaagatgcagacaatcaaatacttaagtctcttgaagagctgggtggtgggcgggggtcttcccaggtggtcagggagatgtgttagtgtagcacttggaagagagtggaacgaccaggcaaggatgtgccgtggaggtgggcagtgggagcagcccagtgtcagcatctgtattggttagaagaccaccgctaatgaggaggagcgtctctaccctgcagctgtctgtactcctgtgtcttccgtaatgtgccaagctctctgaatatatgcaaaactagtctgcaaaaagccatatgtctcagcatctggctttatttctaagtgttcaggtggaatttaagccgcgatcaaatttacaatgtcactgccagctctggacacttacttttggaataaagcaaagagtgaacact

SEQ ID NO: 119508 - DNA, 1620 bp, Homo sapiens
  Payload ID: 3419
  Gene Symbol: C9orf50
  Gene Name: chromosome 9 open reading frame 50
  Uniprot ID: Q5SZB4
  ENST ID: ENST00000372478
  CDS Start-End: 203-1498
atttttcaggtgaggaaacagaggctctgggagctctcgcctgaagccactcgctgtccgccgggccggtggcgttcaccccgcaccgcgctgccccgcccggggcactatggcctggggctggactatgccctccccacctcagccggcgccccccacccacgcgcgctgagggtgcggtgagctgagtgcggggccaagcatgttctggcgtcgacttcgcccaggggcccaggacctggcgcccaaggggctccctggcgacggagacttccgacgcagcagcgacccgcggctgcccaagctgaccccgcccgcgctccgagcggctctgggcgcgcggggctccggggactggaggatcccggggggcggcgccgcgtggtggccggaaggggacgccaagcccggggtgggcgtcggacgcctcccgccgcgcctgcccgccttgctcaccgcgacccggcgggccgtgcggaagcgggggctgctgcggtccctgctgccgcctcccctgctgtcggccggcgcgtcccgggaatcggcgcccaggcagccagggcctggagagcgcgagcgcccccggaggcgcgtggccagggaggaccccgacttcttgggcgccttcctaggagagctcctccccagcaggttccgtgagttcctgcaccagctccaggagaagtgcgccgaggagccggagccactgacatccccagcaccgcaacatcaaaggggtgtattagagcactgcccagggtctccgcggtgtcccaactgttcattcctcccagacctgtggggccagtcatcgcacctccaggatagtcttacgaagatttcgctccagcagacacctattctggggcccctgaagggtgatcactcacaattcaccactgtcagaaaggccaaccacaggccccacggtgcacaggtccccaggctcaaggctgcgctgacccacaacccctcgggggaaggctctaggccctgcaggcagcgttgccctttccgggtgcgattcgctgacgagaccctgcaggacacaacgctccgctactgggagcgcagacgctcagtccaacagagcgtcattgtgaaccagaaggccgccctgccagtggcgtccgagcgggtgtttgggagtgtcggaaaacggctggagagtttgcccaaagccctgtaccctggggccaaggaggagaccctggccagctcctcgtgttgggactgcgctggcctgtccacccagaagacacagggctacctttctgaggacacctccatgaacagcagcctgcccttctgttcatggaagaaggccgctgctcagaggccgcgaagcagcctccgagccttcttggacccgcacagaaacctggagcaggagtccctcctgcccaaccgggtgctgcagtcggtcctgaagcaaggctgccctaaggggtaccatctcctcctggcctccgcaacactgcagccagataagaggtgaacactcgcgaacccaaggccaggggcacacatgggccaggcaatgaggagcgtccttccttgccccacaaataaaggcacatcccaggtggctgggacctgccagtaggtgtcacaccacaa

SEQ ID NO: 119509 - DNA, 796 bp, Homo sapiens
  Payload ID: 3419
  Gene Symbol: C9orf50
  Gene Name: chromosome 9 open reading frame 50
  ENST ID: ENST00000619117
  CDS Start-End: 509-718
ctctcgcctgaagccactcgctgtccgccgggccggtggcgttcaccccgcaccgcgctgccccgcccggggcactatggcctggggctggactatgccctccccacctcagccggcgccccccacccacgcgcgctgagggccccacggtgcacaggtccccaggctcaaggctgcgctgacccacaacccctcgggggaaggctctaggccctgcaggcagcgttgccctttccgggtgcgattcgctgacgagaccctgcaggacacaacgctccgctactgggagcgcagacgctcagtccaacagagcgtcattgtgaaccagaaggccgccctgccagtggcgtccgagcgggtgtttgggagtgtcggaaaacggctggagagtttgcccaaagccctgtaccctggggccaaggaggagaccctggccagctcctcgtgttgggactgcgctggcctgtccacccagaagacacagggctacctttctgaggacacctccatgaacagcagcctgcccttctgttcatggaagaaggccgctgctcagaggccgcgaagcagcctccgagccttcttggacccgcacagaaacctggagcaggagtccctcctgcccaaccgggtgctgcagtcggtcctgaagcaaggctgccctaaggggtaccatctcctcctggcctccgcaacactgcagccagataagaggtgaacactcgcgaacccaaggccaggggcacacatgggccaggcaatgaggagcgtccttccttgccccacaaataaaggc

SEQ ID NO: 119510 - DNA, 1502 bp, Homo sapiens
  Payload ID: 3420
  Gene Symbol: C9orf57
  Gene Name: chromosome 9 open reading frame 57
  Uniprot ID: Q5W0N0
  ENST ID: ENST00000377024
  CDS Start-End: 97-582
gctttcagttgtaacggacttcatcacatcacaaattgtactcgttctcatccttttaagaaagttcagacccaggaaaatttccatagtaccttaatgaaaaagatagaaatcagtgggacgtgtctttcctttcatctccttttcggcttggaaatcagaatgagaaggattgtttttgctggtgttatcttattccgcctcttaggtgttatcttattccgcctcttaggtgttatcttattcggccgcttaggtgacctgggaacctgccagacaaaacctggtcagtactggaaagaagaggtccacattcaagatgttggaggtttgatttgcagagcatgcaatctttcactgcccttccatggatgtcttttagacctgggaacctgccaggcagaacctggtcagtactgtaaagaagaggtccacattcaaggtggcattcaatggtattcagtcaaaggctgcacaaagaacacatcagagtgcttcaagagtactctcgtcaagagaattctgcaactgcatgaacttgtaactactcactgctgcaatcattctttgtgcaatttctgagtcagtggcccatatctaaaatgcttggcagatcaatcagtctcgaagcctgacctggctatcacaaaatgatggctattgtcaattagcccacttcagaaacctcagacccttgtaggtagaaggaattttgatctgaaattgactttggttttcaatattcccaatatctcccccaccacctccaactcatctgagaaatagccctttcaacaccatttctctcctctcctccttctgcttaatttaccttcctaccacaaggctacaaagaaggaaaaatgttagtgattctccaagtcaaactaggcatgtcacctctaactactttcatttccctcaataattccatactccaaaatatggttacaaatgtttcacaagacagcaagtgacctgagaatattcatttggtttccaaagcaaactgccttgctcctttggggtgatttatggtatagaagaaactgacttaacatatactatagggaaaaaataagccatgaatcagcaagccaggcctgcgggaaaagtatgaacccaaacaggaaagggctgaggcaggtggtagggctggcacttatttcttccatctgcctcagagtttatccaaattttgaattttccgtaccttaaccatgcctaaatgctttggcttgttcaattttggcagattaagcagttcaaggtaagcagagaagtaagttcccaaccacaaggaatttaaaaggagtaggaacgtactttgaactacatttcccattttgcgatcattacgtcttctattacaatgccctactttggcagcatgaagagtactgcattaatttaatttaatttaaaatttaatttaaaactgtctttctctgtattttcaggagtttgaaaattcaaaaaataaataataaatgtcaataaaa

SEQ ID NO: 119511 - DNA, 1297 bp, Homo sapiens
  Payload ID: 3420
  Gene Symbol: C9orf57
  Gene Name: chromosome 9 open reading frame 57
  Uniprot ID: Q5W0N0
  ENST ID: ENST00000424431
  CDS Start-End: 1-384
atgggggtgggattcactgagctagaatacttggctccctggcttcggccccccttttcagacctgggaacctgccagacaaaacctggtcagtactggaaagaagaggtccacattcaagatgttggaggtttgatttgcagagcatgcaatctttcactgcccttccatggatgtcttttagacctgggaacctgccaggcagaacctggtcagtactgtaaagaagaggtccacattcaaggtggcattcaatggtattcagtcaaaggctgcacaaagaacacatcagagtgcttcaagagtactctcgtcaagagaattctgcaactgcatgaacttgtaactactcactgctgcaatcattctttgtgcaatttctgagtcagtggcccatatctaaaatgcttggcagatcaatcagtctcgaagcctgacctggctatcacaaaatgatggctattgtcaattagcccacttcagaaacctcagacccttgtaggtagaaggaattttgatctgaaattgactttggttttcaatattcccaatatctcccccaccacctccaactcatctgagaaatagccctttcaacaccatttctctcctctcctccttctgcttaatttaccttcctaccacaaggctacaaagaaggaaaaatgttagtgattctccaagtcaaactaggcatgtcacctctaactactttcatttccctcaataattccatactccaaaatatggttacaaatgtttcacaagacagcaagtgacctgagaatattcatttggtttccaaagcaaactgccttgctcctttggggtgatttatggtatagaagaaactgacttaacatatactatagggaaaaaataagccatgaatcagcaagccaggcctgcgggaaaagtatgaacccaaacaggaaagggctgaggcaggtggtagggctggcacttatttcttccatctgcctcagagtttatccaaattttgaattttccgtaccttaaccatgcctaaatgctttggcttgttcaattttggcagattaagcagttcaaggtaagcagagaagtaagttcccaaccacaaggaatttaaaaggagtaggaacgtactttgaactacatttcccattttgcgatcattacgtcttctattacaatgccctactttggcagcatgaagagtactgcattaatttaatttaatttaaaatttaatttaaaactgtctttctctgtattttcaggagtttgaaaattcaaaaaataaataataaatgtc

SEQ ID NO: 119512 - DNA, 2067 bp, Homo sapiens
  Payload ID: 3421
  Gene Symbol: C9orf64
  Gene Name: chromosome 9 open reading frame 64
  ENST ID: ENST00000314700
  CDS Start-End: 268-870
aaaggagaggggtgggagcggggtgggggcatcgcgacccagggcaaggcggcgagtcgccgtcttcgagtcccacctgtccgaagcggggacgagcacaagtgtgtggtgaggtacagagggaaaacatacagtgggtactggtccctgtgcgccgccgtcaacagagccctcgacgaagggataccaataactagtgcctcgtactacgcgacagtgaccctggatcaggttcggaatatacttcgttctgacacagacgtttccatgcctttagtagaagagaggcatcggattctcaatgaaaccgggaaaattctgctggagaagtttggaggctcttttctcaactgcgtccgagaaagtgagaatagtgcgcagaagttaatgcacctggtggttgaaagttttccttcttacagagatgtgactctgtttgaggggaaaagagtttctttttacaaacgagcccaaatccttgtagcagatacgtggagtgtattggaaggaaaaggagatggctgcttcaaggacatctccagtatcaccatgtttgctgattatagattacctcaggttcttgctcatcttggagccctgaaatactctgatgacctactgaagaagcttctcaaaggagaaatgctctcatatggagacaggcaagaggtggaaatcagagggtgctcgctttggtgtgttgagctgatccgggattgtcttctggagcttattgaacaaaagggtgaaaaacctaatggagagatcaattccattcttctggattattacttatgggactatgcccatgaccatagggaagatatgaaaggaattccgtttcatcgcatacgttgcatatattattgacctcaagtgtaaactgatccaaagaaaaccccctgcgttttatatcatatcatctgtacagttttgctttgatatttagagaacatgatcgaggttataggaaattgattgcccattctcacttgaaaaatacttcctaggccgggcacagtggtttatgcctgtaatcccagcactgtgggaggctgaggcgggtggatcatctgaggtcaggagtttgagaccacctggccaacatggtgaaaccccatctctactaaaaatacaaaattagctgggcgtggtggcacgtgcctgtaatcccagttacttgggaggctgaggcaagagaatcgcttgaactcagaaggtggaggttgcagtgaggcgagattaggccattgcactccagcctcagcaacaagagtgaaactttgtctcaaaaaacaacaacaacaacaacaacaacaacaaaacttcctaggccagatgtggtggctcatatgtataatcttagcactttgggaggccaaggcaggaggattgcttgaggcgaggagttcaagaccagcctaggcaacatagggagacccccatctctacaaaaatttaaaaattagcctagcatggtggcacgctctgtaatcccaaatacgcggtaggctgaggctgaggagggtggattgcttgagcccaggggtttgaggctgcagtgagccacagtcacgccactgcattctatcctgggcaacagatggagaccttgtctcaaaaaaaaaaaattcctgacatcgctatgtattcccaactttatcatttgtctgcctgtttagttttgacttatgttttttttttttcccccctgtggacatgtagttgacggaaatcgtgaaggaactttaatattttatttaaatttcccaaaactaatcatgccttatgtgactaatcttcagtgataatatttcatctactgatatattttcttgaggtgtgtaattttcagtataccttaatcatttggtataaaaaagagagaggtttttgatatatgaatgctgttcttgtaaaaatcaatcttgacactttattttaaactttttattggtaatgacagtgggttttgtacatcatgattttcaatttaggatatctgtctaatttgttttttcagagtaactatattggaattcaataaaaatattcaaaatttttctt

SEQ ID NO: 119513 - DNA, 620 bp, Homo sapiens
  Payload ID: 3421
  Gene Symbol: C9orf64
  Gene Name: chromosome 9 open reading frame 64
  ENST ID: ENST00000376340
  CDS Start-End: 251-433
ggcggccgacgaggccgcggtcaactgggtgttcgtgacagacacgctcaacttctccttttggtcggagcaggacgagcacaagtgtgtggtgaggtacagagggaaaacatacagtgggtactggtccctgtgcgccgccgtcaacagagccctcgacgaagggataccaataactagtgcctcgtactacgcgacagtgaccctggatcaggttcggaatatacttcgttctgacacagacgtttccatgcctttagtagaagagaggcatcggattctcaatgaaaccgggaaaattctgctggagaagtttggaggctcttttctcaactgcgtccgagaaagtgagaatagtgcgcagaagttaatgcacctggtggttgaaagttttccttcttacagagatgtgactctgtttgagtgtacttgaacaaatgatgatcattttgttggaccctcacaggctgcacccggattttgtttttgtaaaattcttttggaatcttttgaacctgggagggggaggttgcagtgagccgagattacgccaccgcactccagcctgggtgacagagctggactccatctcaaaaaaataaaagaaaaaataaaagaaa

SEQ ID NO: 119514 - DNA, 2443 bp, Homo sapiens
  Payload ID: 3421
  Gene Symbol: C9orf64
  Gene Name: chromosome 9 open reading frame 64
  Uniprot ID: Q5T6V5
  ENST ID: ENST00000376344
  CDS Start-End: 218-1243
cgagctgccccggggtctctctggtttcctaatcagggcaacgccgcgggagagaacctttaccttggctgcactaagttctcggtgccactccctggcagggcgggaccttgtttaggccctgtgatcgcgcggttcgtagtagcgcaaggcgcagagtggaccttgacccgcctagggcgggaagagtttggcccgccgggtcccaaagggcagaatggacgggctcctaaatcccagggaatcctctaaattcattgcagaaaacagtcgggatgtgtttattgacagcggaggcgtacggagggtggcagagctgctgctggccaaggcggcggggccagagctgcgcgtggaggggtggaaagcccttcatgagctgaaccccagggcggccgacgaggccgcggtcaactgggtgttcgtgacagacacgctcaacttctccttttggtcggagcaggacgagcacaagtgtgtggtgaggtacagagggaaaacatacagtgggtactggtccctgtgcgccgccgtcaacagagccctcgacgaagggataccaataactagtgcctcgtactacgcgacagtgaccctggatcaggttcggaatatacttcgttctgacacagacgtttccatgcctttagtagaagagaggcatcggattctcaatgaaaccgggaaaattctgctggagaagtttggaggctcttttctcaactgcgtccgagaaagtgagaatagtgcgcagaagttaatgcacctggtggttgaaagttttccttcttacagagatgtgactctgtttgaggggaaaagagtttctttttacaaacgagcccaaatccttgtagcagatacgtggagtgtattggaaggaaaaggagatggctgcttcaaggacatctccagtatcaccatgtttgctgattatagattacctcaggttcttgctcatcttggagccctgaaatactctgatgacctactgaagaagcttctcaaaggagaaatgctctcatatggagacaggcaagaggtggaaatcagagggtgctcgctttggtgtgttgagctgatccgggattgtcttctggagcttattgaacaaaagggtgaaaaacctaatggagagatcaattccattcttctggattattacttatgggactatgcccatgaccatagggaagatatgaaaggaattccgtttcatcgcatacgttgcatatattattgacctcaagtgtaaactgatccaaagaaaaccccctgcgttttatatcatatcatctgtacagttttgctttgatatttagagaacatgatcgaggttataggaaattgattgcccattctcacttgaaaaatacttcctaggccgggcacagtggtttatgcctgtaatcccagcactgtgggaggctgaggcgggtggatcatctgaggtcaggagtttgagaccacctggccaacatggtgaaaccccatctctactaaaaatacaaaattagctgggcgtggtggcacgtgcctgtaatcccagttacttgggaggctgaggcaagagaatcgcttgaactcagaaggtggaggttgcagtgaggcgagattaggccattgcactccagcctcagcaacaagagtgaaactttgtctcaaaaaacaacaacaacaacaacaacaacaacaaaacttcctaggccagatgtggtggctcatatgtataatcttagcactttgggaggccaaggcaggaggattgcttgaggcgaggagttcaagaccagcctaggcaacatagggagacccccatctctacaaaaatttaaaaattagcctagcatggtggcacgctctgtaatcccaaatacgcggtaggctgaggctgaggagggtggattgcttgagcccaggggtttgaggctgcagtgagccacagtcacgccactgcattctatcctgggcaacagatggagaccttgtctcaaaaaaaaaaaattcctgacatcgctatgtattcccaactttatcatttgtctgcctgtttagttttgacttatgttttttttttttcccccctgtggacatgtagttgacggaaatcgtgaaggaactttaatattttatttaaatttcccaaaactaatcatgccttatgtgactaatcttcagtgataatatttcatctactgatatattttcttgaggtgtgtaattttcagtataccttaatcatttggtataaaaaagagagaggtttttgatatatgaatgctgttcttgtaaaaatcaatcttgacactttattttaaactttttattggtaatgacagtgggttttgtacatcatgattttcaatttaggatatctgtctaatttgttttttcagagtaactatattggaattcaataaaaatattcaaaatttttcttaaa

SEQ ID NO: 119515 - DNA, 2918 bp, Homo sapiens
  Payload ID: 3422
  Gene Symbol: C9orf66
  Gene Name: chromosome 9 open reading frame 66
  Uniprot ID: Q5T8R8
  ENST ID: ENST00000382387
  CDS Start-End: 346-1233
aactttgattaggaattggatggtgagttgggatcccccagtccttagctttttgctggagttctgtaaatctcaaaatgtcagccacaggccatttcttttggtttatttaagtgtagattttttaaaaaatcactttttccacttcatggctcctttggaccagggtataaaaatagcgatgccaccaggagccaagctctttctggaataatgaagcaggcgaggacggagccttgctcaggacgacagaaggcttgcagcctgcctcaaacgcaactctaatttcagccacttcacttcttccccccgcgctcagacttgcctcaaaggaaggagccgtttatgagacactccgtggcgcgcccaacacggttacccaggcgcctatcacccttctgggacccggccacctgtaagaacctggagggcggagcgggcgaggttgttcggggaagggatccccggcggctgaggacatccaggagcaccgagattcttggggaggacctcgccgggcccagcgcaggagccgccgcgcgtccagcggctccaccgccgcagcctcgggaaccgggcgccccaggtctcaggcgcgccccgccgcggacgcgaatggactcgtccggcctcggcccctgcagcgaagctccgcttcacaccagcgctgggctgtccggccgcaacctgcgcgccgcggggggcgtcttacctgttgatcttgagcgcgaacgcgcggcgctctgcgctcggcagagtggccatggcccgccggcggttcggtggcttctagggtcgcggggtgcggaaagcgggggcctggcgcgccgcagagtagccgcggaacatgcccagccaagcgcaaacctcgtctgtcggtcggcgctggaaacttccgcatttccaccttctaagccgaaatcaccccgggggagggtccgagctcggagcagcgacggccggctccgccacccggcctggcgcgcaggcagcggcgggcgaggagggcgtgggcccagcgcggaactggcctcccgatactggggcagacggcgcgctctgcccggggccgccgacctccggccgaagggagcgcgggcggacgacaggcgaccactgcgcgcaggccggaagctccatctgcccgaagctgcgaggctgccagggaatgtaggcaagtcgggggagccccacaaagctggcgaggtcgggaatcaccccagggattcgtaaggctaggtgttattaagggttgacaccattctcgaagaaggcagccaaaaaaaaagacaaaaaagttagtggaatctatcaggattcaaatcaacttttgcaagcaatatgcccatcatccttcctgagacactaaataaatataatggattcatccaaggaataaacattatgagttctcaaaaaatgttttcgtcacaacctggcgtgaatgcttttctccggagaaacactgaaggcggcgttcttgcgattcaagggtacgctgcgtccaggtttatttcagtttcagactgaggtctgctaagaagcccggcctcaaactcaagataaaaacagaaaagtcccagtgttgacgggagtggaggagcccgtgttcgcttcaaggtgccggcgtgctgctctaacctgtgctatatatactcgagcactctccatataatgcctccatttaccaacttgctcttaaaaaataccaaagcaggccgggcgcggtggctcacgcctgtgatcccagcactttgggaggccgaggcgggcgcatcacgaggtcaggagatcgagaccatcctggccaacgtggtgaaaccccgtctctactaaaatacaaaaaattagccgggcgtggtggcgcacgccttagtcccagctacttgggaggctgaggcaggggaatcacttgaacccgggaggcggagcttgcagtgaaccgagatctgccactgcactccagcctggcgacagagcaagtctccgtctaaaagaaaaaaaaaaaaacaaccaaagcgaagtatttttggttcaaacctgcactatttaatatgatagccactagccacatgtggctattgaccactcggcattatggttagtctgaattgcccactgctggatgtgtaaaatgtacactggaatttaaagacagcgcagaaaacatcgtgtaaaatgtcttgttaatgattttcatgttgattgcatgttaaatgatactttggatataaaaaatatattattaaagttaatttcacctgtttgttttccccttttaaaaatgtggtttgcatttttaaaaatgtaaaattacacatgtggctcacatttgtgagcctcattatattcctattggacagtgccagtccaatacaacctaatttgtcacctaatactaaaatccacctaaggactatattcagtctcttcctgatacagccttccttcctggtttcagctgtgtcaggtagtttagtaacttttcagtactggttaggtaactccccgccccccaatgcccaccaaatatcagtgcccttttaagcatataagacaaagttcactgcatagactacaatagactacatacgaaaacaaacccaaagaaaaataaagcttttttgaaatttagagtttctgactttcaaaactgtccttatttactacattggaatttatgagcaaacatttggatagcaaaatacaaagagaacaaatgtgtaagtacttcttcaaactgagactcaacgaatgatacatagaaaacattttgccccagaggcttcggtccacggtgtaccatgtcagcctttcggatgaactcctctgaatttctgaatgtttatgacatacattttcatatagaacaaaaatatactggtttcacacaaacataaataaaatgtaatgaaagc

SEQ ID NO: 119516 - DNA, 2804 bp, Homo sapiens
  Payload ID: 3423
  Gene Symbol: C9orf69
  Gene Name: chromosome 9 open reading frame 69
  Uniprot ID: H0YL14
  ENST ID: ENST00000561457
  CDS Start-End: 485-904
gcggcgcgggacccggaagtggctccggcaggggctctgcagccagggggcccggcgcggcgcggcgcaggcccggtgctcacgcggagttggccggggcccgttgcgtctctgcggccccgaggaaacagtcctgggtccatgggccgggccgagcgggcgtctgcagaaacgcagggacccggatggagccgcgggccgcgagaccctgcggggacacagctccgccgagtcgcgtttgagtggcaccgccatggccggggtcccggccggggcgagctccaggccaaggccggccttaaatagggccgctctggcccctgcaccccgtggaggagccgggcggagggagagggcgaggccgacgcctccccccagggtcagctgcgggctcccaggcctaggcgcccatgacccctacgccaacagccgcctggacaccgccgccgccactgcgacctagcgccgccgccgccggggcccaatgccggtcatgcccattccgcggcgggtgcgctccttccacggcccgcacaccacctgcctgcatgcggcctgcgggcccgtgcgcgcctcccacctggcccgcaccaagtacaacaacttcgacgtgtacatcaagacgcgctggctgtacggcttcatccgcttcctactctactttagctgcagcctgttcactgcggcgctctggggtgcgctggccgccctcttctgcctacagtacctgggcgttcgcgtcctgctgcgcttccagcgcaagctgtcggtgctgctgctgctgctgggccgccggcgcgtggacttccgcctggtgaacgagctgctcgtctatggcatccacgtcaccatgctgctggtcgggggcctgggctggtgcttcatggtcttcgtggacatgtgagggccgtgggtgcgagcttgatgtatcgtcccggcctgtggctgtgttctctccatgggtggggtcggccagcgccttcccttcgcccatcccccaggcagtcgctgctgcccggcgcccacggagagaaaagaaagggctgagacttctgtgatgggggcgcggacaccacccctaggctggcttcctggacccaccctccccgtatgcactctcaggggcagcgcccacctgccggtggctcctgctcacatgtcttcgggtcgtactgcggggtgggccctccgttccgcctctctgtgggcctctctccaggaccacagctgccagggactttagacatcaccctgggaggcccctggacacagagggctgtgtgcccaggagcaattccggaggggggccctcctggctgcacagccccttctgcgtgccctggccccagccccagccaacgggacacggaaggctcccctcgctgacacaccacactgccacaaagctgcttactctgccctgggccgcctgaggcctggcactgcccgcggaccaccctgtgtgtgtcatcctgaggggctgtgtgggtcctgagtccccagccagccttcagggtccccttggattgtgtagatgcagtctagcggggggccggagaagggctcaggtgggaggggcctcagcaggctcccagctcaggggctggcctggggggaaccctgggagccaggggctgactccagcaacactggcctgtctgcctgttctgggagggctgtgaggatgtcttgcagatgctctggatttctgcggaggcacctccattcctttctggctttttttgcgggggagggctttgggcctctttctttgagggaacaccgtcaaagaaagcctgggagatcgaggcttcagtgagccaggatggaaacgcgtgtcccaagtgtccggagcaggcggcagaggcctcagtgcggcaaacacagccccagagcctgtgtggcaccagcagcatcttagagccccaggtatatgctgagatcttatctcacgctgtcctccagtgtctggggggcccaaatgatggcacaggggcaggtgggctggaggggcgcagatgcctgtgttcagggagggtggccaccatgggccgaggtctcacccaggaccccttgctctgctcctcagccttgcagtcacggcagcactatggtggactgcccatggccgtgtgactttgggggcaagtgggagggcgccctgaataatgattgcaaggacaacaggcagaggctaccctagagcaggacacagggtgtggtactgacaaccctagtgtcacctcaaatccatgtccccacactctgggcatgggtgggacttgtgaccctaccctgtcaggcggaccagtggcccaggagccatgaggacagttgtgtgccactggaagagaaactttttgaaaaaccctaaatcaggtagagaaagcaaaaaatctctggccgtaaaccgtgctctctaatttatcggcagcttctgtggatgacctctgatgagcccgggctgcgtccacgccctgggcaggtaggcgggagcttccctgcgtgggcctcatttcttgctgcagagaatcttttgcactaagtcatgctgtttcctcaaagaagctttgttttttgttaacgtattactcagagtcacccaagcctcttggctgagggtgaaggtgggacgggaggcgggagggggctggtggtgccgctcgtgcggtgtcaacgctgcagggagttgtggcaccttggtgccctctgagcacctggccgcctgctgtccccggtgcctgtgaaattcgtcatgccatgacccacctgcattaaacctatttttttaatgtgttgatgga

SEQ ID NO: 119517 - DNA, 2823 bp, Homo sapiens
  Payload ID: 3423
  Gene Symbol: C9orf69
  Gene Name: chromosome 9 open reading frame 69
  Uniprot ID: H0YL14
  ENST ID: ENST00000418388
  CDS Start-End: 504-923
gggaagcgacgagtccgggacgcccagcgcgggcccggagcagggggaagggaagtgcggctcggtcggcgcgggtggagggggcgtgaggccgccctacggtggccgtcgagggacggcgctacggctcccacgctaggccaaacgcctccggcggccgcgcccgagagccccttcacctgcagggcgaccccagccggcgacgcgtgaaccacgccctcagccgccttgccagcgcccccagccgcgcgccccagcaccatgcggccgccctgcgcacggagccccgagggacaggggcacccgcaggcccggcccctagcaccgccggccggccccgaggtccgggacgccggcgccgccgcggagagggcaccgggccgacgcctccccccagggtcagctgcgggctcccaggcctaggcgcccatgacccctacgccaacagccgcctggacaccgccgccgccactgcgacctagcgccgccgccgccggggcccaatgccggtcatgcccattccgcggcgggtgcgctccttccacggcccgcacaccacctgcctgcatgcggcctgcgggcccgtgcgcgcctcccacctggcccgcaccaagtacaacaacttcgacgtgtacatcaagacgcgctggctgtacggcttcatccgcttcctactctactttagctgcagcctgttcactgcggcgctctggggtgcgctggccgccctcttctgcctacagtacctgggcgttcgcgtcctgctgcgcttccagcgcaagctgtcggtgctgctgctgctgctgggccgccggcgcgtggacttccgcctggtgaacgagctgctcgtctatggcatccacgtcaccatgctgctggtcgggggcctgggctggtgcttcatggtcttcgtggacatgtgagggccgtgggtgcgagcttgatgtatcgtcccggcctgtggctgtgttctctccatgggtggggtcggccagcgccttcccttcgcccatcccccaggcagtcgctgctgcccggcgcccacggagagaaaagaaagggctgagacttctgtgatgggggcgcggacaccacccctaggctggcttcctggacccaccctccccgtatgcactctcaggggcagcgcccacctgccggtggctcctgctcacatgtcttcgggtcgtactgcggggtgggccctccgttccgcctctctgtgggcctctctccaggaccacagctgccagggactttagacatcaccctgggaggcccctggacacagagggctgtgtgcccaggagcaattccggaggggggccctcctggctgcacagccccttctgcgtgccctggccccagccccagccaacgggacacggaaggctcccctcgctgacacaccacactgccacaaagctgcttactctgccctgggccgcctgaggcctggcactgcccgcggaccaccctgtgtgtgtcatcctgaggggctgtgtgggtcctgagtccccagccagccttcagggtccccttggattgtgtagatgcagtctagcggggggccggagaagggctcaggtgggaggggcctcagcaggctcccagctcaggggctggcctggggggaaccctgggagccaggggctgactccagcaacactggcctgtctgcctgttctgggagggctgtgaggatgtcttgcagatgctctggatttctgcggaggcacctccattcctttctggctttttttgcgggggagggctttgggcctctttctttgagggaacaccgtcaaagaaagcctgggagatcgaggcttcagtgagccaggatggaaacgcgtgtcccaagtgtccggagcaggcggcagaggcctcagtgcggcaaacacagccccagagcctgtgtggcaccagcagcatcttagagccccaggtatatgctgagatcttatctcacgctgtcctccagtgtctggggggcccaaatgatggcacaggggcaggtgggctggaggggcgcagatgcctgtgttcagggagggtggccaccatgggccgaggtctcacccaggaccccttgctctgctcctcagccttgcagtcacggcagcactatggtggactgcccatggccgtgtgactttgggggcaagtgggagggcgccctgaataatgattgcaaggacaacaggcagaggctaccctagagcaggacacagggtgtggtactgacaaccctagtgtcacctcaaatccatgtccccacactctgggcatgggtgggacttgtgaccctaccctgtcaggcggaccagtggcccaggagccatgaggacagttgtgtgccactggaagagaaactttttgaaaaaccctaaatcaggtagagaaagcaaaaaatctctggccgtaaaccgtgctctctaatttatcggcagcttctgtggatgacctctgatgagcccgggctgcgtccacgccctgggcaggtaggcgggagcttccctgcgtgggcctcatttcttgctgcagagaatcttttgcactaagtcatgctgtttcctcaaagaagctttgttttttgttaacgtattactcagagtcacccaagcctcttggctgagggtgaaggtgggacgggaggcgggagggggctggtggtgccgctcgtgcggtgtcaacgctgcagggagttgtggcaccttggtgccctctgagcacctggccgcctgctgtccccggtgcctgtgaaattcgtcatgccatgacccacctgcattaaacctatttttttaatgtgttgatgga

SEQ ID NO: 119518 - DNA, 648 bp, Homo sapiens
  Payload ID: 3423
  Gene Symbol: C9orf69
  Gene Name: chromosome 9 open reading frame 69
  ENST ID: ENST00000447934
  CDS Start-End: 534-648
gggcgtctgcagaaacgcagggacccggatggagccgcgggccgcgagaccctgcggggacacagctccgccgagtcgcgtttgagtggcaccgccatggccggggtcccggccggggcgagctccaggccaaggccggccttaaatagggccgctctggcccctgcaccccgtggaggagccgggcggagggagagggcgaggtcgggcccctgcgggcacgggagggtcaggcggccccggcccctccctcctccgccctggccaggtccccacggcagggccccaggctgaatctgaaggcaggcgaagctcttggcaacagtcccctgtaatgttaccaactttcctgctcagattttatttcctgacctttgagttcattccgtctacagattatttcggcaaggccgacgcctccccccagggtcagctgcgggctcccaggcctaggcgcccatgacccctacgccaacagccgcctggacaccgccgccgccactgcgacctagcgccgccgccgccggggcccaatgccggtcatgcccattccgcggcgggtgcgctccttccacggcccgcacaccacctgcctgcatgcggcctgcgggcccgtgcgcgcctcccacctggcccgcaccaagtaca

SEQ ID NO: 119519 - DNA, 1981 bp, Homo sapiens
  Payload ID: 3423
  Gene Symbol: C9orf69
  Gene Name: chromosome 9 open reading frame 69
  Uniprot ID: H0YL14
  ENST ID: ENST00000557985
  CDS Start-End: 175-594
ggccggccccgaggtccgggacgccggcgccgccgcggagagggcaccgggccgacgcctccccccagggtcagctgcgggctcccaggcctaggcgcccatgacccctacgccaacagccgcctggacaccgccgccgccactgcgacctagcgccgccgccgccggggcccaatgccggtcatgcccattccgcggcgggtgcgctccttccacggcccgcacaccacctgcctgcatgcggcctgcgggcccgtgcgcgcctcccacctggcccgcaccaagtacaacaacttcgacgtgtacatcaagacgcgctggctgtacggcttcatccgcttcctactctactttagctgcagcctgttcactgcggcgctctggggtgcgctggccgccctcttctgcctacagtacctgggcgttcgcgtcctgctgcgcttccagcgcaagctgtcggtgctgctgctgctgctgggccgccggcgcgtggacttccgcctggtgaacgagctgctcgtctatggcatccacgtcaccatgctgctggtcgggggcctgggctggtgcttcatggtcttcgtggacatgtgagggccgtgggtgcgagcttgatgtatcgtcccggcctgtggctgtgttctctccatgggtggggtcggccagcgccttcccttcgcccatcccccaggcagtcgctgctgcccggcgcccacggagagaaaagaaagggctgagacttctgtgatgggggcgcggacaccacccctaggctggcttcctggacccaccctccccgtatgcactctcaggggcagcgcccacctgccggtggctcctgctcacatgtcttcgggtcgtactgcggggtgggccctccgttccgcctctctgtgggcctctctccaggaccacagctgccagggactttagacatcaccctgggaggcccctggacacagagggctgtgtgcccaggagcaattccggaggggggccctcctggctgcacagccccttctgcgtgccctggccccagccccagccaacgggacacggaaggctcccctcgctgacacaccacactgccacaaagctgcttactctgccctgggccgcctgaggcctggcactgcccgcggaccaccctgtgtgtgtcatcctgaggggctgtgtgggtcctgagtccccagccagccttcagggtccccttggattgtgtagatgcagtctagcggggggccggagaagggctcaggtgggaggggcctcagcaggctcccagctcaggggctggcctggggggaaccctgggagccaggggctgactccagcaacactggcctgtctgcctgttctgggagggctgtgaggatgtcttgcagatgctctggatttctgcggaggcacctccattcctttctggctttttttgcgggggagggctttgggcctctttctttgagggaacaccgtcaaagaaagcctgggagatcgaggcttcagtgagccaggatggaaacgcgtgtcccaagtgtccggagcaggcggcagaggcctcagtgcggcaaacacagccccagagcctgtgtggcaccagcagcatcttagagccccagcttctgtggatgacctctgatgagcccgggctgcgtccacgccctgggcaggtaggcgggagcttccctgcgtgggcctcatttcttgctgcagagaatcttttgcactaagtcatgctgtttcctcaaagaagctttgttttttgttaacgtattactcagagtcacccaagcctcttggctgagggtgaaggtgggacgggaggcgggagggggctggtggtgccgctcgtgcggtgtcaacgctgcagggagttgtggcaccttggtgccctctgagcacctggccgcctgctgtccccggtgcctgtgaaattcgtcatgccatgacccacctgcattaaacctatttttttaatgtg

SEQ ID NO: 119520 - DNA, 588 bp, Homo sapiens
  Payload ID: 3423
  Gene Symbol: C9orf69
  Gene Name: chromosome 9 open reading frame 69
  ENST ID: ENST00000448040
  CDS Start-End: 492-588
gcaacgcgcggcgcgggacccggaagtggctccggcaggggctctgcagccagggggcccggcgcggcgcggcgcaggcccggtgctcacgcggagttggccggggcccgttgcgtctctgcggccccgaggaaacagtcctgggtccatgggccgggccgagcgggcgtctgcagaaacgcagggacccggatggagccgcgggccgcgagaccctgcggggacacagctccgccgagtcgcgtttgagtggcaccgccatggccggggtcccggccggggcgagctccaggccaaggccggccttaaatagggccgctctggcccctgcaccccgtggaggagccgggcggagggagagggcgaggccgacgcctccccccagggtcagctgcgggctcccaggcctaggcgcccatgacccctacgccaacagccgcctggacaccgccgccgccactgcgacctagcgccgccgccgccggggcccaatgccggtcatgcccattccgcggcgggtgcgctccttccacggcccgcacaccacctgcctgcatgcggcctgcgggcccgtgcgcgcctcccacc

SEQ ID NO: 119521 - DNA, 777 bp, Homo sapiens
  Payload ID: 3424
  Gene Symbol: C9orf72
  Gene Name: chromosome 9 open reading frame 72
  Uniprot ID: Q96LT7
  ENST ID: ENST00000379995
  CDS Start-End: 77-745
tctcttttgggggcggggtctagcaagagcagatatctccggagcatttggataatgtgacagttggaatgcagtgatgtcgactctttgcccaccgccatctccagctgttgccaagacagagattgctttaagtggcaaatcacctttattagcagctacttttgcttactgggacaatattcttggtcctagagtaaggcacatttgggctccaaagacagaacaggtacttctcagtgatggagaaataacttttcttgccaaccacactctaaatggagaaatccttcgaaatgcagagagtggtgctatagatgtaaagttttttgtcttgtctgaaaagggagtgattattgtttcattaatctttgatggaaactggaatggggatcgcagcacatatggactatcaattatacttccacagacagaacttagtttctacctcccacttcatagagtgtgtgttgatagattaacacatataatccggaaaggaagaatatggatgcataaggaaagacaagaaaatgtccagaagattatcttagaaggcacagagagaatggaagatcagggtcagagtattattccaatgcttactggagaagtgattcctgtaatggaactgctttcatctatgaaatcacacagtgttcctgaagaaatagatatagctgatacagtactcaatgatgatgatattggtgacagctgtcatgaaggctttcttctcaagtaagaatttttcttttcataaaagctggatgaagc

SEQ ID NO: 119522 - DNA, 1873 bp, Homo sapiens
  Payload ID: 3424
  Gene Symbol: C9orf72
  Gene Name: chromosome 9 open reading frame 72
  Uniprot ID: Q96LT7
  ENST ID: ENST00000379997
  CDS Start-End: 125-793
acgtaacctacggtgtcccgctaggaaagagaggtgcgtcaaacagcgacaagttccgcccacgtaaaagatgacgcttgatatctccggagcatttggataatgtgacagttggaatgcagtgatgtcgactctttgcccaccgccatctccagctgttgccaagacagagattgctttaagtggcaaatcacctttattagcagctacttttgcttactgggacaatattcttggtcctagagtaaggcacatttgggctccaaagacagaacaggtacttctcagtgatggagaaataacttttcttgccaaccacactctaaatggagaaatccttcgaaatgcagagagtggtgctatagatgtaaagttttttgtcttgtctgaaaagggagtgattattgtttcattaatctttgatggaaactggaatggggatcgcagcacatatggactatcaattatacttccacagacagaacttagtttctacctcccacttcatagagtgtgtgttgatagattaacacatataatccggaaaggaagaatatggatgcataaggaaagacaagaaaatgtccagaagattatcttagaaggcacagagagaatggaagatcagggtcagagtattattccaatgcttactggagaagtgattcctgtaatggaactgctttcatctatgaaatcacacagtgttcctgaagaaatagatatagctgatacagtactcaatgatgatgatattggtgacagctgtcatgaaggctttcttctcaagtaagaatttttcttttcataaaagctggatgaagcagataccatcttatgctcacctatgacaagatttggaagaaagaaaataacagactgtctacttagattgttctagggacattacgtatttgaactgttgcttaaatttgtgttatttttcactcattatatttctatatatatttggtgttattccatttgctatttaaagaaaccgagtttccatcccagacaagaaatcatggccccttgcttgattctggtttcttgttttacttctcattaaagctaacagaatcctttcatattaagttgtactgtagatgaacttaagttatttaggcgtagaacaaaattattcatatttatactgatctttttccatccagcagtggagtttagtacttaagagtttgtgcccttaaaccagactccctggattaatgctgtgtacccgtgggcaaggtgcctgaattctctatacacctatttcctcatctgtaaaatggcaataatagtaatagtacctaatgtgtagggttgttataagcattgagtaagataaataatataaagcacttagaacagtgcctggaacataaaaacacttaataatagctcatagctaacatttcctatttacatttcttctagaaatagccagtatttgttgagtgcctacatgttagttcctttactagttgctttacatgtattatcttatattctgttttaaagtttcttcacagttacagattttcatgaaattttacttttaataaaagagaagtaaaagtataaagtattcacttttatgttcacagtcttttcctttaggctcatgatggagtatcagaggcatgagtgtgtttaacctaagagccttaatggcttgaatcagaagcactttagtcctgtatctgttcagtgtcagcctttcatacatcattttaaatcccatttgactttaagtaagtcacttaatctctctacatgtcaatttcttcagctataaaatgatggtatttcaataaataaatacattaattaaatgatattatactgactaattgggctgttttaaggc

SEQ ID NO: 119523 - DNA, 3200 bp, Homo sapiens
  Payload ID: 3424
  Gene Symbol: C9orf72
  Gene Name: chromosome 9 open reading frame 72
  Uniprot ID: Q96LT7
  ENST ID: ENST00000380003
  CDS Start-End: 65-1510
gcgcaggcggtggcgagtggatatctccggagcatttggataatgtgacagttggaatgcagtgatgtcgactctttgcccaccgccatctccagctgttgccaagacagagattgctttaagtggcaaatcacctttattagcagctacttttgcttactgggacaatattcttggtcctagagtaaggcacatttgggctccaaagacagaacaggtacttctcagtgatggagaaataacttttcttgccaaccacactctaaatggagaaatccttcgaaatgcagagagtggtgctatagatgtaaagttttttgtcttgtctgaaaagggagtgattattgtttcattaatctttgatggaaactggaatggggatcgcagcacatatggactatcaattatacttccacagacagaacttagtttctacctcccacttcatagagtgtgtgttgatagattaacacatataatccggaaaggaagaatatggatgcataaggaaagacaagaaaatgtccagaagattatcttagaaggcacagagagaatggaagatcagggtcagagtattattccaatgcttactggagaagtgattcctgtaatggaactgctttcatctatgaaatcacacagtgttcctgaagaaatagatatagctgatacagtactcaatgatgatgatattggtgacagctgtcatgaaggctttcttctcaatgccatcagctcacacttgcaaacctgtggctgttccgttgtagtaggtagcagtgcagagaaagtaaataagatagtcagaacattatgcctttttctgactccagcagagagaaaatgctccaggttatgtgaagcagaatcatcatttaaatatgagtcagggctctttgtacaaggcctgctaaaggattcaactggaagctttgtgctgcctttccggcaagtcatgtatgctccatatcccaccacacacatagatgtggatgtcaatactgtgaagcagatgccaccctgtcatgaacatatttataatcagcgtagatacatgagatccgagctgacagccttctggagagccacttcagaagaagacatggctcaggatacgatcatctacactgacgaaagctttactcctgatttgaatatttttcaagatgtcttacacagagacactctagtgaaagccttcctggatcaggtctttcagctgaaacctggcttatctctcagaagtactttccttgcacagtttctacttgtccttcacagaaaagccttgacactaataaaatatatagaagacgatacgcagaagggaaaaaagccctttaaatctcttcggaacctgaagatagaccttgatttaacagcagagggcgatcttaacataataatggctctggctgagaaaattaaaccaggcctacactcttttatctttggaagacctttctacactagtgtgcaagaacgagatgttctaatgactttttaaatgtgtaacttaataagcctattccatcacaatcatgatcgctggtaaagtagctcagtggtgtggggaaacgttcccctggatcatactccagaattctgctctcagcaattgcagttaagtaagttacactacagttctcacaagagcctgtgaggggatgtcaggtgcatcattacattgggtgtctcttttcctagatttatgcttttgggatacagacctatgtttacaatataataaatattattgctatcttttaaagatataataataggatgtaaacttgaccacaactactgtttttttgaaatacatgattcatggtttacatgtgtcaaggtgaaatctgagttggcttttacagatagttgactttctatcttttggcattctttggtgtgtagaattactgtaatacttctgcaatcaactgaaaactagagcctttaaatgatttcaattccacagaaagaaagtgagcttgaacataggatgagctttagaaagaaaattgatcaagcagatgtttaattggaattgattattagatcctactttgtggatttagtccctgggattcagtctgtagaaatgtctaatagttctctatagtccttgttcctggtgaaccacagttagggtgttttgtttattttattgttcttgctattgttgatattctatgtagttgagctctgtaaaaggaaattgtattttatgttttagtaattgttgccaactttttaaattaattttcattatttttgagccaaattgaaatgtgcacctcctgtgccttttttctccttagaaaatctaattacttggaacaagttcagatttcactggtcagtcattttcatcttgttttcttcttgctaagtcttaccatgtacctgctttggcaatcattgcaactctgagattataaaatgccttagagaatatactaactaataagatctttttttcagaaacagaaaatagttccttgagtacttccttcttgcatttctgcctatgtttttgaagttgttgctgtttgcctgcaataggctataaggaatagcaggagaaattttactgaagtgctgttttcctaggtgctactttggcagagctaagttatcttttgttttcttaatgcgtttggaccattttgctggctataaaataactgattaatataattctaacacaatgttgacattgtagttacacaaacacaaataaatattttatttaaaattctggaagtaatataaaagggaaaatatatttataagaaagggataaaggtaatagagcccttctgccccccacccaccaaatttacacaacaaaatgacatgttcgaatgtgaaaggtcataatagctttcccatcatgaatcagaaagatgtggacagcttgatgttttagacaaccactgaactagatgactgttgtactgtagctcagtcatttaaaaaatatataaatactaccttgtagtgtcccatactgtgttttttacatggtagattcttatttaagtgctaactggttattttctttggctggtttattgtactgttatacagaatgtaagttgtacagtgaaataagttattaaagcatgtgtaaacattgttatatatcttttctcctaaatggagaattttgaataaaatatatttgaaatttt

SEQ ID NO: 119524 - DNA, 3339 bp, Homo sapiens
  Payload ID: 3424
  Gene Symbol: C9orf72
  Gene Name: chromosome 9 open reading frame 72
  Uniprot ID: Q96LT7
  ENST ID: ENST00000619707
  CDS Start-End: 203-1648
acgtaacctacggtgtcccgctaggaaagagaggtgcgtcaaacagcgacaagttccgcccacgtaaaagatgacgcttggtgtgtcagccgtccctgctgcccggttgcttctcttttgggggcggggtctagcaagagcaggtgtgggtttaggagatatctccggagcatttggataatgtgacagttggaatgcagtgatgtcgactctttgcccaccgccatctccagctgttgccaagacagagattgctttaagtggcaaatcacctttattagcagctacttttgcttactgggacaatattcttggtcctagagtaaggcacatttgggctccaaagacagaacaggtacttctcagtgatggagaaataacttttcttgccaaccacactctaaatggagaaatccttcgaaatgcagagagtggtgctatagatgtaaagttttttgtcttgtctgaaaagggagtgattattgtttcattaatctttgatggaaactggaatggggatcgcagcacatatggactatcaattatacttccacagacagaacttagtttctacctcccacttcatagagtgtgtgttgatagattaacacatataatccggaaaggaagaatatggatgcataaggaaagacaagaaaatgtccagaagattatcttagaaggcacagagagaatggaagatcagggtcagagtattattccaatgcttactggagaagtgattcctgtaatggaactgctttcatctatgaaatcacacagtgttcctgaagaaatagatatagctgatacagtactcaatgatgatgatattggtgacagctgtcatgaaggctttcttctcaatgccatcagctcacacttgcaaacctgtggctgttccgttgtagtaggtagcagtgcagagaaagtaaataagatagtcagaacattatgcctttttctgactccagcagagagaaaatgctccaggttatgtgaagcagaatcatcatttaaatatgagtcagggctctttgtacaaggcctgctaaaggattcaactggaagctttgtgctgcctttccggcaagtcatgtatgctccatatcccaccacacacatagatgtggatgtcaatactgtgaagcagatgccaccctgtcatgaacatatttataatcagcgtagatacatgagatccgagctgacagccttctggagagccacttcagaagaagacatggctcaggatacgatcatctacactgacgaaagctttactcctgatttgaatatttttcaagatgtcttacacagagacactctagtgaaagccttcctggatcaggtctttcagctgaaacctggcttatctctcagaagtactttccttgcacagtttctacttgtccttcacagaaaagccttgacactaataaaatatatagaagacgatacgcagaagggaaaaaagccctttaaatctcttcggaacctgaagatagaccttgatttaacagcagagggcgatcttaacataataatggctctggctgagaaaattaaaccaggcctacactcttttatctttggaagacctttctacactagtgtgcaagaacgagatgttctaatgactttttaaatgtgtaacttaataagcctattccatcacaatcatgatcgctggtaaagtagctcagtggtgtggggaaacgttcccctggatcatactccagaattctgctctcagcaattgcagttaagtaagttacactacagttctcacaagagcctgtgaggggatgtcaggtgcatcattacattgggtgtctcttttcctagatttatgcttttgggatacagacctatgtttacaatataataaatattattgctatcttttaaagatataataataggatgtaaacttgaccacaactactgtttttttgaaatacatgattcatggtttacatgtgtcaaggtgaaatctgagttggcttttacagatagttgactttctatcttttggcattctttggtgtgtagaattactgtaatacttctgcaatcaactgaaaactagagcctttaaatgatttcaattccacagaaagaaagtgagcttgaacataggatgagctttagaaagaaaattgatcaagcagatgtttaattggaattgattattagatcctactttgtggatttagtccctgggattcagtctgtagaaatgtctaatagttctctatagtccttgttcctggtgaaccacagttagggtgttttgtttattttattgttcttgctattgttgatattctatgtagttgagctctgtaaaaggaaattgtattttatgttttagtaattgttgccaactttttaaattaattttcattatttttgagccaaattgaaatgtgcacctcctgtgccttttttctccttagaaaatctaattacttggaacaagttcagatttcactggtcagtcattttcatcttgttttcttcttgctaagtcttaccatgtacctgctttggcaatcattgcaactctgagattataaaatgccttagagaatatactaactaataagatctttttttcagaaacagaaaatagttccttgagtacttccttcttgcatttctgcctatgtttttgaagttgttgctgtttgcctgcaataggctataaggaatagcaggagaaattttactgaagtgctgttttcctaggtgctactttggcagagctaagttatcttttgttttcttaatgcgtttggaccattttgctggctataaaataactgattaatataattctaacacaatgttgacattgtagttacacaaacacaaataaatattttatttaaaattctggaagtaatataaaagggaaaatatatttataagaaagggataaaggtaatagagcccttctgccccccacccaccaaatttacacaacaaaatgacatgttcgaatgtgaaaggtcataatagctttcccatcatgaatcagaaagatgtggacagcttgatgttttagacaaccactgaactagatgactgttgtactgtagctcagtcatttaaaaaatatataaatactaccttgtagtgtcccatactgtgttttttacatggtagattcttatttaagtgctaactggttattttctttggctggtttattgtactgttatacagaatgtaagttgtacagtgaaataagttattaaagcatgtgtaaacattgttatatatcttttctcctaaatggagaattttgaataaaatatatttgaaattttg

SEQ ID NO: 119525 - DNA, 1795 bp, Homo sapiens
  Payload ID: 3425
  Gene Symbol: C9orf78
  Gene Name: chromosome 9 open reading frame 78
  Uniprot ID: Q9NZ63
  ENST ID: ENST00000372447
  CDS Start-End: 55-924
agcctgggccgctgcgcagaggcgcggcggctgtacaactcggccgttgtcaccatgccggtcgtccggaagattttccgtcgccgccggggcgactcggagtcagaggaagatgagcaggactcagaggaggttcgattaaaactggaagagaccagagaggtacagaacttgaggaagaggcccaacggggtgagtgctgtggccttgctggtgggagagaaggtacaagaggagaccactctagtggatgatccctttcagatgaagacaggtggtatggtggatatgaagaaactgaaggaaaggggcaaagataagatcagtgaggaggaggacctgcacctggggacatcgttttctgcagaaaccaaccgaagggatgaggatgcagacatgatgaagtacattgagacagagctaaagaagaggaaagggatcgtggaacatgaggaacagaaagttaagccaaagaatgcagaggactgtctttatgaacttccagaaaacatccgtgtttcctcagcaaagaagaccgaggagatgctttccaaccagatgctgagtggcattcctgaggtggacctgggcatcgatgctaaaataaaaaatatcatttccacggaggatgccaaggcccgtctgctggcagagcagcagaacaagaagaaagacagcgagacctccttcgtgcctaccaacatggctgtgaattatgtgcagcacaacagattttatcatgaggagctcaacgcgcccatacggagaaacaaagaagagcccaaggcccggcccttgagagtaggtgacacggagaagccagagcctgagcggtcccctcctaaccgcaagcgtcctgctaacgagaaggcaactgatgactatcattatgagaagttcaagaaaatgaataggcggtactgagttgtgcagagtgggatgtaaatatcgccttcctctccctatatccctcccatgaaaaatggcttcctggccgggcgtggtggctcctgcctgtaatcccagcactttgggaggccgaggtgggcggatcacctgaggtcgggagtttgagaccagcctgaccaacatggagaaacccagtctctactgaaaatacagaaaagttagccaggcgtggtggcacatgcctgtaatcccagctgctcaggaggctgaggcaggagaattgcttgaacccaagaggcggaggttgtggtgagccgagattgcacctttgtactccagcctgggcaacgagcaaaaaactctgtctcaaaaaaaaaaaaaaaaaaaaaaaagaaaaagaaaaatggcttccaggacagagcatgctcatttgctggcggacagttccagaaacagaccctgttagtccttctacttacctgctggatttttcaagcactaaatttataactttttgaaacaaaataatgtgtaattttccatttgggggcaaactctattcttgtgagcattattaaatcttgtttgtaaatatattgtctttctcttaatatttgctctgggtcaggaagaagctgttcacggtgtgataatactctttagattgtgctttcattattatagatgcatcatgtcttctgctttcacgtgtctgggatggggtcagaaatgcatcctccagctgacagaaaaatccaggatgagatcagaaggatactggtgttttctgacttttacaaaattacttgtttgttttcattaaaaaaaaagcataaactatgtttcttattactattagaattattaaatttcaaaatgaatccaa

SEQ ID NO: 119526 - DNA, 1792 bp, Homo sapiens
  Payload ID: 3425
  Gene Symbol: C9orf78
  Gene Name: chromosome 9 open reading frame 78
  ENST ID: ENST00000615599
  CDS Start-End: 286-813
ggaagcagcctgggccgctgcgcagaggcgcggcggctgtacaactcggccgttgtcaccatgccggtcgtccggaagattttccgtcgccgccggggcgactcggagtcagaggaagatgagcaggactcagaggaggttcgattaaaactggaagagaccagagaggtacagaacttgaggaagaggcccaacggggtgagtgctgtggccttgctggtgggagagaaggtacaagaggagaccactctagtggatgatccctttcagatgaagacaggtggtatggtggatatgaagaaactgaaggaaaggggcaaagataagatcagtgaggaggaggacctgcacctggggacatcgttttctgcagaaaccaaccgaagggatgaggatgcagacatgatgaagtacattgagacagagctaaagaagaggaaagggatcgtggaacatgaggaacagaaagttaagccaaagaatgcagaggactgtctttatgaacttccagaaaacatccgtgtttcctcagcaaagaagaccgaggagatgctttccaaccagatgctgagtggcattcctgaggtggacctgggcatcgatgctaaaataaaaaatatcatttccacggaggatgccaaggcccgtctgctggcagagcagcagaacaagaagaaagacagcgagacctccttcgtgcctaccaacatggctgtgaattatgtgcagcacaacagattttatcatgaggagctcaacgcgcatacggagaaacaaagaagagcccaaggcccggcccttgagagtaggtgacacggagaagccagagcctgagcggtcccctcctaaccgcaagcgtcctgctaacgagaaggcaactgatgactatcattatgagaagttcaagaaaatgaataggcggtactgagttgtgcagagtgggatgtaaatatcgccttcctctccctatatccctcccatgaaaaatggcttcctggccgggcgtggtggctcctgcctgtaatcccagcactttgggaggccgaggtgggcggatcacctgaggtcgggagtttgagaccagcctgaccaacatggagaaacccagtctctactgaaaatacagaaaagttagccaggcgtggtggcacatgcctgtaatcccagctgctcaggaggctgaggcaggagaattgcttgaacccaagaggcggaggttgtggtgagccgagattgcacctttgtactccagcctgggcaacgagcaaaaaactctgtctcaaaaaaaaaaaaaaaaaaaaaaaagaaaaagaaaaatggcttccaggacagagcatgctcatttgctggcggacagttccagaaacagaccctgttagtccttctacttacctgctggatttttcaagcactaaatttataactttttgaaacaaaataatgtgtaattttccatttgggggcaaactctattcttgtgagcattattaaatcttgtttgtaaatatattgtctttctcttaatatttgctctgggtcaggaagaagctgttcacggtgtgataatactctttagattgtgctttcattattatagatgcatcatgtcttctgctttcacgtgtctgggatggggtcagaaatgcatcctccagctgacagaaaaatccaggatgagatcagaaggatactggtgttttctgacttttacaaaattacttgtttgttttcattaaaaaaaaagcataaactatgtttcttattactattagaattattaaatttcaaaatg

SEQ ID NO: 119527 - DNA, 4661 bp, Homo sapiens
  Payload ID: 3426
  Gene Symbol: C9orf84
  Gene Name: chromosome 9 open reading frame 84
  Uniprot ID: Q5VXU9
  ENST ID: ENST00000318737
  CDS Start-End: 130-4464
aaagaagaaagtgcttcaagaaggaagtagtagtccaatgtgttgggctcctgttaaaagctcaagttatgtgaggatagtgagttgaccattagcttgactaaattctcagctgtttcagttccgggaatgacagatacctcagtcttggaccaatggaaagcaagtttctttgtggaggatttccttgagaaaaaaacaattacaagaatggtgacccagattaattgtgaatttgaggaagttgttccaagttcaaatccagactcccaaattgaagtagaggaggtcagtttatacacccacatggactacaatgaagtctttacccctgtcagttgtttagaaaaatgttcagcacttcaaaaccagaaccaagatttatttattgatgataaaggaatactttttgtaagtagtagaaaacacctaccaactttgcctactctcttgagtagactaaaactgtttttggtaaaggatcctcttttagatttcaaaggacagatcttcacagaagctaatttttccagggaatgtttctctcttcaagaaactttggaagcttttgtgaaagaagatttttgtatggataaagtgaacttttgtcaagagaaactagaagatacaatatgtttaaatgagccgtcaagttttcttattgagtatgaattcttaatacctccaagcctcaaaccagaaattgatattccatcactctcagaactgaaggagttattaaacccagtgccagaaataataaactatgtagatgaaaaggaaaagctttttgaaagagatcttactaacaagcatggaattgaggatatcggggatataaaattcagctccacagagattttgaccattcaaagccagagtgaaccagaagagtgcagtaaaccaggagagttagaaatgccactaactcctctattcctaacatgccaacattcttcagtgaattcattacgtacagaacttcagacatttccattatctccggtttgtaaaattaatttgcttactgctgaagaatcagctaatgaatactacatgatgtggcaattagaaagatgtagaagccctttgaacccatttttgcttacagtgccaagaattcaagagccccacagccaatattcagttacagatttgaaaaagatattttctgttaaagaagaaagccttgtgattaatctggaaaaggcagagtggtggaaacaagcaggactaaatctgaaaatgatggaaacattggaacatctgaatacatatttatgtcatgataatttgtcttctaatgacactaaaattgagatatttttgcctacgaaagtgcttcaattagaatcatgtctagaacataaaagtcattcttcacctattgcacttattgatgaaaaatctacaaatgctcatttatcacttccacaaaagagtccatctctggcaaaagaagtaccagatctatgtttttctgatgactatttctctgataaaggagcagcaaaagaagaaaaaccaaagaatgaccaagaaccagtaaacagaataatccaaaagaaagaaaataacgatcactttgaacttgactgcacaggaccatctattaaatcaccttcctcttcaataattaaaaaagcatcttttgaacatggcaaaaaacaagagaatgatttggaccttttgagcgactttattatgctgcgaaataaatataagacttgcacctcaaagactgaagtcacaaacagtgatgaaaaacatgataaagaagcatgttctttgacacttcaagaagaaagtcctattgttcatattaataaaaccctggaggaaataaatcaggaaaggggaacagatagtgtcattgaaattcaagcgtcagatagccagtgccaagcattttgcctcctcgaagcagcagcttctcctatcttaaaaaaccttgtatccttgtgtaccctccctactgctaattggaaatttgccactgttatttttgaccaaacaaggtttctcttaaaggaacaagaaaaagtagtaagtgatgctgttcgccaaggtacaattgatgaaagagaaatgactttcaagcatgccgctctcttacatcttctggtaacaattagagatgtccttttaacatgcagcttggacacagcattgggatatttgtcgaaggcaaaagatatctacaacagcattttaggcccctatttgggtgacatttggagacagctggagattgtacagtttattagggggaaaaagcctgaaaccaactacaagatacaagaattgcaatgtcagatactaagttggatgcaaagtcaacagcaaattaaggtactgattataataagaatggactcagacggtgaaaaacattttctcattaaaattcttaacaaaatagaaggtttaacactgactgtccttcattcaaatgaaagaaaagattttctggaatctgaaggtgttttaaggggtacaagttcctgtgtagttgtacataatcaatatattggagcagatttcccctggagtaatttctcatttgtggtggaatacaattatgtggaagactcttgttggactaaacactgcaaagagttgaatattccttacatggcctttaaagtgattcttccagacacagttttagaaagaagcaccttgctggatagatttggaggttttcttttggaaattcagattccatatgtgttttttgcatctgaaggacttcttaatactccagacatacttcagctgctagaatccaactataacatctcactagtagagagaggctgcagtgagtcattgaaactctttggaagttcagagtgttatgtagtggtgacaattgatgaacacactgccataattttgcaggatctagaagaattgaattatgagaaggcatcagacaatatcattatgaggctgatggcattatcattacagtacagatattgttggataattttatataccaaagaaacattaaattcagagtatctgcttacagaaaagacacttcatcacctagcactgatttatgcagctttggtttcatttgggctaaactctgaagaactggatgtaaagcttataattgccccaggagtagaagcaactgccttgataattcgacaaattgctgaccacagtttaatgacctcaaagagagatcctcatgaatggttggataaatcctggcttaaagtttcaccatctgaggaagaaatgtacttacttgattttccatgtattaacccattggtggctcagctcatgctaaataaaggaccttcactgcattggatattattagcaactctgtgtcaacttcaggaactcctacctgaagtcccagaaaaagtgttaaagcatttttgtagcatcacttccctattcaagattggttcttcttccataacaaaatcaccgcaaatttcgtcacctcaggaaaataggaatcagattagtaccttgtcttctcaaagttcagcttctgatttagactctgtcattcaagaacataatgaatattatcagtatttaggattaggagagacagtgcaggaagacaaaaccaccattttgaatgacaactcttccattatggaactaaaagaaatctcaagttttttaccacctgtgacttcatacaatcagaccagctactggaaagactccagctgtaaatctaatatagggcagaatactccttttctaattaatatagaatcaaggagaccggcttataactcctttctaaaccacagtgattcagagtcagatgtcttttctttgggtctaacacaaatgaactgtgaaactataaaatcaccaactgacactcagaagagagtgtcagttgtcccccgttttataaattctcagaaaaggagaacacatgaagcaaaaggtttcataaataaagatgtatcggaccctatcttttcactagagggcactcaatctcctcttcattggaactttaagaaaaatatatgggaacaagagaatcacccgttcaacttacaatatggtgcacagcagactgcatgtaacaaattgtactctcagaaaggtaatttattcactgatcagcaaaaatgtctatcagatgagtctgaaggcctcacatgtgaaagttcaaaagatgagactttctggagagaattaccatctgtccccagtttggatttatttcgtgcttctgattctaatgcaaatcaaaaagaattcaacagcctttatttctaccaaagagctggaaaaagtttaggacagaaaaggcaccatgaatcttcatttaactcaggagacaaggaatcattaacaggttttatgtgctcacaactaccacaattcaaaaaacgacgtctagcatatgaaaaagtccctggtagagttgatgggcagactcggctgaggtttttttgaaggaggagaagagcaatgttacatgccatattccactgtttttgatgctaatccactagcgcaattatttagatttgctcatacactaaagaaaacacaattgttcatatatgtctcagtatttctgtattaaatattcataatatgtattctgccctatggtttgcatctttgtaagttaaatattctaatttatc

SEQ ID NO: 119528 - DNA, 1973 bp, Homo sapiens
  Payload ID: 3426
  Gene Symbol: C9orf84
  Gene Name: chromosome 9 open reading frame 84
  Uniprot ID: Q5VXU9
  ENST ID: ENST00000374283
  CDS Start-End: 146-1612
ggggcctggtctggccaatggaagcacagagtgcaggctcagtggtcacgtgtccagcgggcgggaattttaccccaggaagagatgcaggaggcgatttttacctcagatgttgaaatttacactgctttgaaagaaagaagatatgttttcagcattgaaatatcatgcaatagactatttatatgagaatgtggttagaaagaagttttacagagatgctttattgcttcgaatcccttcatgtttatatcaagatgaaagttaccatgtagcagttactgataataaatttaggaggccatggacgagagtctcagctgtttcagttccgggaatgacagatacctcagtcttggaccaatggaaagcaagtttctttgtggaggatttccttgagaaaaaaacaattacaagaatggtgacccagattaattgtgaatttgaggaagttgttccaagttcaaatccagactcccaaattgaagtagaggaggtcagtttatacacccacatggactacaatgaagtctttacccctgtcagttgtttagaaaaatgttcagcacttcaaaaccagaaccaagatttatttattgatgataaaggaatactttttgtaagtagtagaaaacacctaccaactttgcctactctcttgagtagactaaaactgtttttggtaaaggatcctcttttagatttcaaaggacagatcttcacagaagctaatttttccagggaatgtttctctcttcaagaaactttggaagcttttgtgaaagaagatttttgtatggataaagtgaacttttgtcaagagaaactagaagatacaatatgtttaaatgagccgtcaagttttcttattgagtatgaattcttaatacctccaagcctcaaaccagaaattgatattccatcactctcagaactgaaggagttattaaacccagtgccagaaataataaactatgtagatgaaaaggaaaagctttttgaaagagatcttactaacaagcatggaattgaggatatcggggatataaaattcagctccacagagattttgaccattcaaagccagagtgaaccagaagagtgcagtaaaccaggagagttagaaatgccactaactcctctattcctaacatgccaacattcttcagtgaattcattacgtacagaacttcagacatttccattatctccggtttgtaaaattaatttgcttactgctgaagaatcagctaatgaatactacatgatgtggcaattagaaagatgtagaagccctttgaacccatttttgcttacagtgccaagaattcaagagccccacagccaatattcagttacagatttgaaaaagatattttctgttaaagaagaaagccttgtgattaatctggaaaaggcagagtggtggaaacaagcaggactaaatctgaaaatgatggaaacattggaacatctgaatacatatttatgtcatgataatttgtcttctaatgacactaaaattgagatatttttgcctacgaaagtgcttcaattagaatgtaagtacatcacagtaaatattagttatgtaaacattttcagaatgtgaaaatgttagattctggatttcctctaggtaattgggaaaatcactaggttctagcattccatataggccctggctctgccagaatttatgactttggatttctctaggtcccattttcttgaaaaaatgatgaagtttgactagctaaccctaaaatcttgttatgtcctaaaattctatagtctcagtttttaaatttctagccattttcatttaaagtgactttgtttccttttataaatgattaaattgctagcagtttccgttcacattggcctagacgcaaaccagcattttgcagtaactgttttttgacctaacagctgaacattagcattcaataatatcactctttaacaat

SEQ ID NO: 119529 - DNA, 4721 bp, Homo sapiens
  Payload ID: 3426
  Gene Symbol: C9orf84
  Gene Name: chromosome 9 open reading frame 84
  Uniprot ID: Q5VXU9
  ENST ID: ENST00000374287
  CDS Start-End: 136-4470
atttgtgaataaataaagataaaatcataatgtaaaaggtgaatgtttggcttccttgaattaagtgtaaaagaaaattctagacattaatgttaactattatcctttctagtctcagctgtttcagttccgggaatgacagatacctcagtcttggaccaatggaaagcaagtttctttgtggaggatttccttgagaaaaaaacaattacaagaatggtgacccagattaattgtgaatttgaggaagttgttccaagttcaaatccagactcccaaattgaagtagaggaggtcagtttatacacccacatggactacaatgaagtctttacccctgtcagttgtttagaaaaatgttcagcacttcaaaaccagaaccaagatttatttattgatgataaaggaatactttttgtaagtagtagaaaacacctaccaactttgcctactctcttgagtagactaaaactgtttttggtaaaggatcctcttttagatttcaaaggacagatcttcacagaagctaatttttccagggaatgtttctctcttcaagaaactttggaagcttttgtgaaagaagatttttgtatggataaagtgaacttttgtcaagagaaactagaagatacaatatgtttaaatgagccgtcaagttttcttattgagtatgaattcttaatacctccaagcctcaaaccagaaattgatattccatcactctcagaactgaaggagttattaaacccagtgccagaaataataaactatgtagatgaaaaggaaaagctttttgaaagagatcttactaacaagcatggaattgaggatatcggggatataaaattcagctccacagagattttgaccattcaaagccagagtgaaccagaagagtgcagtaaaccaggagagttagaaatgccactaactcctctattcctaacatgccaacattcttcagtgaattcattacgtacagaacttcagacatttccattatctccggtttgtaaaattaatttgcttactgctgaagaatcagctaatgaatactacatgatgtggcaattagaaagatgtagaagccctttgaacccatttttgcttacagtgccaagaattcaagagccccacagccaatattcagttacagatttgaaaaagatattttctgttaaagaagaaagccttgtgattaatctggaaaaggcagagtggtggaaacaagcaggactaaatctgaaaatgatggaaacattggaacatctgaatacatatttatgtcatgataatttgtcttctaatgacactaaaattgagatatttttgcctacgaaagtgcttcaattagaatcatgtctagaacataaaagtcattcttcacctattgcacttattgatgaaaaatctacaaatgctcatttatcacttccacaaaagagtccatctctggcaaaagaagtaccagatctatgtttttctgatgactatttctctgataaaggagcagcaaaagaagaaaaaccaaagaatgaccaagaaccagtaaacagaataatccaaaagaaagaaaataacgatcactttgaacttgactgcacaggaccatctattaaatcaccttcctcttcaataattaaaaaagcatcttttgaacatggcaaaaaacaagagaatgatttggaccttttgagcgactttattatgctgcgaaataaatataagacttgcacctcaaagactgaagtcacaaacagtgatgaaaaacatgataaagaagcatgttctttgacacttcaagaagaaagtcctattgttcatattaataaaaccctggaggaaataaatcaggaaaggggaacagatagtgtcattgaaattcaagcgtcagatagccagtgccaagcattttgcctcctcgaagcagcagcttctcctatcttaaaaaaccttgtatccttgtgtaccctccctactgctaattggaaatttgccactgttatttttgaccaaacaaggtttctcttaaaggaacaagaaaaagtagtaagtgatgctgttcgccaaggtacaattgatgaaagagaaatgactttcaagcatgccgctctcttacatcttctggtaacaattagagatgtccttttaacatgcagcttggacacagcattgggatatttgtcgaaggcaaaagatatctacaacagcattttaggcccctatttgggtgacatttggagacagctggagattgtacagtttattagggggaaaaagcctgaaaccaactacaagatacaagaattgcaatgtcagatactaagttggatgcaaagtcaacagcaaattaaggtactgattataataagaatggactcagacggtgaaaaacattttctcattaaaattcttaacaaaatagaaggtttaacactgactgtccttcattcaaatgaaagaaaagattttctggaatctgaaggtgttttaaggggtacaagttcctgtgtagttgtacataatcaatatattggagcagatttcccctggagtaatttctcatttgtggtggaatacaattatgtggaagactcttgttggactaaacactgcaaagagttgaatattccttacatggcctttaaagtgattcttccagacacagttttagaaagaagcaccttgctggatagatttggaggttttcttttggaaattcagattccatatgtgttttttgcatctgaaggacttcttaatactccagacatacttcagctgctagaatccaactataacatctcactagtagagagaggctgcagtgagtcattgaaactctttggaagttcagagtgttatgtagtggtgacaattgatgaacacactgccataattttgcaggatctagaagaattgaattatgagaaggcatcagacaatatcattatgaggctgatggcattatcattacagtacagatattgttggataattttatataccaaagaaacattaaattcagagtatctgcttacagaaaagacacttcatcacctagcactgatttatgcagctttggtttcatttgggctaaactctgaagaactggatgtaaagcttataattgccccaggagtagaagcaactgccttgataattcgacaaattgctgaccacagtttaatgacctcaaagagagatcctcatgaatggttggataaatcctggcttaaagtttcaccatctgaggaagaaatgtacttacttgattttccatgtattaacccattggtggctcagctcatgctaaataaaggaccttcactgcattggatattattagcaactctgtgtcaacttcaggaactcctacctgaagtcccagaaaaagtgttaaagcatttttgtagcatcacttccctattcaagattggttcttcttccataacaaaatcaccgcaaatttcgtcacctcaggaaaataggaatcagattagtaccttgtcttctcaaagttcagcttctgatttagactctgtcattcaagaacataatgaatattatcagtatttaggattaggagagacagtgcaggaagacaaaaccaccattttgaatgacaactcttccattatggaactaaaagaaatctcaagttttttaccacctgtgacttcatacaatcagaccagctactggaaagactccagctgtaaatctaatatagggcagaatactccttttctaattaatatagaatcaaggagaccggcttataactcctttctaaaccacagtgattcagagtcagatgtcttttctttgggtctaacacaaatgaactgtgaaactataaaatcaccaactgacactcagaagagagtgtcagttgtcccccgttttataaattctcagaaaaggagaacacatgaagcaaaaggtttcataaataaagatgtatcggaccctatcttttcactagagggcactcaatctcctcttcattggaactttaagaaaaatatatgggaacaagagaatcacccgttcaacttacaatatggtgcacagcagactgcatgtaacaaattgtactctcagaaaggtaatttattcactgatcagcaaaaatgtctatcagatgagtctgaaggcctcacatgtgaaagttcaaaagatgagactttctggagagaattaccatctgtccccagtttggatttatttcgtgcttctgattctaatgcaaatcaaaaagaattcaacagcctttatttctaccaaagagctggaaaaagtttaggacagaaaaggcaccatgaatcttcatttaactcaggagacaaggaatcattaacaggttttatgtgctcacaactaccacaattcaaaaaacgacgtctagcatatgaaaaagtccctggtagagttgatgggcagactcggctgaggtttttttgaaggaggagaagagcaatgttacatgccatattccactgtttttgatgctaatccactagcgcaattatttagatttgctcatacactaaagaaaacacaattgttcatatatgtctcagtatttctgtattaaatattcataatatgtattctgccctatggtttgcatctttgtaagttaaatattctaatttatcaattagcagaataattatcataagatccaaaatgtcttccagacacccctgcac

SEQ ID NO: 119530 - DNA, 4955 bp, Homo sapiens
  Payload ID: 3426
  Gene Symbol: C9orf84
  Gene Name: chromosome 9 open reading frame 84
  ENST ID: ENST00000394777
  CDS Start-End: 246-4358
agacagctagccaagattctaaagaaacccagacaaggcagggtggagaccgagaggagaaatttattccagaaattaactgttagcagtagtgtttcttaatacataagctatatcatactcctcaagtagattctttgcttaaaactttcactgtaaataattttatagcaaccatgtgaataacttaagaataatagaatcagtctcatttgtaggcactgtagaccatctccattccctacatgtcagagactctgggggatgaattggagatattaagaggtaaaatgatgcagagaagaccaaggtcagcagaagtcaaatacttctatttctttaaaattttgcttaggctacgcctggctattttgaagtatttatttattgatgataaaggaatactttttgtaagtagtagaaaacacctaccaactttgcctactctcttgagtagactaaaactgtttttggtaaaggatcctcttttagatttcaaaggacagatcttcacagaagctaatttttccagggaatgtttctctcttcaagaaactttggaagcttttgtgaaagaagatttttgtatggataaagtgaacttttgtcaagagaaactagaagatacaatatgtttaaatgagccgtcaagttttcttattgagtatgaattcttaatacctccaagcctcaaaccagaaattgatattccatcactctcagaactgaaggagttattaaacccagtgccagaaataataaactatgtagatgaaaaggaaaagctttttgaaagagatcttactaacaagcatggaattgaggatatcggggatataaaattcagctccacagagattttgaccattcaaagccagagtgaaccagaagagtgcagtaaaccaggagagttagaaatgccactaactcctctattcctaacatgccaacattcttcagtgaattcattacgtacagaacttcagacatttccattatctccggtttgtaaaattaatttgcttactgctgaagaatcagctaatgaatactacatgatgtggcaattagaaagatgtagaagccctttgaacccatttttgcttacagtgccaagaattcaagagccccacagccaatattcagttacagatttgaaaaagatattttctgttaaagaagaaagccttgtgattaatctggaaaaggcagagtggtggaaacaagcaggactaaatctgaaaatgatggaaacattggaacatctgaatacatatttatgtcatgataatttgtcttctaatgacactaaaattgagatatttttgcctacgaaagtgcttcaattagaatcatgtctagaacataaaagtcattcttcacctattgcacttattgatgaaaaatctacaaatgctcatttatcacttccacaaaagagtccatctctggcaaaagaagtaccagatctatgtttttctgatgactatttctctgataaaggagcagcaaaagaagaaaaaccaaagaatgaccaagaaccagtaaacagaataatccaaaagaaagaaaataacgatcactttgaacttgactgcacaggaccatctattaaatcaccttcctcttcaataattaaaaaagcatcttttgaacatggcaaaaaacaagagaatgatttggaccttttgagcgactttattatgctgcgaaataaatataagacttgcacctcaaagactgaagtcacaaacagtgatgaaaaacatgataaagaagcatgttctttgacacttcaagaagaaagtcctattgttcatattaataaaaccctggaggaaataaatcaggaaaggggaacagatagtgtcattgaaattcaagcgtcagatagccagtgccaagcattttgcctcctcgaagcagcagcttctcctatcttaaaaaaccttgtatccttgtgtaccctccctactgctaattggaaatttgccactgttatttttgaccaaacaaggtttctcttaaaggaacaagaaaaagtagtaagtgatgctgttcgccaaggatatttgtcgaaggcaaaagatatctacaacagcattttaggcccctatttgggtgacatttggagacagctggagattgtacagtttattagggggaaaaagcctgaaaccaactacaagatacaagaattgcaatgtcagatactaagttggatgcaaagtcaacagcaaattaaggtactgattataataagaatggactcagacggtgaaaaacattttctcattaaaattcttaacaaaatagaaggtttaacactgactgtccttcattcaaatgaaagaaaagattttctggaatctgaaggtgttttaaggggtacaagttcctgtgtagttgtacataatcaatatattggagcagatttcccctggagtaatttctcatttgtggtggaatacaattatgtggaagactcttgttggactaaacactgcaaagagttgaatattccttacatggcctttaaagtgattcttccagacacagttttagaaagaagcaccttgctggatagatttggaggttttcttttggaaattcagattccatatgtgttttttgcatctgaaggacttcttaatactccagacatacttcagctgctagaatccaactataacatctcactagtagagagaggctgcagtgagtcattgaaactctttggaagttcagagtgttatgtagtggtgacaattgatgaacacactgccataattttgcaggatctagaagaattgaattatgagaaggcatcagacaatatcattatgaggctgatggcattatcattacagtacagatattgttggataattttatataccaaagaaacattaaattcagagtatctgcttacagaaaagacacttcatcacctagcactgatttatgcagctttggtttcatttgggctaaactctgaagaactggatgtaaagcttataattgccccaggagtagaagcaactgccttgataattcgacaaattgctgaccacagtttaatgacctcaaagagagatcctcatgaatggttggataaatcctggcttaaagtttcaccatctgaggaagaaatgtacttacttgattttccatgtattaacccattggtggctcagctcatgctaaataaaggaccttcactgcattggatattattagcaactctgtgtcaacttcaggaactcctacctgaagtcccagaaaaagtgttaaagcatttttgtagcatcacttccctattcaagattggttcttcttccataacaaaatcaccgcaaatttcgtcacctcaggaaaataggaatcagattagtaccttgtcttctcaaagttcagcttctgatttagactctgtcattcaagaacataatgaatattatcagtatttaggattaggagagacagtgcaggaagacaaaaccaccattttgaatgacaactcttccattatggaactaaaagaaatctcaagttttttaccacctgtgacttcatacaatcagaccagctactggaaagactccagctgtaaatctaatatagggcagaatactccttttctaattaatatagaatcaaggagaccggcttataactcctttctaaaccacagtgattcagagtcagatgtcttttctttgggtctaacacaaatgaactgtgaaactataaaatcaccaactgacactcagaagagagtgtcagttgtcccccgttttataaattctcagaaaaggagaacacatgaagcaaaaggtttcataaataaagatgtatcggaccctatcttttcactagagggcactcaatctcctcttcattggaactttaagaaaaatatatgggaacaagagaatcacccgttcaacttacaatatggtgcacagcagactgcatgtaacaaattgtactctcagaaaggtaatttattcactgatcagcaaaaatgtctatcagatgagtctgaaggcctcacatgtgaaagttcaaaagatgagactttctggagagaattaccatctgtccccagtttggatttatttcgtgcttctgattctaatgcaaatcaaaaagaattcaacagcctttatttctaccaaagagctggaaaaagtttaggacagaaaaggcaccatgaatcttcatttaactcaggagacaaggaatcattaacaggttttatgtgctcacaactaccacaattcaaaaaacgacgtctagcatatgaaaaagtccctggtagagttgatgggcagactcggctgaggtttttttgaaggaggagaagagcaatgttacatgccatattccactgtttttgatgctaatccactagcgcaattatttagatttgctcatacactaaagaaaacacaattgttcatatatgtctcagtatttctgtattaaatattcataatatgtattctgccctatggtttgcatctttgtaagttaaatattctaatttatcaattagcagaataattatcataagatccaaaatgtcttccagacacccctgcacacaggccatttaaatgagtctccatcacagtctgaccctttgagtcaggaagtgaagatcatcacagttaaccctcccacatcaagaaagttaaaacctaggacaaaattgaagttagaaaacttccaacttaaagtatcattttctgtaaacacaatttaagaacaaattactaagaggaaatatttgcaacccagataataggaaaaaaagtttacatttctcatatataaagaattcctacaaattgatagaaagaagacaacctgatagaagaacgggcaaaatatatgaacagatatttcctcagaaaaaaacaaaaattgtcaataaacatttgaaacac

SEQ ID NO: 119531 - DNA, 5060 bp, Homo sapiens
  Payload ID: 3426
  Gene Symbol: C9orf84
  Gene Name: chromosome 9 open reading frame 84
  Uniprot ID: Q5VXU9
  ENST ID: ENST00000394779
  CDS Start-End: 246-4463
agacagctagccaagattctaaagaaacccagacaaggcagggtggagaccgagaggagaaatttattccagaaattaactgttagcagtagtgtttcttaatacataagctatatcatactcctcaagtagattctttgcttaaaactttcactgtaaataattttatagcaaccatgtgaataacttaagaataatagaatcagtctcatttgtaggcactgtagaccatctccattccctacatgtcagagactctgggggatgaattggagatattaagaggtaaaatgatgcagagaagaccaaggtcagcagaagtcaaatacttctatttctttaaaattttgcttaggctacgcctggctattttgaagtatttatttattgatgataaaggaatactttttgtaagtagtagaaaacacctaccaactttgcctactctcttgagtagactaaaactgtttttggtaaaggatcctcttttagatttcaaaggacagatcttcacagaagctaatttttccagggaatgtttctctcttcaagaaactttggaagcttttgtgaaagaagatttttgtatggataaagtgaacttttgtcaagagaaactagaagatacaatatgtttaaatgagccgtcaagttttcttattgagtatgaattcttaatacctccaagcctcaaaccagaaattgatattccatcactctcagaactgaaggagttattaaacccagtgccagaaataataaactatgtagatgaaaaggaaaagctttttgaaagagatcttactaacaagcatggaattgaggatatcggggatataaaattcagctccacagagattttgaccattcaaagccagagtgaaccagaagagtgcagtaaaccaggagagttagaaatgccactaactcctctattcctaacatgccaacattcttcagtgaattcattacgtacagaacttcagacatttccattatctccggtttgtaaaattaatttgcttactgctgaagaatcagctaatgaatactacatgatgtggcaattagaaagatgtagaagccctttgaacccatttttgcttacagtgccaagaattcaagagccccacagccaatattcagttacagatttgaaaaagatattttctgttaaagaagaaagccttgtgattaatctggaaaaggcagagtggtggaaacaagcaggactaaatctgaaaatgatggaaacattggaacatctgaatacatatttatgtcatgataatttgtcttctaatgacactaaaattgagatatttttgcctacgaaagtgcttcaattagaatcatgtctagaacataaaagtcattcttcacctattgcacttattgatgaaaaatctacaaatgctcatttatcacttccacaaaagagtccatctctggcaaaagaagtaccagatctatgtttttctgatgactatttctctgataaaggagcagcaaaagaagaaaaaccaaagaatgaccaagaaccagtaaacagaataatccaaaagaaagaaaataacgatcactttgaacttgactgcacaggaccatctattaaatcaccttcctcttcaataattaaaaaagcatcttttgaacatggcaaaaaacaagagaatgatttggaccttttgagcgactttattatgctgcgaaataaatataagacttgcacctcaaagactgaagtcacaaacagtgatgaaaaacatgataaagaagcatgttctttgacacttcaagaagaaagtcctattgttcatattaataaaaccctggaggaaataaatcaggaaaggggaacagatagtgtcattgaaattcaagcgtcagatagccagtgccaagcattttgcctcctcgaagcagcagcttctcctatcttaaaaaaccttgtatccttgtgtaccctccctactgctaattggaaatttgccactgttatttttgaccaaacaaggtttctcttaaaggaacaagaaaaagtagtaagtgatgctgttcgccaaggtacaattgatgaaagagaaatgactttcaagcatgccgctctcttacatcttctggtaacaattagagatgtccttttaacatgcagcttggacacagcattgggatatttgtcgaaggcaaaagatatctacaacagcattttaggcccctatttgggtgacatttggagacagctggagattgtacagtttattagggggaaaaagcctgaaaccaactacaagatacaagaattgcaatgtcagatactaagttggatgcaaagtcaacagcaaattaaggtactgattataataagaatggactcagacggtgaaaaacattttctcattaaaattcttaacaaaatagaaggtttaacactgactgtccttcattcaaatgaaagaaaagattttctggaatctgaaggtgttttaaggggtacaagttcctgtgtagttgtacataatcaatatattggagcagatttcccctggagtaatttctcatttgtggtggaatacaattatgtggaagactcttgttggactaaacactgcaaagagttgaatattccttacatggcctttaaagtgattcttccagacacagttttagaaagaagcaccttgctggatagatttggaggttttcttttggaaattcagattccatatgtgttttttgcatctgaaggacttcttaatactccagacatacttcagctgctagaatccaactataacatctcactagtagagagaggctgcagtgagtcattgaaactctttggaagttcagagtgttatgtagtggtgacaattgatgaacacactgccataattttgcaggatctagaagaattgaattatgagaaggcatcagacaatatcattatgaggctgatggcattatcattacagtacagatattgttggataattttatataccaaagaaacattaaattcagagtatctgcttacagaaaagacacttcatcacctagcactgatttatgcagctttggtttcatttgggctaaactctgaagaactggatgtaaagcttataattgccccaggagtagaagcaactgccttgataattcgacaaattgctgaccacagtttaatgacctcaaagagagatcctcatgaatggttggataaatcctggcttaaagtttcaccatctgaggaagaaatgtacttacttgattttccatgtattaacccattggtggctcagctcatgctaaataaaggaccttcactgcattggatattattagcaactctgtgtcaacttcaggaactcctacctgaagtcccagaaaaagtgttaaagcatttttgtagcatcacttccctattcaagattggttcttcttccataacaaaatcaccgcaaatttcgtcacctcaggaaaataggaatcagattagtaccttgtcttctcaaagttcagcttctgatttagactctgtcattcaagaacataatgaatattatcagtatttaggattaggagagacagtgcaggaagacaaaaccaccattttgaatgacaactcttccattatggaactaaaagaaatctcaagttttttaccacctgtgacttcatacaatcagaccagctactggaaagactccagctgtaaatctaatatagggcagaatactccttttctaattaatatagaatcaaggagaccggcttataactcctttctaaaccacagtgattcagagtcagatgtcttttctttgggtctaacacaaatgaactgtgaaactataaaatcaccaactgacactcagaagagagtgtcagttgtcccccgttttataaattctcagaaaaggagaacacatgaagcaaaaggtttcataaataaagatgtatcggaccctatcttttcactagagggcactcaatctcctcttcattggaactttaagaaaaatatatgggaacaagagaatcacccgttcaacttacaatatggtgcacagcagactgcatgtaacaaattgtactctcagaaaggtaatttattcactgatcagcaaaaatgtctatcagatgagtctgaaggcctcacatgtgaaagttcaaaagatgagactttctggagagaattaccatctgtccccagtttggatttatttcgtgcttctgattctaatgcaaatcaaaaagaattcaacagcctttatttctaccaaagagctggaaaaagtttaggacagaaaaggcaccatgaatcttcatttaactcaggagacaaggaatcattaacaggttttatgtgctcacaactaccacaattcaaaaaacgacgtctagcatatgaaaaagtccctggtagagttgatgggcagactcggctgaggtttttttgaaggaggagaagagcaatgttacatgccatattccactgtttttgatgctaatccactagcgcaattatttagatttgctcatacactaaagaaaacacaattgttcatatatgtctcagtatttctgtattaaatattcataatatgtattctgccctatggtttgcatctttgtaagttaaatattctaatttatcaattagcagaataattatcataagatccaaaatgtcttccagacacccctgcacacaggccatttaaatgagtctccatcacagtctgaccctttgagtcaggaagtgaagatcatcacagttaaccctcccacatcaagaaagttaaaacctaggacaaaattgaagttagaaaacttccaacttaaagtatcattttctgtaaacacaatttaagaacaaattactaagaggaaatatttgcaacccagataataggaaaaaaagtttacatttctcatatataaagaattcctacaaattgatagaaagaagacaacctgatagaagaacgggcaaaatatatgaacagatatttcctcagaaaaaaacaaaaattgtcaataaacatttgaaacac

SEQ ID NO: 119532 - DNA, 1279 bp, Homo sapiens
  Payload ID: 3427
  Gene Symbol: C9orf85
  Gene Name: chromosome 9 open reading frame 85
  Uniprot ID: Q96MD7
  ENST ID: ENST00000334731
  CDS Start-End: 191-664
gggagggcagagcgatgctctttgacctcccagaagagtcacgtgggctgacccagagccggggcggaaaggctgcgtttgtttcttccgggtcattgacagaagcgtcaattcctgggagtagttcgttggttttctttcccctcatccttttgcctgctcccggcgaggggtggctttgatttcggcgatgagctcccagaaaggcaacgtggctcgttccagacctcagaagcaccagaatacgtttagcttcaaaaatgacaagttcgataaaagtgtgcagaccaagaaaattaatgcaaaacttcatgatggagtatgtcagcgctgtaaagaagttcttgagtggcgtgtaaaatacagcaaatacaaaccattatcaaaacctaaaaagtgtgttaaatgtttacaaaagacagtgaaggattcttatcacataatgtgcaggccatgtgcctgtgaacttgaagtttgcgcaaaatgtggaaagaaagaagacattgttattccgttgaataaagaaacagaaaaaatagaacatactgaaaataatctaagttccaaccatagaagaagctgcagaagaaatgaagaaagtgatgatgatttagattttgatattgatttagaagacacaggaggagaccatcaaatgaattaatatcactgtattaaaagtctgccgggcacagtggctcacgcctgtaatcccaacactttgggaggccaaggagggtggatcacctgaggtcaggagttcgagaccagcctggccaacatggcggaaccccatctccactaaaagtacaaaaaattagctgggcgtggtggctcatgcctgtaatcccagctactcaggaggctgaggcaggaggattgcttgaaccctggaggcggagattgaagtgagctgagttcgtgccattacactccagcctgggtgacagagtgagactctgtctcaaaaaaaataaaataaaaagtcaatttagaatgtgaaattctgaccaccttttggctttgagtattttccaaaagatatttgaaatcctaatgaggaaatcagaaaaagctatggaaaaatagacaaatttcatacatgaacaatataaattgtgtatattacttaacatcaaactaaacaagattcagaattgatggttgtataagaactagctcatgtaaaaataaaataacattattacattgcctcaaaaattggtcctcggtaagtgccttttgataaatgatctcaaataaatgactcatagcaaaa

SEQ ID NO: 119533 - DNA, 539 bp, Homo sapiens
  Payload ID: 3427
  Gene Symbol: C9orf85
  Gene Name: chromosome 9 open reading frame 85
  ENST ID: ENST00000377027
  CDS Start-End: 1-68
aaaatgacaagttcgataaaagtgtgcagaccaagtctttatctgcaaactctagtcatgatgtttgagtttgtctccctgtggagcaggggtccccagcccccgacccccgcatcggtccatggcctgtcaggaactgggccacacagcaggagttgaactgcagaaaattaatgcaaaacttcatgatggagtatgtcagcgctgtaaagaagttcttgagtggcgtgtaaaatacagcaaatacaaaccattatcaaaacctaaaaagtgtgttaaatgtttacaaaagacagtgaaggattcttatcacataatgtgcaggccatgtgcctgtgaacttgaagtttgcgcaaaatgtggaaagaaagaagacattgttattccgttgaataaagaaacagaaaaaatagaacatactgaaaataatctaagttccaaccatagaagaagctgcagaagaaatgaagaaagtgatgatgatttagattttgatattgatttagaagacacaggaggagaccatcaaatgaattaat

SEQ ID NO: 119534 - DNA, 1107 bp, Homo sapiens
  Payload ID: 3427
  Gene Symbol: C9orf85
  Gene Name: chromosome 9 open reading frame 85
  Uniprot ID: Q96MD7
  ENST ID: ENST00000377031
  CDS Start-End: 191-730
gggagggcagagcgatgctctttgacctcccagaagagtcacgtgggctgacccagagccggggcggaaaggctgcgtttgtttcttccgggtcattgacagaagcgtcaattcctgggagtagttcgttggttttctttcccctcatccttttgcctgctcccggcgaggggtggctttgatttcggcgatgagctcccagaaaggcaacgtggctcgttccagacctcagaagcaccagaatacgtttagcttcaaaaatgacaagttcgataaaagtgtgcagaccaagaaaattaatgcaaaacttcatgatggagtatgtcagcgctgtaaagaagttcttgagtggcgtgtaaaatacagcaaatacaaaccattatcaaaacctaaaaagtgtgttaaatgtttacaaaagacagtgaaggattcttatcacataatgtgcaggccatgtgcctgtgaacttgaagtttgcgcaaaatgtggaaagaaagaagacattgttattccatggagtctccctctgttgcccaggctggagtgcagtggcaggatcttggctcaccacaacctccgcctcccttgttcaagtgattctcctgcctcagcctctcgagtagctgggactacaggcgcacaccaccatgcccagctaatctttgtatttttagtagagatggggtttcactatgttggccaggccggtctcgaactcctgacctcatgatctgcctgcctcaacctcccaaagtgctggaattacaggtgtgagccatcatgcctggcctaatttgtatatttctaatgactcatgatgttgactgagcatcttttcttttcttttctttttttttttccttgttttttgagatggagtcttgctctatagcccgggctggagtgcagtggcaccatttcagctcaatgcaacctctgcctcctaggttcaagtgattctcctgcctcagcctcccgagtagctgggattacaggcacacaccaccatgcccagctaatttttgtatttttagtagaaacaggttttcacaatgttggccaggatggtctccatctactgaccttgtgatccgcccccctaggcct

SEQ ID NO: 119535 - DNA, 3321 bp, Homo sapiens
  Payload ID: 3427
  Gene Symbol: C9orf85
  Gene Name: chromosome 9 open reading frame 85
  ENST ID: ENST00000486911
  CDS Start-End: 75-284
gggagtagttcgttggttttctttcccctcatccttttgcctgctcccggcgaggggtggctttgatttcggcgatgagctcccagaaaggcaacgtggctcgttccagacctcagaagcaccagaatacgtttagcttcaaaaatgacaagttcgataaaagtgtgcagaccaagaaaattaatgcaaaacttcatgatggagtatgtcagcgctgtaaagaagttcttgagtggcgtgtaaaatacagcaaatacaaaccattatcaaaacctaaaaagtgatggagtcttgctctatagcccgggctggagtgcagtggcaccatttcagctcaatgcaacctctgcctcctaggttcaagtgattctcctgcctcagcctcccgagtagctgggattacaggcacacaccaccatgcccagctaatttttgtatttttagtagaaacaggttttcacaatgttggccaggatggtctccatctactgaccttgtgatccgcccccctaggcctcccaaagtgctgggcttacaggcatgagccactgcacccagccgactgaacatcttttcatgtgtttattagccaatcctatatcttcactggtgaaatgtctattcagatgtgttgcccattttaaaaattgggttgttttcttaccattgagttatgagtcttttatatatattctagatacaagtcctttatcagatataatttggaaatattttctcgctgtctgtaatgtgttatacatcaattttgagatatccttcacattaagaaactaacggtgtggataataatcctggtattgacagaggtttggactcctgaagcctgaaagtctatctgctgccacgcctgggcacatactgcatcatttacaaaactgtagagcacctgttgtgtgtgcagttgtgatttcttatagatttttagaattggaaggcatgtaaagaacacgtaatctggtacattgcttcagtaggtaagtcagtatgaacttctaagaatttttgttttcttctgtattgggtctattgtgggtatgtccaacgtgacaggggaggtaagggaagtggcatcccctgagatagtgactgaaatggctttcatcatctttaagtcaaagtgagatgccagtaataggatatatgtatgtatgtacttgtgtctctgtatgtatgtaaataaacaaacatgctggaaggaggaggtgattcaatcagggactttgtgaaagaaaaaaagaataactggaccttcctttaatgatgaaaactgtttatacagcaaaccatcaaagccaaaatgtgaattttggtattagcccgatttttcctaagaaactgttgatgtaaccactgtagttgcagagatcgttttggtatattctagaccctctttgttttgttctgtttggggtttcttccccctcaagttgctcttgtccaccactagactggctgccttttattccatagcagacagtccttaagtctttgcatatgtccttattcaaaaattaatcttcatcagtttttttctgcagaaaacagttttttaaatatcttacatgagaatgctctgcacctgcaatctctggttgatgcagtttcctttctctcttctctgttcccattggtagaataaatctgctccttcttaaatcctgagctgaaaatgtccacacttcccagaagtgtactttagaatcacctgtaacatgtatttaaaatacagattccccagctccacgggcaaagctctcctgccatgtgacaccctgatacagttcagggagccactaaggcaggccaaaatggctcagcaggcaaaggtccaagctgccagggtagtgtgtcattacagcatgcttagcatagctaggaggacaggctcacacccagccccacagctgttgcgctacagactcaggcacagggctgtctaactggcagatgtgggccacaactgttggagacaagccagccatatttgggaaaatcttattgtaaggggcaagtgtgagtgagatttaggagtcatgggaaaatacaccaacacagtaaatcttgtgttataggagagatgtggaagaaagagataaactactggccagggtgtctcctgactgggtgacttgccaccacatgggccaggcaggttgcggcagctctgcctttgggaggtggctggaggaggggaggagagagaggcatgatgaagacagatgcaccctttcctgagcaggggttaacattcagggtgccgaaaggaattccacagcctgtttcccatctctcttgtcctcatcaagtactggtcctcgtgtatgtgttctgcttccgctttctcaggatgtttacgtttttgcaaatacgtttatggaaaagagttacctcacccacctctccaaacatctatttgttttacatttttattgcgggggagtgatctctttacatagcttcaaatggcataacattcagcagtatccaagcttagatatatctgatgagaggaaagtaattgtgaggcctttgttctagttacaactttgtcactatctgactccatgactccagcaaattgcttcaactgtctggcctgcagtttttttcttgcgttaaataacagacttagtctagatcggtggttcttatcatgtggtttctggactagcagcatcaatattacctgggaaacttgttagaaatgcaaattcttgggctctgccctagacctactgaaacatactctgtgggcggggcccagcaatctgtgtttgaaacgcgattctgattatttgacaaaagtttgcaaaccactggtctagataagtagctcttagccttggctgcacattaaaatcatctgggcaacttttataacctaccaatcctggcctcttcctccaaagattctgacttaaatggtttcagatggggaccattgttatgcggttatagccgacgcctaggtgctacctgaggtcttcaaagctaaaggtcagtgtttcccagccgtaaatgcatacctctagacctggccttctcaagccactaggtgttgctataatagagaagaaaaggcattttcagaaccgtctttggatatggatgaggaggaggaaaatgtatttcttagcttctgataagagattattttgttattttaatctgagtgcaatttgctaaatattcatttgcaacttgttaaatttattcaaagaaattaaatgcccataagtgacagaaagaataaagaattgtgatatatatttacaataaaatactctttagcaataaaaa

SEQ ID NO: 119536 - DNA, 902 bp, Homo sapiens
  Payload ID: 3427
  Gene Symbol: C9orf85
  Gene Name: chromosome 9 open reading frame 85
  Uniprot ID: Q96MD7
  ENST ID: ENST00000479413
  CDS Start-End: 226-333
ggctgcgccgcgtggagtggcttggcttaacagcagggagggcagagcgatgctctttgacctcccagaagagtcacgtgggctgacccagagccggggcggaaaggctgcgtttgtttcttccgggtcattgacagaagcgtcaattcctgggagtagttcgttggttttctttcccctcatccttttgcctgctcccggcgaggggtggctttgatttcggcgatgagctcccagaaaggcaacgtggctcgttccagacctcagaagcaccagaatacgtttagcttcaaaaatgacaagttcgataaaagtgtgcagaccaagtgttaaatgtttacaaaagacagtgaaggattcttatcacataatgtgcaggccatgtgcctgtgaacttgaagtttgcgcaaaatgtggaaagaaagaagacattgttattccgttgaataaagaaacagaaaaaatagaacatactgaaaataatctaagttccaaccatagaagaagctgcagaagaaatgaagaaagtgatgatgatttagattttgatattgatttagaagacacaggaggagaccatcaaatgaattaatatcactgtattaaaagtctgccgggcacagtggctcacgcctgtaatcccaacactttgggaggccaaggagggtggatcacctgaggtcaggagttcgagaccagcctggccaacatggcggaaccccatctccactaaaagtacaaaaaattagctgggcgtggtggctcatgcctgtaatcccagctactcaggaggctgaggcaggaggattgcttgaaccctggaggcggagattgaagtgagctgagttcgtgccattacactccagcctgggtgacagagtgagactctgtctcaaaaaaaa

SEQ ID NO: 119537 - DNA, 678 bp, Homo sapiens
  Payload ID: 3427
  Gene Symbol: C9orf85
  Gene Name: chromosome 9 open reading frame 85
  ENST ID: ENST00000473252
  CDS Start-End: 95-229
tgacagaagcgtcaattcctgggagtagttcgttggttttctttcccctcatccttttgcctgctcccggcgaggggtggctttgatttcggcgatgagctcccagaaaggcaacgtggctcgttccagacctcagaagcaccagaatacgtttagcttcaaaaatgacaagttcgataaaagtgtgcagaccaagtctttatctgcaaactctagtcatgatgtttgagtttgtctccctgtggagcaggggtccccagcccccgacccccgcatcggtccatggcctgtcaggaactgggccacacagcaggagttgaactgcaggtgtggtaacagtattgtggttaagcacgagaaggtctttattgctaggatatgatgagtattaagaagtgaagtgtcttgatatccataagttattttacctgtacccatacacacaaaaagcaaaaagaaaattaatgcaaaacttcatgatggagtatgtcagcgctgtaaagaagttcttgagtggcgtgtaaaatacagcaaatacaaaccattatcaaaacctaaaaagtgtgttaaatgtttacaaaagacagtgaaggattcttatcacataatgtgcaggccatgtgcctgtgaacttgaagtttgcgcaaaatgtggaaagaaagaagacattgttattcc

SEQ ID NO: 119538 - DNA, 894 bp, Homo sapiens
  Payload ID: 3428
  Gene Symbol: C9orf9
  Gene Name: chromosome 9 open reading frame 9
  Uniprot ID: Q96E40
  ENST ID: ENST00000350499
  CDS Start-End: 155-661
ctcgcctcccaagtcctggaacgggcctccccaccctccggggcaccgacactcacggagtcactccaacttctctgggtgctccgtggagcgaagagcgctctaggacaagcaaggattcctcttctcctgtaaatgaccacagaggaagacaatgaatgaggtgaaagaatcccttcgcagcatcgagcagaagtacaagctcttccagcagcagcagctcaccttcaccgccgctctggagcactgcagggagaacgcccacgacaagatccggcccatctccagcattggacaggtgcagagctacatggaacactactgcaacagctccacagaccggcgggttctgctcatgttcctggacatctgttcagagctgaataagctctgccagcactttgaggccgtgcactctggcaccccagtcaccaacaacctcctggagaaatgcaaaaccctcgttagccaaagcaacgacttaagcagcctcagagcaaaataccctcatgatgtggtgaaccacctcagctgtgacgaggcccggaaccactacggcggcgtggtcagcctcatccccctcatcctagacttaatgaaagaatggatcgcccactccgagaagttgccgcgcaaggtgctgcagcacgggacgacttagcttctgtattattgttgcttcctcagggggagacagtcaagaataaaaagtattctaccacctctctgcctgacttggtttcctgggatttatccctgaaagaaaacctacatctcccctaagacatcaaaggacactgggcagtaagcctcagcagacagcagagagagaggccaccctaggcaagggggcatgcctgtctcaagtcggcttctaagaggctcatgcccaag

SEQ ID NO: 119539 - DNA, 2243 bp, Homo sapiens
  Payload ID: 3428
  Gene Symbol: C9orf9
  Gene Name: chromosome 9 open reading frame 9
  Uniprot ID: Q96E40
  ENST ID: ENST00000356311
  CDS Start-End: 155-823
ctcgcctcccaagtcctggaacgggcctccccaccctccggggcaccgacactcacggagtcactccaacttctctgggtgctccgtggagcgaagagcgctctaggacaagcaaggattcctcttctcctgtaaatgaccacagaggaagacaatgaatgaggtgaaagaatcccttcgcagcatcgagcagaagtacaagctcttccagcagcagcagctcaccttcaccgccgctctggagcactgcagggagaacgcccacgacaagatccggcccatctccagcattggacaggtgcagagctacatggaacactactgcaacagctccacagaccggcgggttctgctcatgttcctggacatctgttcagagctgaataagctctgccagcactttgaggccgtgcactctggcaccccagtcaccaacaacctcctggagaaatgcaaaaccctcgttagccaaagcaacgacttaagcagcctcagagcaaaataccctcatgatgtggtgaaccacctcagctgtgacgaggcccggaaccactacggcggcgtggtcagcctcatccccctcatcctagacttaatgaaagaatggatcgcccactccgagaagttgccgcgcaaggtgctgcagcacgtgagtgagccccaggcgcaccaggagagcaccaggggagccgctcgtcctgcccaggccatagggacccagcccagggccactaaacacaagtgtagacagctcacaaaagccagcctcaaacccaggggatgttcaaaaccaccctggaggcctcctggtgggaaattgtaactcagagccaggagctccgtcggcggagagctttgctgtttaatttggattttactggttggtccttttttcactggtacccatggaccctgccacttactaaccccaagggaatcagccaatatattactgagacttcctctctctcttcttgctttaacttcttttttttttgagacggagtctcgctctgtcgcccaggctggagtgcggtggcgcaacctcggctcactgcaacctccgcctcccaggttcacgccattctcctgcctcagcctcccaagtagctgggactacaggcgcccaccacctcgcctggctaattttttgtatttttagtagagacagcgtttcaccatgttagccaggatggtctcaatctcctgacctcatgatctaccctcgtgatcggcctcccaaagtgctgggattacaggcgtgagccacagcgcccggccctcttgctttaacttctaacatttccacttctaagcatcaggctccgtgctgatgaagaggaaacccacttacagaagttgcccaaacaggatggtgtggtagagggtcccaggagggcactgaactgtcacctaggtcctctttgagccacatccggctccagtgccacgcctgtccctgctgcgggctgcagttttgcagagggtgatcaagctggagaccatctgctccttgccccaccaccagccccaactgtaggcaaggcacacgctgtttgcgagccagggatgctcccctccaggatggagtgggggtcggcatgtggaactcagcgtgtttatttttttattttttgagatggagtttcactctgtctcccaggctggagtgcagtggcacgatcttggctcactgcaacctccacctccaggttcaagcgattctcctgcctcagcctcctgagtagctggaattacaggcgcccaccaccccacctggctaatttatatatatatatattttttagtagagacggggcttcaccacgttggccaggctggtcttgaactcctgacctcaactggtccacccgcctcggcctcccaaagtgctgggattacaggtgtgagccacggcacctggccagaactcagtagtgtgtttagttctctggaccacagccaaaggggaataaactcacctttccttcgcctttacttgggagagggagaccatgacagaagccagaattctgattttgtggctcctgagcaagggcgatgacctggttttcacagcgtagtcgaaccccaaacattgtaaaatgtgtccctggcttctgagcttgcccaaagtaatgtctgactgttggtttttcccttcacaggggacgacttagcttctgtattattgttgcttcctcagggggagacagtcaagaataaaaagtattctaccacct

SEQ ID NO: 119540 - DNA, 2536 bp, Homo sapiens
  Payload ID: 3428
  Gene Symbol: C9orf9
  Gene Name: chromosome 9 open reading frame 9
  Uniprot ID: Q96E40
  ENST ID: ENST00000372136
  CDS Start-End: 448-1116
gacacacgaatcgtacatcccgagttgggctgcttcgtgggcgcgcgactcggccccagctgcgggtcccggccgcgcacccgacgtcgcagtggaggctcccgagccgccgccagcgtcgcgacgggcaggggtgtccggtcacctgcatcaactcgaagatgtggttctcctccccgtactggggcatctcgggggggatacggtgcggggcgatagtggcgtccatgtagccgtctcggctcgccgctccctagtaaccgcgtcgctagggccgccgcgccgactgcgtcatcagcacgcgccgcggccccgccctgcaggctccgcgccgggcccagatacccgatcctcggtcgcgcgggtcgcccccgccccgacctccccggctgacgcgctctgcggctcggattcctcttctcctgtaaatgaccacagaggaagacaatgaatgaggtgaaagaatcccttcgcagcatcgagcagaagtacaagctcttccagcagcagcagctcaccttcaccgccgctctggagcactgcagggagaacgcccacgacaagatccggcccatctccagcattggacaggtgcagagctacatggaacactactgcaacagctccacagaccggcgggttctgctcatgttcctggacatctgttcagagctgaataagctctgccagcactttgaggccgtgcactctggcaccccagtcaccaacaacctcctggagaaatgcaaaaccctcgttagccaaagcaacgacttaagcagcctcagagcaaaataccctcatgatgtggtgaaccacctcagctgtgacgaggcccggaaccactacggcggcgtggtcagcctcatccccctcatcctagacttaatgaaagaatggatcgcccactccgagaagttgccgcgcaaggtgctgcagcacgtgagtgagccccaggcgcaccaggagagcaccaggggagccgctcgtcctgcccaggccatagggacccagcccagggccactaaacacaagtgtagacagctcacaaaagccagcctcaaacccaggggatgttcaaaaccaccctggaggcctcctggtgggaaattgtaactcagagccaggagctccgtcggcggagagctttgctgtttaatttggattttactggttggtccttttttcactggtacccatggaccctgccacttactaaccccaagggaatcagccaatatattactgagacttcctctctctcttcttgctttaacttcttttttttttgagacggagtctcgctctgtcgcccaggctggagtgcggtggcgcaacctcggctcactgcaacctccgcctcccaggttcacgccattctcctgcctcagcctcccaagtagctgggactacaggcgcccaccacctcgcctggctaattttttgtatttttagtagagacagcgtttcaccatgttagccaggatggtctcaatctcctgacctcatgatctaccctcgtgatcggcctcccaaagtgctgggattacaggcgtgagccacagcgcccggccctcttgctttaacttctaacatttccacttctaagcatcaggctccgtgctgatgaagaggaaacccacttacagaagttgcccaaacaggatggtgtggtagagggtcccaggagggcactgaactgtcacctaggtcctctttgagccacatccggctccagtgccacgcctgtccctgctgcgggctgcagttttgcagagggtgatcaagctggagaccatctgctccttgccccaccaccagccccaactgtaggcaaggcacacgctgtttgcgagccagggatgctcccctccaggatggagtgggggtcggcatgtggaactcagcgtgtttatttttttattttttgagatggagtttcactctgtctcccaggctggagtgcagtggcacgatcttggctcactgcaacctccacctccaggttcaagcgattctcctgcctcagcctcctgagtagctggaattacaggcgcccaccaccccacctggctaatttatatatatatatattttttagtagagacggggcttcaccacgttggccaggctggtcttgaactcctgacctcaactggtccacccgcctcggcctcccaaagtgctgggattacaggtgtgagccacggcacctggccagaactcagtagtgtgtttagttctctggaccacagccaaaggggaataaactcacctttccttcgcctttacttgggagagggagaccatgacagaagccagaattctgattttgtggctcctgagcaagggcgatgacctggttttcacagcgtagtcgaaccccaaacattgtaaaatgtgtccctggcttctgagcttgcccaaagtaatgtctgactgttggtttttcccttcacaggggacgacttagcttctgtattattgttgcttcctcagggggagacagtcaagaataaaaagtattctaccacct

SEQ ID NO: 119541 - DNA, 2314 bp, Homo sapiens
  Payload ID: 3429
  Gene Symbol: C9orf91
  Gene Name: chromosome 9 open reading frame 91
  Uniprot ID: Q5VZI3
  ENST ID: ENST00000288502
  CDS Start-End: 438-1466
ggcgggaacccgtgccccaagatgccgtgcacgtggtcggctccgcgcggaggctccttccggcgtcccgggggggcgctcggctgatgaaacgcggcctccagctccgctccgccgcgggcccgggaggcgcgttccctcttggccccaaagcgagtccggcgggcggctcctcggggttgggcgaccgagcggggccggccgggcggggggcgggcccgtgaaggcggcgcagcgcggcgcgggaggcgtgctgggcgcggggctgcggtgcccagaggctgcggcattaggggctcggcgcccccgaccttccgcgtcccggggtggcggcggcggcggcggcggcggcgcgggcggcatatgatgctgagctggctgctccagaatgaaccacagctctgagaaggggaagtagaaacagctggcgccctgccatggcctgtgaaccacaggtggacccgggggccactggcccattgcccccctcctcccctggctggagtgccctgcctggagggagccctcctggctgggggcaagagctccacaatggccaggtcctcactgttctccggattgacaatacctgtgcacccatctccttcgacctgggagccgcagaagagcaactgcaaacttggggcatccaggtcccggctgaccagtacaggagcttggctgagagtgccctcttggagccccaagtgagaagatatatcatctacaactcgaggcctatgcggctggcctttgctgtggttttctatgtggtggtgtgggccaatatctactctaccagtcagatgtttgccttggggaaccactgggctggcatgctgctcgtgaccctggccgcggtgagcctgaccttgactcttgtgctggtctttgaaagacaccagaagaaggccaacaccaacacggacctgaggctggcagctgccaatggagccctcctgagacaccgggtgctgctgggggtgacagacacagtggaaggatgccagagtgtgattcagctttggtttgtctacttcgacctggagaactgtgtgcagtttttgtctgatcatgttcaagaaatgaagactagccaagagtccttgctgagaagcagattgagccagttgtgtgttgtcatggagactggggtgagccctgcaacagcggaggggcctgagaacttggaggatgctcctctcctgcccggcaattcttgtcctaacgagaggccactcatgcagactgagcttcatcagcttgttcctgaggctgagccggaggaaatggcccgccagctgctggcagtgtttggcggctactacatccggcttctagtgacctcccagctccctcaggcaatggggacacgacacacgaactctccgagaattccatgcccctgccagctcatagaagcctacatcctaggcacagggtgctgcccgttcctggcgaggtgacctagggatgaaggtactcatcttccttcaagactgagcagtcaggaaggcttcaggagcccaagatggccaatggggagccccaggtgaggagagaagcatctgggggcactccaaaaggggcctgtgatgtcagccactggggtgttgtgctcacttcagggcccagcacaaaaatccttgtttgacatctcatgctgaccccctggcctttgcagaagctgatggttacagagctagtcccaccaaagctactctctctgctgcttagaactgtggacacgtatggaaagactggacccccattgctttcattgttcagagaacccaggagacatgaagatgaccagactgggcaaattatgtgtccaaaacttggcctcagatgatgtttccatctccaaccccttcatgccagatggggaaactgaggctcagagaggatactgctctatgtggcattgccttgaacccctaaaattatcagacttcctttttccaatataaagaaaaaaagtaagttttcagaattctctcaatttttaagtttttctcccccatattttgtgaaaagcagtggtatgtgtacgtgttgtctaccagtacacaggctgcagaagacagagacagaagaaagagatcaagggcagataactgttgataggaatatttgagaaagattgatcctgtttgacttgaggacttattttgttcacaggcatgcacgcttgtggttgtggttttatattacagatgtagaacaatggttatgtttcccgacatgaacattgtcctggaatgaagtgtgatcagccacttgtggaattctttgaagagctcagaggctt

SEQ ID NO: 119542 - DNA, 4578 bp, Homo sapiens
  Payload ID: 3429
  Gene Symbol: C9orf91
  Gene Name: chromosome 9 open reading frame 91
  Uniprot ID: Q5VZI3
  ENST ID: ENST00000374049
  CDS Start-End: 438-1469
ggcgggaacccgtgccccaagatgccgtgcacgtggtcggctccgcgcggaggctccttccggcgtcccgggggggcgctcggctgatgaaacgcggcctccagctccgctccgccgcgggcccgggaggcgcgttccctcttggccccaaagcgagtccggcgggcggctcctcggggttgggcgaccgagcggggccggccgggcggggggcgggcccgtgaaggcggcgcagcgcggcgcgggaggcgtgctgggcgcggggctgcggtgcccagaggctgcggcattaggggctcggcgcccccgaccttccgcgtcccggggtggcggcggcggcggcggcggcggcgcgggcggcatatgatgctgagctggctgctccagaatgaaccacagctctgagaaggggaagtagaaacagctggcgccctgccatggcctgtgaaccacaggtggacccgggggccactggcccattgcccccctcctcccctggctggagtgccctgcctggagggagccctcctggctgggggcaagagctccacaatggccaggtcctcactgttctccggattgacaatacctgtgcacccatctccttcgacctgggagccgcagaagagcaactgcaaacttggggcatccagcaggtcccggctgaccagtacaggagcttggctgagagtgccctcttggagccccaagtgagaagatatatcatctacaactcgaggcctatgcggctggcctttgctgtggttttctatgtggtggtgtgggccaatatctactctaccagtcagatgtttgccttggggaaccactgggctggcatgctgctcgtgaccctggccgcggtgagcctgaccttgactcttgtgctggtctttgaaagacaccagaagaaggccaacaccaacacggacctgaggctggcagctgccaatggagccctcctgagacaccgggtgctgctgggggtgacagacacagtggaaggatgccagagtgtgattcagctttggtttgtctacttcgacctggagaactgtgtgcagtttttgtctgatcatgttcaagaaatgaagactagccaagagtccttgctgagaagcagattgagccagttgtgtgttgtcatggagactggggtgagccctgcaacagcggaggggcctgagaacttggaggatgctcctctcctgcccggcaattcttgtcctaacgagaggccactcatgcagactgagcttcatcagcttgttcctgaggctgagccggaggaaatggcccgccagctgctggcagtgtttggcggctactacatccggcttctagtgacctcccagctccctcaggcaatggggacacgacacacgaactctccgagaattccatgcccctgccagctcatagaagcctacatcctaggcacagggtgctgcccgttcctggcgaggtgacctagggatgaaggtactcatcttccttcaagactgagcagtcaggaaggcttcaggagcccaagatggccaatggggagccccaggtgaggagagaagcatctgggggcactccaaaaggggcctgtgatgtcagccactggggtgttgtgctcacttcagggcccagcacaaaaatccttgtttgacatctcatgctgaccccctggcctttgcagaagctgatggttacagagctagtcccaccaaagctactctctctgctgcttagaactgtggacacgtatggaaagactggacccccattgctttcattgttcagagaacccaggagacatgaagatgaccagactgggcaaattatgtgtccaaaacttggcctcagatgatgtttccatctccaaccccttcatgccagatggggaaactgaggctcagagaggatactgctctatgtggcattgccttgaacccctaaaattatcagacttcctttttccaatataaagaaaaaaagtaagttttcagaattctctcaatttttaagtttttctcccccatattttgtgaaaagcagtggtatgtgtacgtgttgtctaccagtacacaggctgcagaagacagagacagaagaaagagatcaagggcagataactgttgataggaatatttgagaaagattgatcctgtttgacttgaggacttattttgttcacaggcatgcacgcttgtggttgtggttttatattacagatgtagaacaatggttatgtttcccgacatgaacattgtcctggaatgaagtgtgatcagccacttgtggaattctttgaagagctcagaggcttccaagtgatctgctcctgaacaagtttgaagacctattgtttcatagacccaagaccaaacgcatctaaaggatccccagcccccaagacctagcctttgtctgcgattttggcttcatctcccacaaaacccctttatgagttcacgctctttcctggactgacatacctattcctttccatttgttggactcctattcatgcttcaaagtccagctttcttaagcccttctttaggaagccttcccacacagccaaccctgctgctctctgcctcctttaaattcttgatacagctgctgcttgttctgatgttttatggtattgattctgttttcctgtgtatatgccagtttttctagctagactgtaaactccttaaggacagagactacaccttgtactttttgtgcatgacctggacctgctaaggaaaaaaaaatcttgtggattgattgctttgccatccccacagcagcttttgcaaattgctttccaaactcacttgaatgatgacattgctgtggacctgggttctggacctgatctgccacttcaagctgtgtaatttttggcaagttgctttctttgcctggtcctcagtttgcccatcaatataatgggtggattggatgatttttttttttttaattgagatggagtcttgcactgtcacccaggctggagtgcagtggcgcgatcttggctcactgcaacccccgccacctaggttcaagtgattctcatgcctcagcctcccaagtagctgggactacaggtgtgcaccactactcctggatatttttttgtgtttttagtagagatggggtttcgccatgttggccaagctggtcttgaactcctgacctcaggtgatccacccgcctcgggctcccaaagtgctgggattacagacgtgaggcaccacaaccagcctggatgattcttaagggcccttctaggaccaaagttctgggaatttctagcttattctgccccctcatagcccttggcctatctatctttatccacatgcagaaacatctggcaaccccacatggctgagatgacctggtcctaggacacccttggacagaagactggcctacctagcagacctggatttttcttcctgatctgctgcttccaagttgtgtgaccttggctaagtcacttaacctttctgattgtcatttcgctttttaataaagtgggtctggtgaacaagaaatgtaataaacacgtggcttgccattcaagagatgagtctgaccattcactttctgtgtgccagagaagagagatcatgggtatagaccagcccctggaaaggctgctttggtcaaggctgagagcagctttgctcaaggaaattattcacgaaggtgaccactgtctttctgacctggcacagaggaaatgttggctgtgaatgtgaccaatagaaagaagcccgtatttctcagtcagtcctagaaccccggtaagtaattaacagagaataaaaatgtgtttgttaaatgacaaagcagcagtttttcaattgtaaggtctgcttgagagcctttgatgtgtgtttcttttcctgacttttcctttctttagaatttttgatggtctcacctggtgggtggggctttcagggtatgcccacaatgtacatttctcggcatctgtgcctcagtttcctcatttataaaatccctatgatctctgtctcacctactttacagggttgctgtgaagatcgcatactacacacaggaatgctcatcagtttttaaattttatttaatttttatttatttttttttaaatgtaattttttcagagagataaggtcttgctatgttacccagcctagtcttgaactcctggcctcaagtgatcctcctgccttggcctcccatgctgctgggattacaggtgtgaactaccatgcccagccagctcctaagtcttaaggctctgtgttagtgatagatgtggccatggtgtaggcagtgcaatgtcttcgagtgagagtgaaggtggtaactcattgcatggattctagagttctgtttattctaatccaagttcttccacttaaaaacaatgttcttcctctcattgagtctcattcctcatctataggatgggaataagagcatgtacctggcaggttgttgtaaggattaaatggtgtaaaaaaatgtcaagtgcttgcaactttgaataccaaacttgagtgaaagctcaataaattgttacttaaaaaa

SEQ ID NO: 119543 - DNA, 359 bp, Homo sapiens
  Payload ID: 3430
  Gene Symbol: C9orf92
  Gene Name: chromosome 9 open reading frame 92
  Uniprot ID: A6NGG3
  ENST ID: ENST00000380683
  CDS Start-End: 14-340
gaaaatattttccatggaattgaacaccaacattaaaagtaaaaaggggttgggaagaagaaacctaaaaccaatgaatggggcttggcccccagctagacgcgagatggctcgttttcagagaacaaaggagagggaagaagataggtgttccttgaacatctactatgtgagaaacaccacccagggcactgcacctgcctgtgttggaaagaggatgcaaccatccccaacagggaagggtggaaaatgctgcactgtgcatgggctcacaaggaagatacataatgtacagccgaatctacagtctcctattttgtcagctgcttgtgttgattaaaacttcaataaagatcctg

SEQ ID NO: 119544 - DNA, 379 bp, Homo sapiens
  Payload ID: 3430
  Gene Symbol: C9orf92
  Gene Name: chromosome 9 open reading frame 92
  Uniprot ID: A6NGG3
  ENST ID: ENST00000380685
  CDS Start-End: 115-348
gctttgtgggagagaggtctgtgtctgggcaaacaacctgcttgtagaggctggaagaggaaaaggccaaagacacctgaaaagaatggggcttggcccccagctagacgcgagatggctcgttttcagagaacaaaggagagggaagaagataggtgttccttgaacatctactatgtgagaaacaccacccagggcactgcacctgcctgtgttggaaagaggatgcaaccatccccaacagggaagggtggaaaatgctgcactgtgcatgggctcacaaggaagatacataatgtacagccgaatctacagtctcctattttgtcagctgcttgtgttgattaaaacttcaataaagatcctgtgataaaacaga

SEQ ID NO: 119545 - DNA, 219 bp, Homo sapiens
  Payload ID: 3430
  Gene Symbol: C9orf92
  Gene Name: chromosome 9 open reading frame 92
  ENST ID: ENST00000433347
  CDS Start-End: 1-219
gaatggggcttggcccccagctagacgcgagatggctcgttttcagagaacaaaggagagggaagaagataggtgttccttgaacatctactatgtgagaaacaccacccagggcactgcacctgcctgctcacaaggaagatacataatgtacagccgaatctacagtctcctattttgtcagctgcttgtgttgattaaaacttcaataaagatcct

SEQ ID NO: 119546 - DNA, 3795 bp, Homo sapiens
  Payload ID: 3431
  Gene Symbol: CHAMP1
  Gene Name: chromosome alignment maintaining phosphoprotein 1
  Uniprot ID: Q96JM3
  ENST ID: ENST00000361283
  CDS Start-End: 310-2748
atcccggctcctgcatccagtcgccattcgggaggccgctgcgctgcagggcctcgcggagccgcccgcgaccgcgagccgggccctccgcgcggtccatcgcccactggacgccgcccgcggccggaccggttcaacttctcatctttgttcttcttcatatactataggctgtttgctgtggtttagtcaaaaagccatgtagaatgcctgccttttgaagaccacttttaaggtgtctagtaagacagcagcagtattgaaagtttttaaagaatataaccgtgtgtgttggtaacagacagaagaatggaagcattccaggaacttcgtaaaccatcagcacgtttggagtgtgaccattgcagtttcagaggcacagactatgaaaatgtacaaatccatatgggtaccatccatccagaattttgtgatgaaatggatgctggtgggctaggcaaaatgatattttaccagaaaagtgcaaagttatttcactgccataaatgcttcttcaccagcaagatgtactctaatgtatactatcacatcacatccaaacatgcatccccagacaaatggaatgataaaccaaaaaatcagttgaacaaagaaacagatcctgtgaaaagccctcctcttcctgaacaccagaaaataccctgcaattcagcagaaccaaaatccatacctgccctttcaatggaaacacagaaacttggttcagttttgtctccagaatcgccaaaacctactcctcttactcccctggagcctcagaaacctggctctgttgtttctcctgagctacagacacctcttccttctcctgagccttcaaaacctgcctctgtttcttctcctgaacctccaaaatcagtccctgtttgtgagtctcagaaacttgcccctgttccttctccagaaccacagaaacctgcccctgtatctcctgagtcagtaaaggctactcttagtaatcccaaaccccagaagcagtctcatttcccggaaacattggggccaccttcagcctcatctccagagtcaccagttctagctgcttccccagaaccttggggaccatccccagctgcatctccagaatctcggaagtcagcccggactacctcccctgagccaaggaagccatccccttcagagtctcctgaaccttggaagccgttccctgctgtctccccagagcctaggagaccagcccccgctgtgtcaccaggctcttggaaaccagggccacctgggtcccctaggccttggaaatccaatccttcagcatcatcaggaccttggaagccagctaaacctgctccatctgtgtctcctggaccttggaaaccaattccttctgtatctcctggaccttggaaaccaactccatctgtgtcttctgcatcctggaaatcttcatcagtctcacccagctcctggaagtctccccctgcatctcctgagtcatggaagtctggcccaccagaactccgaaagacagctcccacgttgtctcctgaacattggaaggcagttcccccagtgtctccagagcttcgcaaacccggcccaccactatccccagagatccgtagtccagcaggatctccagagctcagaaaaccctcagggtcaccagatctttggaagctttctcctgatcagcggaaaacttctcctgcttcacttgatttccctgagtcccagaaaagttcccgtggtggttctcctgatctctggaagtcttccttttttattgagcctcagaaacctgtcttccctgagacccgaaaaccaggtccttctgggccatctgagtcccccaaagcagcctcagatatctggaagcctgttctctctatcgatactgagcctagaaaacctgccctgtttcccgagcctgccaaaacagcccctcctgcttctccagaagcacgcaaacgtgccctttttccagagccccggaagcatgcccttttccctgaactccccaaatctgctctattctcagaatcacagaaggctgttgagcttggtgatgaactacaaatagatgccatagatgatcaaaaatgtgatattttggttcaggaagaacttctagcttcacctaagaaactcttagaagatactttatttccttcctcaaagaagctcaagaaagacaaccaagagagctcagacgctgagcttagtagtagtgagtacataaaaacagatttggatgcgatggatattaagggccaggaatcaagcagtgatcaagagcaggttgatgtggaatccattgattttagcaaagagaacaaaatggacatgactagtccagagcagtctagaaatgtgctacagtttactgaagaaaaagaagcttttatctctgaagaggagattgcaaaatacatgaagcgtggaaaaggaaagtattattgcaaaatttgttgctgtcgtgctatgaaaaaaggtgctgttttgcatcatttggttaataagcataatgttcatagcccttacaaatgcacaatctgtggaaaggcttttcttttggaatctctccttaaaaatcatgtagcagcccatgggcaaagtttacttaaatgtccacgttgtaattttgaatcaaatttcccaagaggttttaagaaacatttaactcattgtcaaagccggcataatgaagaggcaaataaaaagctaatggaagctcttgaaccgccactggaggagcagcaaatttgataacacagtgtgaatatttgttctacaaaggtgtttgttggaaccattctttgtaagtatagcttatcagatagcatagttggatcagtagatgacatgtatggtgtaccgtgtttcactgtctcagttgtgttactaagaatgagcatttgatcatttttttctggtctctgtctatgtgactatcttgtaagtcaataaatttctgtatagtccagatggattaaacttctcatttcttttaaatatgtatgaataataatacaaggaagtaggcattccatttaataatcaagagcaagttgtactcaaagcattcagttaaagtgtatctgtgtgtggaactaatttcagacaatagaaaatattagttgaaatgtttaagaattaggcatgaaaaataaatttgagaaattttgtttccttacatgtatttttaaatcataagagttattttctatctgatgtaaaattagtttataaatcttaatcagcttctagatgtttattagcttttatgtcatgaaatgttggagtctcagggttgctgattttctgctaatgggaaaaattgactaagtctttaaaatagtttgcagccttctcccacaggagacaagtgaaagataagtgtgattttagatctttcttgtccatagttgttttcagtggagtcttccattctgtatcttaccctaagatctggttcttccctccccatccccaccccccacccaccgcctgccagctcacactaatagatgattcttaattgccaaatgtgttagagtttgtatatcctactcctgggccttacatgtcgcctgttggggcttaagaccaggttgataagtaggaactgaaagtcttccagattcacagtagaaaattttatagacatttctgttaaagaaatatatcgattttatgtttttcaattatgttactgtaaataccttgtacctgttcatggattattttattctaaaatattttgtcaaatgtgtatcaaccaaattaaaaagaaaggttttcatgtcagcaaca

SEQ ID NO: 119547 - DNA, 596 bp, Homo sapiens
  Payload ID: 3431
  Gene Symbol: CHAMP1
  Gene Name: chromosome alignment maintaining phosphoprotein 1
  ENST ID: ENST00000463003
  CDS Start-End: 160-596
ttgttcttcttcatatactataggctgtttgctgtggtttagtcaaaaagccatgtagaatgcctgccttttgaagaccacttttaaggtgtctagtaagacagcagtattgaaagtttttaaagaatataaccgtgtgtgttggtaacagacagaagaatggaagcattccaggaacttcgtaaaccatcagcacgtttggagtgtgaccattgcagtttcagaggcacagactatgaaaatgtacaaatccatatgggtaccatccatccagaattttgtgatgaaatggatgctggtgggctaggcaaaatgatattttaccagaaaagtgcaaagttatttcactgccataaatgcttcttcaccagcaagatgtactctaatgtatactatcacatcacatccaaacatgcatccccagacaaatggaatgataaaccaaaaaatcagttgaacaaagaaacagatcctgtgaaaagccctcctcttcctgaacaccagaaaataccctgcaattcagcagaaccaaaatccatacctgccctttcaatggaaacacagaaacttggttcagttttgtctccagaatcgcc

SEQ ID NO: 119548 - DNA, 3090 bp, Homo sapiens
  Payload ID: 3432
  Gene Symbol: CHTF18
  Gene Name: chromosome transmission fidelity factor 18
  Uniprot ID: Q8WVB6
  ENST ID: ENST00000262315
  CDS Start-End: 64-2991
gcagtgcgcgacggcggcggcggcgcgggaggttcggagcgggagctcgggctcgcggacggtatggaggactacgagcaggagctgtgcggcgtcgaggatgatttccacaaccagttcgcggccgagctggaggtgctggcagagctggaaggggcgtcgactccgtcgccctccggggtccccctgttcaccgcgggccgacccccgcggacgttcgaggaggcccttgccagaggggacgcggcctccagtcccgccccagccgcatctgtgggcagcagccagggcggcgccaggaagaggcaggtggacgccgacctgcagccggccgggtccctgccccacgcccccaggatcaaacggcctaggctgcaggtggtcaagaggctgaacttcagatcggaggagatggaggagccgccccctcccgactcctcgccgacggacatcaccccgccgccgagccctgaggacctcgcagagctttggggccacggagtctcagaagctgctgccgacgtgggtctcacacgggcctcaccagctgcccgcaatcccgtcctgaggcggccccccatcttggaggactacgtccacgtgacatccacggagggcgtccgggcttatctggtgctgcgtgctgaccccatggccccgggggtgcagggctctctcctccacgtcccatggcgaggcggtggccagctggacctgctgggtgtgtccttagcctccctgaagaagcaggtcgacggcgagcggcgggagcggctgcttcaggaggcccagaagctttcagacaccctgcacagtctcaggtcgggggaggaggaggcagcccagcccttgggggcccctgaggaggagccgactgacggtcaagacgcctccagtcactgcctctgggtggatgagtttgcaccccgccactacacggagctgctcagtgatgacttcaccaaccgctgcctgctcaagtggctgaagttgtgggacctggtggtgtttggccacgagaggccttcccggaagcccaggcccagtgttgagccggcccgggtcagcaaggaggccacagccccaggcaagtggaagagccacgaacaggtgctggaggagatgctggaggctgggctggacccgagccagcgaccgaagcagaaggtggcactgctctgtgggcccccggggctggggaagaccaccctggcacacgtgattgcgcgtcacgcggggtactctgtggtggagatgaacgccagtgacgaccgtagcccggaggtcttccgcacacgcatcgaggcggccacccagatggagtcggtgctgggtgctggcgggaagcccaactgcctggtcatcgatgagatcgacggggcccccgtggccgccatcaacgtcctcctgagcatcctgaaccgcaaggggccacaggaggtggggccacagggcccggctgtgccttcgggaggcggccgacggcgccgggcagagggggggctcctcatgaggcccattatctgcatttgcaatgaccagttcgcaccgtccctgcggcagctgaagcagcaggccttcctgctccacttcccgccgactctgccctcgaggctggtgcagcggctccaggaggtctccctgcggcagggcatgagggccgacccaggggtgctggccgccctctgtgagaaaactgacaatgacatccgggcctgcatcaacaccctgcagttcctgtacagccggggccagcgggagctgagcgtgcgggacgtgcaggccacacgcgtgggcctcaaggaccagcgcagagggctcttctcggtgtggcaggaggtcttccagctgcctcgagcccagaggcgccgtgtgggccaggaccccgccctgcctgctgacacactcctgctgggtgacggggacgcgggctccctcacctccgcctcacagcgattctaccgtgtcctgcatgccgctgcctctgcgggcgagcacgagaaggtggtccagggcttgtttgacaacttcctgcgtctgcggctgcgagactccagcctgggtgctgtgtgtgtggccctcgactggctggccttcgatgacctgctggcgggggctgctcatcacagccagagcttccagctgctgcgctacccacccttcctgcccgtggccttccatgtgctgtttgcttccagccacacacccaggatcaccttccccagcagccagcaggaggcccagaaccggatgagccagatgaggaacctgatccagacgctggtgtccggcatcgcgccagccacgcgcagccgggccacgccccaggccctgctcctcgatgccctctgcctgctcctggacattcttgcacccaagctccgccccgtgagcacacagctgtacagcacccgtgaaaagcaacagctggccagcctggtgggcacgatgctcgcttacagcctgacctaccgccaggagcgcacgcccgatggccagtacatctacaggctggagccgaacgtggaggaactctgccgcttccctgagctgcctgcccgcaagcccctcacctaccagacgaagcagctcatcgcccgcgagatcgaggtggagaagatgcggcgggcggaggcttctgcccgggtagagaacagcccccaggtggatgggagccccccagggctcgagggtctgctggggggcattggggagaaaggggtgcaccgacctgccccacgcaaccatgagcagcggctggagcacatcatgaggcgagcggcccgggaggaacagcctgagaaggacttctttggacgtgtggtcgtcaggagcacagcagtcccgagtgcaggggacacggccccggagcaggactcagtggagcggcgcatgggcacagcggtgggcaggagcgaggtctggttccgcttcaacgagggtgtctccaacgccgtgcggcgcagcctgtacatcagggacttgctctagttctctgagccgcggacatgccctcgcattgcttcccgcagagtgcagagacaggaagctggagatgtctttataaagtcacacctttacagactgtaa

SEQ ID NO: 119549 - DNA, 2988 bp, Homo sapiens
  Payload ID: 3432
  Gene Symbol: CHTF18
  Gene Name: chromosome transmission fidelity factor 18
  ENST ID: ENST00000317063
  CDS Start-End: 61-2988
gtgcgcgacggcggcggcggcgcgggaggttcggagcgggagctcgggctcgcggacggtatggaggactacgagcaggagctgtgcggcgtcgaggatgatttccacaaccagttcgcggccgagctggaggtgctggcagagctggaaggggcgtcgactccgtcgccctccggggtccccctgttcaccgcgggccgacccccgcggacgttcgaggaggcccttgccagaggggacgcggcctccagtcccgccccagccgcatctgtgggcagcagccagggcggcgccaggaagaggcaggtggacgccgacctgcagccggccgggtccctgccccacgcccccaggatcaaacggcctaggctgcaggtggtcaagaggctgaacttcagatcggaggagatggaggagccgccccctcccgactcctcgccgacggacatcaccccgccgccgagccctgaggacctcgcagagctttggggccacgggttctcagaagctgctgccgacgtgggtctcacacgggcctcaccagctgcccgcaatcccgtcctgaggcggccccccatcttggaggactacgtccacgtgacatccacggagggcgtccgggcttatctggtgctgcgtgctgaccccatggccccgggggtgcagggctctctcctccacgtcccatggcgaggcggtggccagctggacctgctgggtgtgtccttagcctccctgaagaagcaggtcgacggcgagcggcgggagcggctgcttcaggaggcccagaagctttcagacaccctgcacagtctcaggtcgggggaggaggaggcagcccagcccttgggggcccctgaggaggagccgactgacggtcaagacgcctccagtcactgcctctgggtggatgagtttgcaccccgccactacacggagctgctcagtgatgacttcaccaaccgctgcctgctcaagtggctgaagttgtgggacctggtggtgtttggccacgagaggccttcccggaagcccaggcccagtgttgagccggcccgggtcagcaaggaggccacagccccaggcaagtggaagagccacgaacaggtgctggaggagatgctggaggctgggctggacccgagccagcgaccgaagcagaaggtggcactgctctgtgggcccccggggctggggaagaccaccctggcacacgtgattgcgcgtcacgcggggtactctgtggtggagatgaacgccagtgacgaccgtagcccggaggtcttccgcacacgcatcgaggcggccacccagatggagtcggtgctgggtgctggcgggaagcccaactgcctggtcatcgatgagatcgacggggcccccgtggccgccatcaacgtcctcctgagcatcctgaaccgcaaggggccacaggaggtggggccacagggcccggctgtgccttcgggaggcggccgacggcgccgggcagagggggggctcctcatgaggcccattatctgcatttgcaatgaccagttcgcaccgtccctgcggcagctgaagcagcaggccttcctgctccacttcccgccgactctgccctcgaggctggtgcagcggctccaggaggtctccctgcggcagggcatgagggccgacccaggggtgctggccgccctctgtgagaaaactgacaatgacatccgggcctgcatcaacaccctgcagttcctgtacagccggggccagcgggagctgagcgtgcgggacgtgcaggccacacgcgtgggcctcaaggaccagcgcagagggctcttctcggtgtggcaggaggtcttccagctgcctcgagcccagaggcgccgtgtgggccaggaccccgccctgcctgctgacacactcctgctgggtgacggggacgcgggctccctcacctccgcctcacagcgattctaccgtgtcctgcatgccgctgcctctgcgggcgagcacgagaaggtggtccagggcttgtttgacaacttcctgcgtctgcggctgcgagactccagcctgggtgctgtgtgtgtggccctcgactggctggccttcgatgacctgctggcgggggctgctcatcacagccagagcttccagctgctgcgctacccacccttcctgcccgtggccttccatgtgctgtttgcttccagccacacacccaggatcaccttccccagcagccagcaggaggcccagaaccggatgagccagatgaggaacctgatccagacgctggtgtccggcatcgcgccagccacgcgcagccgggccacgccccaggccctgctcctcgatgccctctgcctgctcctggacattcttgcacccaagctccgccccgtgagcacacagctgtacagcacccgtgaaaagcaacagctggccagcctggtgggcacgatgctcgcttacagcctgacctaccgccaggagcgcacgcccgatggccagtacatctacaggctggagccgaacgtggaggaactctgccgcttccctgagctgcctgcccgcaagcccctcacctaccagacgaagcagctcatcgcccgcgagatcgaggtggagaagatgcggcgggcggaggcttctgcccgggtagagaacagcccccaggtggatgggagccccccagggctcgagggtctgctggggggcattggggagaaaggggtgcaccgacctgccccacgcaaccatgagcagcggctggagcacatcatgaggcgagcggcccgggaggaacagcctgagaaggacttctttggacgtgtggtcgtcaggagcacagcagtcccgagtgcaggggacacggccccggagcaggactcagtggagcggcgcatgggcacagcggtgggcaggagcgaggtctggttccgcttcaacgagggtgtctccaacgccgtgcggcgcagcctgtacatcagggacttgctctag

SEQ ID NO: 119550 - DNA, 1801 bp, Homo sapiens
  Payload ID: 3432
  Gene Symbol: CHTF18
  Gene Name: chromosome transmission fidelity factor 18
  ENST ID: ENST00000440239
  CDS Start-End: 61-1431
gtgcgcgacggcggcggcggcgcgggaggttcggagcgggagctcgggctcgcggacggtatggaggactacgagcaggagctgtgcggcgtcgaggatgatttccacaaccagttcgcggccgagctggaggtgctggcagagctggaagcaggggcgtcgactccgtcgccctccggggtccccctgttcaccgcgggccgacccccgcggacgttcgaggaggcccttgccagaggggacgcggcctccagtcccgccccagccgcatctgtgggcagcagccagggcggcgccaggaagaggcaggtggacgccgacctgcagccggccgggtccctgccccacgcccccaggatcaaacggcctaggctgcaggtggtcaagaggctgaacttcagatcggaggagatggaggagccgccccctcccgactcctcgccgacggacatcaccccgccgccgagccctgaggacctcgcagagctttggggccacggagtctcagaagctgctgccgacgtgggtctcacacgggcctcaccagctgcccgcaatcccgtcctgaggcggccccccatcttggaggactacgtccacgtgacatccacggagggcgtccgggcttatctggtgctgcgtgctgaccccatggccccgggggtgcagggctctctcctccacgtcccatggcgaggcggtggccagctggacctgctgggtgtgtccttagcctccctgaagaagcaggtcgacggcgagcggcgggagcggctgcttcaggaggcccagaagctttcagacaccctgcacagtctcaggtcgggggaggaggaggcagcccagcccttgggggcccctgaggaggagccgactgacggtcaagacgcctccagtcactgcctctgggtggatgagtttgcaccccgccactacacggagctgctcagtgatgacttcaccaaccgctgcctgctcaagtggctgaagttgtgggacctggtggtgtttggccacgagaggccttcccggaagcccaggcccagtgttgagccggcccgggtcagcaaggaggccacagccccaggcaagtggaagagccacgaacaggtgctggaggagatgctggaggctgggctggacccgagccagcgaccgaagcagaaggtggcactgctctgtgggcccccggggctggggaagaccaccctggcacacgtgattgcgcgtcacgcggggtactctgtggtggagatgaacgccagtgacgaccgtagcccggaggtcttccgcacacgcatcgaggcggccacccagatggagtcggtgctgggtgctggcgggaagcccaactgcctggtcatcgatgagatcgacggggcccccgtggtgggctccttgatgcctgggccgccatcaacgtcctcctgagcatcctgaaccgcaaggggccacaggaggtggggccacagggcccggctgtgccttcgggaggcggccgacggcgccgggcagagggggggctcctcatgaggcccattatctgcatttgcaatgaccagttcgcaccgtccctgcggcagctgaagcagcaggccttcctgctccacttcccgccgactctgccctcgaggctggtgcagcggctccaggaggtctccctgcggcagggcatgagggccgacccaggggtgctggccgccctctgtgagaaaactgacaatgacatccgggcctgcatcaacaccctgcagttcctgtacagccggggccagcgggagctgagcgtgcgggacgtgca

SEQ ID NO: 119551 - DNA, 3172 bp, Homo sapiens
  Payload ID: 3432
  Gene Symbol: CHTF18
  Gene Name: chromosome transmission fidelity factor 18
  Uniprot ID: Q8WVB6
  ENST ID: ENST00000455171
  CDS Start-End: 62-3073
agtgcgcgacggcggcggcggcgcgggaggttcggagcgggagctcgggctcgcggacggtatggaggactacgagcaggagctgtgcggcgtcgaggatgatttccacaaccagttcgcggccgagctggaggtgctggcagagctggaaggggcgtcgactccgtcgccctccggggtccccctgttcaccgcgggccgacccccgcggacgttcgaggaggcccttgccagaggggacgcggcctccagtcccgccccagccgcatctgtgggcagcagccagggcggcgccaggaagaggcaggtggacgccgacctgcagccggccgggtccctgccccacggtaggttggcggcattgccccagggcctccggagtgggcgcgaggctgaggaggcctctggttccctgcatgtgtctcccccagcccccaggatcaaacggcctaggctgcaggtggtcaagaggctgaacttcagatcggaggagatggaggagccgccccctcccgactcctcgccgacggacatcaccccgccgccgagccctgaggacctcgcagagctttggggccacggagtctcagaagctgctgccgacgtgggtctcacacgggcctcaccagctgcccgcaatcccgtcctgaggcggccccccatcttggaggactacgtccacgtgacatccacggagggcgtccgggcttatctggtgctgcgtgctgaccccatggccccgggggtgcagggctctctcctccacgtcccatggcgaggcggtggccagctggacctgctgggtgtgtccttagcctccctgaagaagcaggtcgacggcgagcggcgggagcggctgcttcaggaggcccagaagctttcagacaccctgcacagtctcaggtcgggggaggaggaggcagcccagcccttgggggcccctgaggaggagccgactgacggtcaagacgcctccagtcactgcctctgggtggatgagtttgcaccccgccactacacggagctgctcagtgatgacttcaccaaccgctgcctgctcaagtggctgaagttgtgggacctggtggtgtttggccacgagaggccttcccggaagcccaggcccagtgttgagccggcccgggtcagcaaggaggccacagccccaggcaagtggaagagccacgaacaggtgctggaggagatgctggaggctgggctggacccgagccagcgaccgaagcagaaggtggcactgctctgtgggcccccggggctggggaagaccaccctggcacacgtgattgcgcgtcacgcggggtactctgtggtggagatgaacgccagtgacgaccgtagcccggaggtcttccgcacacgcatcgaggcggccacccagatggagtcggtgctgggtgctggcgggaagcccaactgcctggtcatcgatgagatcgacggggcccccgtggccgccatcaacgtcctcctgagcatcctgaaccgcaaggggccacaggaggtggggccacagggcccggctgtgccttcgggaggcggccgacggcgccgggcagagggggggctcctcatgaggcccattatctgcatttgcaatgaccagttcgcaccgtccctgcggcagctgaagcagcaggccttcctgctccacttcccgccgactctgccctcgaggctggtgcagcggctccaggaggtctccctgcggcagggcatgagggccgacccaggggtgctggccgccctctgtgagaaaactgacaatgacatccgggcctgcatcaacaccctgcagttcctgtacagccggggccagcgggagctgagcgtgcgggacgtgcaggccacacgcgtgggcctcaaggaccagcgcagagggctcttctcggtgtggcaggaggtcttccagctgcctcgagcccagaggcgccgtgtgggccaggaccccgccctgcctgctgacacactcctgctgggtgacggggacgcgggctccctcacctccgcctcacagcgattctaccgtgtcctgcatgccgctgcctctgcgggcgagcacgagaaggtggtccagggcttgtttgacaacttcctgcgtctgcggctgcgagactccagcctgggtgctgtgtgtgtggccctcgactggctggccttcgatgacctgctggcgggggctgctcatcacagccagagcttccagctgctgcgctacccacccttcctgcccgtggccttccatgtgctgtttgcttccagccacacacccaggatcaccttccccagcagccagcaggaggcccagaaccggatgagccagatgaggaacctgatccagacgctggtgtccggcatcgcgccagccacgcgcagccgggccacgccccaggccctgctcctcgatgccctctgcctgctcctggacattcttgcacccaagctccgccccgtgagcacacagctgtacagcacccgtgaaaagcaacagctggccagcctggtgggcacgatgctcgcttacagcctgacctaccgccaggagcgcacgcccgatggccagtacatctacaggctggagccgaacgtggaggaactctgccgcttccctgagctgcctgcccgcaagcccctcacctaccagacgaagcagctcatcgcccgcgagatcgaggtggagaagatgcggcgggcggaggcttctgcccgggtagagaacagcccccaggtggatgggagccccccagggctcgagggtctgctggggggcattggggagaaaggggtgcaccgacctgccccacgcaaccatgagcagcggctggagcacatcatgaggcgagcggcccgggaggaacagcctgagaaggacttctttggacgtgtggtcgtcaggagcacagcagtcccgagtgcaggggacacggccccggagcaggactcagtggagcggcgcatgggcacagcggtgggcaggagcgaggtctggttccgcttcaacgagggtgtctccaacgccgtgcggcgcagcctgtacatcagggacttgctctagttctctgagccgcggacatgccctcgcattgcttcccgcagagtgcagagacaggaagctggagatgtctttataaagtcacacctttacagactgtaa

SEQ ID NO: 119552 - DNA, 790 bp, Homo sapiens
  Payload ID: 3432
  Gene Symbol: CHTF18
  Gene Name: chromosome transmission fidelity factor 18
  ENST ID: ENST00000426047
  CDS Start-End: 1-790
caccccgccgccgagccctgaggacctcgcagagctttggggccacggagtctcagaagctgctgccgacgtgggtctcacacgggcctcaccagctgcccgcaatcccgtcctgaggcggccccccatcttggaggactacgtccacgtgacatccacggagggcgtccgggcttatctggtgctgcgtgctgaccccatggccccgggggtgcagctgacccatctggatggcttcattcctttggcacccctgtccagtctcccacccctcactggccagcttactgggggctctctcctccacgtcccatggcgaggcggtggccagctggacctgctgggtgtgtccttagcctccctgaagaagcaggtcgacggcgagcggcgggagcggctgcttcaggaggcccagaagctttcagacaccctgcacagtctcaggtcgggggaggaggaggcagcccagcccttgggggcccctgaggaggagccgactgacggtcaagacgcctccagtcactgcctctgggtggatgagtttgcaccccgccactacacggagctgctcagtgatgacttcaccaaccgctgcctgctcaagtggctgaagttgtgggacctggtggtgtttggccacgagaggccttcccggaagcccaggcccagtgttgagccggcccgggtcagcaaggaggccacagccccaggcaagtggaagagccacgaacaggtgctggaggagatgctggaggctgggctggacccgagccagcgaccgaagcagaag

SEQ ID NO: 119553 - DNA, 711 bp, Homo sapiens
  Payload ID: 3432
  Gene Symbol: CHTF18
  Gene Name: chromosome transmission fidelity factor 18
  ENST ID: ENST00000569270
  CDS Start-End: 1-245
gaagcaggtcgacggcgagcggcgggagcggctgcttcaggaggcccagaagctttcagacaccctgcacagtctcaggtcgggggaggaggaggcagcccagcccttgggggcccctgaggaggagccgactgacggtcaagacgcctccagtcactgcctctgggtggatgagtttgcaccccgccactacacggagctgctcagtgatgacttcaccaaccgctgcctgctcaagtggctgaagttgtgggacctggtggtgtttggccacgagaggccttcccggaagcccaggcccagtgttgagccggcccgggtcagcaaggaggccacagccccaggcaagtggaagagccacgaacaggtgctggaggagatgctggaggctgggctggacccgagccagcgaccgaagcagaaggccgccatcaacgtcctcctgagcatcctgaaccgcaaggggccacaggaggtggggccacagggcccggctgtgccttcgggaggcggccgacggcgccgggcagagggggggctcctcatgaggcccattatctgcatttgcaatgaccagttcgcaccgtccctgcggcagctgaagcagcaggccttcctgctccacttcccgccgactctgccctcgaggctggtgcagcggctccaggaggtctccctgcggcagggcatgagggccgacccaggggtgct

SEQ ID NO: 119554 - DNA, 569 bp, Homo sapiens
  Payload ID: 3432
  Gene Symbol: CHTF18
  Gene Name: chromosome transmission fidelity factor 18
  ENST ID: ENST00000563545
  CDS Start-End: 62-373
agtgcgcgacggcggcggcggcgcgggaggttcggagcgggagctcgggctcgcggacggtatggaggactacgagcaggagctgtgcggcgtcgaggatgatttccacaaccagttcgcggccgagctggaggggcgtcgactccgtcgccctccggggtccccctgttcaccgcgggccgacccccgcggacgttcgaggaggcccttgccagaggggacgcggcctccagtcccgccccagccgcatctgtgggcagcagccagggcggcgccaggaagaggcaggtggacgccgacctgcagccggccgggtccctgccccacgcccccaggatcaaacggcctaggctgcaggtggtcaagaggctgaacttcagatcggaggagatggaggagccgccccctcccgactcctcgccgacggacatcaccccgccgccgagccctgaggacctcgcagagctttggggccacggagtctcagaagctgctgccgacgtgggtctcacacgggcctcaccagctgcccgcaatcccgtcctgaggcggccccccatcttggagga

SEQ ID NO: 119555 - DNA, 3555 bp, Homo sapiens
  Payload ID: 3432
  Gene Symbol: CHTF18
  Gene Name: chromosome transmission fidelity factor 18
  ENST ID: ENST00000631357
  CDS Start-End: 1-3555
atgcacgtgaatgcctctgcccgacggtgggggcggggaggggctgcagcactaccaggcccggcagccagtccgcgcagacccgcgccccgcacaggcccggtgggcaggccgaccctggctccgagcccctcccgcgcccacgcccacgccaagaccaacctgctgccgggccgtgcagtccaggcccccgatgccgtgcccggcgccggctccagccgcgcgcccgcgcgctggcgacccagagaccctggaagctccgctccggacgcctggcagcgcttccgccctgcaccgctgcgcgcgcagccccgcccccccccccggcccgcccccggcccgcccccgccgcggaagggcggctgcggcggccaatggcgagctccccaggacaggacgcgggggctgcggagcaggaactcgccccgcccacccctcgcgcagccccgcctccgccacgccaaccaatggcgcgcgccgccgggcacgccggctgctgattggcggcgcccggcacgctcggggcgggcagtgcgcgacggcggcggcggcgcgggaggttcggagcgggagctcgggctcgcggacggtatggaggactacgagcaggagctgtgcggcgtcgaggatgatttccacaaccagttcgcggccgagctggaggtgctggcagagctggaaggggcgtcgactccgtcgccctccggggtccccctgttcaccgcgggccgacccccgcggacgttcgaggaggcccttgccagaggggacgcggcctccagtcccgccccagccgcatctgtgggcagcagccagggcggcgccaggaagaggcaggtggacgccgacctgcagccggccgggtccctgccccacgcccccaggatcaaacggcctaggctgcaggtggtcaagaggctgaacttcagatcggaggagatggaggagccgccccctcccgactcctcgccgacggacatcaccccgccgccgagccctgaggacctcgcagagctttggggccacgggttctcagaagctgctgccgacgtgggtctcacacgggcctcaccagctgcccgcaatcccgtcctgaggcggccccccatcttggaggactacgtccacgtgacatccacggagggcgtccgggcttatctggtgctgcgtgctgaccccatggccccgggggtgcagggctctctcctccacgtcccatggcgaggcggtggccagctggacctgctgggtgtgtccttagcctccctgaagaagcaggtcgacggcgagcggcgggagcggctgcttcaggaggcccagaagctttcagacaccctgcacaggtcgggggaggaggaggcagcccagcccttgggggcccctgaggaggagccgactgacggtcaagacgcctccagtcactgcctctgggtggatgagtttgcaccccgccactacacggagctgctcagtgatgacttcaccaaccgctgcctgctcaagtggctgaagttgtgggacctggtggtgtttggccacgagaggccttcccggaagcccaggcccagtgttgagccggcccgggtcagcaaggaggccacagccccaggcaagtggaagagccacgaacaggtgctggaggagatgctggaggctgggctggacccgagccagcgaccgaagcagaaggtggcactgctctgtgggcccccggggctggggaagaccaccctggcacacgtgattgcgcgtcacgcggggtactctgtggtggagatgaacgccagtgacgaccgtagcccggaggtcttccgcacacgcatcgaggcggccacccagatggagtcggtgctgggtgctggcgggaagcccaactgcctggtcatcgatgagatcgacggggcccccgtggccgccatcaacgtcctcctgagcatcctgaaccgcaaggggccacaggaggtggggccacagggcccggctgtgccttcgggaggcggccgacggcgccgggcagagggggggctcctcatgaggcccattatctgcatttgcaatgaccagttcgcaccgtccctgcggcagctgaagcagcaggccttcctgctccacttcccgccgactctgccctcgaggctggtgcagcggctccaggagggcatgagggccgacccaggggtgctggccgccctctgtgagaaaactgacaatgacatccgggcctgcatcaacaccctgcagttcctgtacagccggggccagcgggagctgagcgtgcgggacgtgcaggccacacgcgtgggcctcaaggaccagcgcagagggctcttctcggtgtggcaggaggtcttccagctgcctcgagcccagaggagcagccagcatgtctctgtcctgacgtgccatgggaccccaggggatgctggcctggtcgtgctgcaggatatgggagacgctggcctgggcctgtgggatgtgctgctcctggcctggacccggagggggactttccctgggcgattctaccgtgtcctgcatgccgctgcctctgcgggcgagcacgagaaggtggtccagggcttgtttgacaacttcctgcgtctgcggctgcgagactccagcctgggtgctgtgtgtgtggccctcgactggctggccttcgatgacctgctggcgggggctgctcatcacagccagagcttccagctgctgcgctacccacccttcctgcccgtggccttccatgtgctgtttgcttccagccacacacccaggatcaccttccccagcagccagcaggaggcccagaaccggatgagccagatgaggaacctgatccagacgctggtgtccggcatcgcgccagccacgcgcagccgggccacgccccaggccctgctcctcgatgccctctgcctgctcctggacattcttgcacccaagctccgccccgtgagcacacagctgtacagcacccgtgaaaagcaacagctggccagcctggtgggcacgatgctcgcttacagcctgacctaccgccaggagcgcacgcccgatggccagtacatctacaggctggagccgaacgtggaggaactctgccgcttccctgagctgcctgcccgcaagcccctcacctaccagacgaagcagctcatcgcccgcgagatcgaggtggagaagatgcggcgggcggaggcttctgcccgggtagagaacagcccccaggtggatgggagccccccagggctcgagggtctgctggggggcattggggagaaaggggtgcaccgacctgccccacgcaaccatgagcagcggctggagcacatcatgaggcgagcggcccgggaggaacagcctgagaaggacttctttggacgtgtggtcgtcaggagcacagcagtcccgagtgcaggggacacggccccggagcaggactcagtggagcggcgcatgggcacagcggtgggcaggagcgaggtctggttccgcttcaacgagggtgtctccaacgccgtgcggcgcagcctgtacatcagggacttgctctag

SEQ ID NO: 119556 - DNA, 2561 bp, Homo sapiens
  Payload ID: 3433
  Gene Symbol: CHTF8
  Gene Name: chromosome transmission fidelity factor 8
  Uniprot ID: P0CG12
  ENST ID: ENST00000306585
  CDS Start-End: 143-1717
tcaaacacactcctggggatcaggactgtgatgagcttggccgcgagactggcacccggtacctggtgacagcactcatcaaagacaagatccttttcaaaacccgccccaagcccattatcaccagcgtccccaagaaagtatgaaagaacctcggattttccctagagagcggccaactccttggactcgtgctccgctgccacctcgaggacggctcgacggttccctgggaccacaggggggtcctgttctgaacacaggccacccactgggtgtgaactcggatcccttccttatggcggccggttctcttggtggaaatctgaccccatttccaaggaacccatctccttttccagcttcatcaggctcattggcttcaaatccagcacctttcccggctggtgctcgtgacccaagtatggcttcttttccaagagggatgaatcccactggcacaggtgcagtttctttcccaaggcctggtggcctcttggggccaggcccaggcccaggccccaccctaaaccctaggacaggggctctgccaggcccagggcctctgtctaaccccaggttagggggtctcccaggaccaggtcctatgtccaacccaagggcaggtggtctcctgggagcaggtcctgaccccagaggtggtggtcccatgggccctggatctggacctaacctgagagccggtgttctgttaacctctgggaatggtcctcccaatcctaggccagttggcctgggcccaggaccaaaccccaatctgagatcaggctttttagggacaaaccctgcccccaggtcaggtgtgtttccaggcccaggccttgggcccaacccaagaccaagtggcctgggcccaggccctaatctagatgccagagcaggtggcctcttgggcacaggatctggtcttaacttaagaatggctggacctcaaggcctcgatcttgcccccattctaagagcagcaggtcttttaggagcaaattcagcttctttctcacaggcttctggaaacatgggcacaagcccatcctccatggcaagagtacctggccccatgggcccaaactcgggtcctagctctcggggaattggccttccagggccaaatccatctcccatgtcaagggctcctggccccataggccctaattcagctcatttctcaaggccagttggccccatgggggtaaatgccaatccctttcccaggggagcaggttcatctgccttttctcagtcttctggcacattggcatcaaacccagctaccttccaaaggtccgctggcctccagggctcaaatccaaccattttcccaagagcctctgggccacttggccccaacccagctaacttcccaagggccactggcctgcagggtccaagtccaactaccttcccaaggtctactggcccattaggccctggtcaagttactttccccaggccagctgccgggcatctgggcccttctccagctggccctgtgggtatcaacccagctcctttcacaaggccaactgggaccctgggtctcaacccagcttcctttccaaggatgaatggccctgcaggcaagagtttcgtcccatttcctagagtggggagcctccctggcacaaacccagctgctttccccagaccagggggtccaatggctgcaatgtacccaaatggaatgttgcccccttaaacaccattttccctccaggaccaccttggtttctaggcactgtggttcttggcaggggctgtcttaggtaaaagggtagttgtggagctacagtctgaagaacatagcttgggctcaagttcaaatgagccatctttttcctttgcgtttttcttgactgaaggtgagatgttatttgtggcatgtgaactgtggcaggtgggaataatcctgcccttgagagaaaggatctccagcctcccagaagcctgctgtgctttcgtcccacagctttctgcccattgtttcttactagtttcttgaattgttcttgtggacttttcctcagggatacattggcctgcaggtcccagttcacatgtagtcccctgctcaccattggagaatcagctcactgctctctagaaacgtggcgttggtgaacggaccatgcttccgtagctctgacctgggcagcttggacctggtcatcctctactgccatacctttccctgggggcttgaacacagaacagggagatggacaaccacttcaaagaaagacccaccgaatgcagtttctgcttgactgactgggcctgcagctcccttctcctgggacttagaggtggccagatttaaggcccctctactcatccaactccctcttcactggtactcccaatcaatcaaagaacctcaaaatttaaactgatgtggatgggaatatgggaattagggtgggggtgggggatgaagggaagaaatcactgtgctttgttcggcctggtgtgcaaggatggttggtggttttcctgcattgtatcttttcttactgtttctttaataaatgggatgagagggc

SEQ ID NO: 119557 - DNA, 1073 bp, Homo sapiens
  Payload ID: 3433
  Gene Symbol: CHTF8
  Gene Name: chromosome transmission fidelity factor 8
  Uniprot ID: P0CG13
  ENST ID: ENST00000398235
  CDS Start-End: 94-459
gggtggccgagcgcgggcggaggacggagaagggggcggcgagggccggaatctcgagcttgttttcacttgctttttaaagacagaaagctcatggtgcaaattgttatttccagtgcgagggctggaggcctggcagaatgggtgctgatggagctacagggggagatcgaggctcgctacagcactggattagctggaaacctcctgggagacctacattacaccactgagggaatccctgtgctgatcgtggggcatcatatcctgtatgggaaaatcatccacctggagaaaccttttgcagtccttgtcaaacacactcctggggatcaggactgtgatgagcttggccgcgagactggcacccggtacctggtgacagcactcatcaaagacaagatccttttcaaaacccgccccaagcccattatcaccagcgtccccaagaaagtatgaaagaacctcggattttccctagagagcggccaactccttggactcgtgctccgctgccacctcgaggacggctcgacggttccctgggaccacaggggggtcctgttctgaacacaggccacccactgggtgtgaactcggatcccttccttatggcggccggttctcttggtggaaatctgaccccatttccaaggaacccatctccttttccagcttcatcaggctcattggcttcaaatccagcacctttcccggctggtgctcgtgacccaagtatggcttcttttccaagagggatgaatcccactggcacaggtgcagtttctttcccaaggcctggtggcctcttggggccaggcccaggcccaggccccaccctaaaccctaggacaggggctctgccaggcccagggcctctgtctaaccccaggttagggggtctcccaggaccaggtcctatgtccaacccaagggcaggtggtctcctgggagcaggtcctgaccccagaggtggtggtcccatgggccctggatctggacctaacctgagagccggtgttctgttaacctctgggaatggtcctcccaatcctaggccagttggcctgggc

SEQ ID NO: 119558 - DNA, 2903 bp, Homo sapiens
  Payload ID: 3433
  Gene Symbol: CHTF8
  Gene Name: chromosome transmission fidelity factor 8
  Uniprot ID: P0CG13
  ENST ID: ENST00000448552
  CDS Start-End: 123-488
agtgctcgcggcggcggcgacggcggcgggaggttcggttgtcgcccgttggccgcgcggcgccgcgctcggcggccgccattgcagcttgttttcacttgctttttaaagacagaaagctcatggtgcaaattgttatttccagtgcgagggctggaggcctggcagaatgggtgctgatggagctacagggggagatcgaggctcgctacagcactggattagctggaaacctcctgggagacctacattacaccactgagggaatccctgtgctgatcgtggggcatcatatcctgtatgggaaaatcatccacctggagaaaccttttgcagtccttgtcaaacacactcctggggatcaggactgtgatgagcttggccgcgagactggcacccggtacctggtgacagcactcatcaaagacaagatccttttcaaaacccgccccaagcccattatcaccagcgtccccaagaaagtatgaaagaacctcggattttccctagagagcggccaactccttggactcgtgctccgctgccacctcgaggacggctcgacggttccctgggaccacaggggggtcctgttctgaacacaggccacccactgggtgtgaactcggatcccttccttatggcggccggttctcttggtggaaatctgaccccatttccaaggaacccatctccttttccagcttcatcaggctcattggcttcaaatccagcacctttcccggctggtgctcgtgacccaagtatggcttcttttccaagagggatgaatcccactggcacaggtgcagtttctttcccaaggcctggtggcctcttggggccaggcccaggcccaggccccaccctaaaccctaggacaggggctctgccaggcccagggcctctgtctaaccccaggttagggggtctcccaggaccaggtcctatgtccaacccaagggcaggtggtctcctgggagcaggtcctgaccccagaggtggtggtcccatgggccctggatctggacctaacctgagagccggtgttctgttaacctctgggaatggtcctcccaatcctaggccagttggcctgggcccaggaccaaaccccaatctgagatcaggctttttagggacaaaccctgcccccaggtcaggtgtgtttccaggcccaggccttgggcccaacccaagaccaagtggcctgggcccaggccctaatctagatgccagagcaggtggcctcttgggcacaggatctggtcttaacttaagaatggctggacctcaaggcctcgatcttgcccccattctaagagcagcaggtcttttaggagcaaattcagcttctttctcacaggcttctggaaacatgggcacaagcccatcctccatggcaagagtacctggccccatgggcccaaactcgggtcctagctctcggggaattggccttccagggccaaatccatctcccatgtcaagggctcctggccccataggccctaattcagctcatttctcaaggccagttggccccatgggggtaaatgccaatccctttcccaggggagcaggttcatctgccttttctcagtcttctggcacattggcatcaaacccagctaccttccaaaggtccgctggcctccagggctcaaatccaaccattttcccaagagcctctgggccacttggccccaacccagctaacttcccaagggccactggcctgcagggtccaagtccaactaccttcccaaggtctactggcccattaggccctggtcaagttactttccccaggccagctgccgggcatctgggcccttctccagctggccctgtgggtatcaacccagctcctttcacaaggccaactgggaccctgggtctcaacccagcttcctttccaaggatgaatggccctgcaggcaagagtttcgtcccatttcctagagtggggagcctccctggcacaaacccagctgctttccccagaccagggggtccaatggctgcaatgtacccaaatggaatgttgcccccttaaacaccattttccctccaggaccaccttggtttctaggcactgtggttcttggcaggggctgtcttaggtaaaagggtagttgtggagctacagtctgaagaacatagcttgggctcaagttcaaatgagccatctttttcctttgcgtttttcttgactgaaggtgagatgttatttgtggcatgtgaactgtggcaggtgggaataatcctgcccttgagagaaaggatctccagcctcccagaagcctgctgtgctttcgtcccacagctttctgcccattgtttcttactagtttcttgaattgttcttgtggacttttcctcagggatacattggcctgcaggtcccagttcacatgtagtcccctgctcaccattggagaatcagctcactgctctctagaaacgtggcgttggtgaacggaccatgcttccgtagctctgacctgggcagcttggacctggtcatcctctactgccatacctttccctgggggcttgaacacagaacagggagatggacaaccacttcaaagaaagacccaccgaatgcagtttctgcttgactgactgggcctgcagctcccttctcctgggacttagaggtggccagatttaaggcccctctactcatccaactccctcttcactggtactcccaatcaatcaaagaacctcaaaatttaaactgatgtggatgggaatatgggaattagggtgggggtgggggatgaagggaagaaatcactgtgctttgttcggcctggtgtgcaaggatggttggtggttttcctgcattgtatcttttcttactgtttctttaataaatgggatgagagggc

SEQ ID NO: 119559 - DNA, 856 bp, Homo sapiens
  Payload ID: 3433
  Gene Symbol: CHTF8
  Gene Name: chromosome transmission fidelity factor 8
  ENST ID: ENST00000519520
  CDS Start-End: 137-175
ggaagtgcgcaggcagtgctcgcggcggcggcgacggcggcgggaggttcggttgtcgcccgttggccgcgcggcgccgcgctcggcggccgccattgcagcttgttttcacttgctttttaaagacagaaagctcatggtgcaaattgttatttccagggaatccctgtgctgatcgtggggcatcatatcctgtatgggaaaatcatccacctggagaaaccttttgcagtccttgtcaaacacactcctggggatcaggactgtgatgagcttggccgcgagactggcacccggtacctggtgacagcactcatcaaagacaagatccttttcaaaacccgccccaagcccattatcaccagcgtccccaagaaagtatgaaagaacctcggattttccctagagagcggccaactccttggactcgtgctccgctgccacctcgaggacggctcgacggttccctgggaccacaggggggtcctgttctgaacacaggccacccactgggtgtgaactcggatcccttccttatggcggccggttctcttggtggaaatctgaccccatttccaaggaacccatctccttttccagcttcatcaggctcattggcttcaaatccagcacctttcccggctggtgctcgtgacccaagtatggcttcttttccaagagggatgaatcccactggcacaggtgcagtttctttcccaaggcctggtggcctcttggggccaggcccaggcccaggccccaccctaaaccctaggacaggggctctgccaggcccagggcctctgtctaaccccaggttagggggtctcccaggaccaggtcctatgtccaaccc

SEQ ID NO: 119560 - DNA, 475 bp, Homo sapiens
  Payload ID: 3433
  Gene Symbol: CHTF8
  Gene Name: chromosome transmission fidelity factor 8
  ENST ID: ENST00000520529
  CDS Start-End: 99-137
ggaaagggtggccgagcgcgggcggaggacggagaagggggcggcgagggccggaatctcgagcttgttttcacttgctttttaaagacagaaagctcatggtgcaaattgttatttccagggaatccctgtgctgatcgtggggcatcatatcctgtatgggaaaatcatccacctggagaaaccttttgcagtccttgtcaaacacactcctggggatcaggactgtgatgagcttggccgcgagactggcacccggtacctggtgacagcactcatcaaagacaagatccttttcaaaacccgccccaagcccattatcaccagcgtccccaagaaagtatgaaagaacctcggattttccctagagagcggccaactccttggactcgtgctccgctgccacctcgaggacggctcgacggttccctgggaccacaggggggtcctgttctgaacacaggccacccactgg

SEQ ID NO: 119561 - DNA, 831 bp, Homo sapiens
  Payload ID: 3433
  Gene Symbol: CHTF8
  Gene Name: chromosome transmission fidelity factor 8
  ENST ID: ENST00000522497
  CDS Start-End: 1-433
ggcagtgctcgcggcggcggcgacggcggcgggaggttcggttgtcgcccgttggccgcgcggcgccgcgctcggcggccgccattgcagtgcgagggctggaggcctggcagaatgggtgctgatggagctacagggggagatcgaggctcgctacagcactggattagctggaaacctcctgggagacctacattacaccactgagggaatccctgtgctgatcgtggggcatcatatcctgtatgggaaaatcatccacctggagaaaccttttgcagtccttgtcaaacacactcctggggatcaggactgtgatgagcttggccgcgagactggcacccggtacctggtgacagcactcatcaaagacaagatccttttcaaaacccgccccaagcccattatcaccagcgtccccaagaaagtatgaaagaacctcggattttccctagagagcggccaactccttggactcgtgctccgctgccacctcgaggacggctcgacggttccctgggaccacaggggggtcctgttctgaacacaggccacccactgggtgtgaactcggatcccttccttatggcggccggttctcttggtggaaatctgaccccatttccaaggaacccatctccttttccagcttcatcaggctcattggcttcaaatccagcacctttcccggctggtgctcgtgacccaagtatggcttcttttccaagagggatgaatcccactggcacaggtgcagtttctttcccaaggcctggtggcctcttggggccaggcccaggcccaggccccaccctaaaccctaggacaggg

SEQ ID NO: 119562 - DNA, 567 bp, Homo sapiens
  Payload ID: 3433
  Gene Symbol: CHTF8
  Gene Name: chromosome transmission fidelity factor 8
  ENST ID: ENST00000518041
  CDS Start-End: 35-211
ttgttttcacttgctttttaaagacagaaagctcatggtgcaaattgttatttccagtgcgagggctggaggcctggcagaatgggtgctgatggagctacagggggagatcgaggctcgctacagcactggattagctggaaacctcctgggagacctacattacaccactgagggatacattggcctgcaggtcccagttcacatgtagtcccctgctcaccattggagaatcagctcactgctctctagaaacgtggcgttggtgaacggaccatgcttccgtagctctgacctgggcagcttggacctggtcatcctctactgccatacctttccctgggggcttgaacacagaacagggagatggacaaccacttcaaagaaagacccaccgaatgcagtttctgcttgactgactgggcctgcagctcccttctcctgggacttagaggtggccagatttaaggcccctctactcatccaactccctcttcactggtactcccaatcaatcaaagaacctcaaaatttaaactgatgtggatgggaatatgggaattaggg

SEQ ID NO: 119563 - DNA, 766 bp, Homo sapiens
  Payload ID: 3433
  Gene Symbol: CHTF8
  Gene Name: chromosome transmission fidelity factor 8
  ENST ID: ENST00000523421
  CDS Start-End: 120-347
gctcgcggcggcggcgacggcggcgggaggttcggttgtcgcccgttggccgcgcggcgccgcgctcggcggccgccattgcagcttgttttcacttgctttttaaagacagaaagctcatggtgcaaattgttatttccagtgcgagggctggaggcctggcagaatgggtgctgatggagctacagggggagatcgaggctcgctacagcactggattagctggaaacctcctgggagacctacattacaccactgagcttcatcaggctcattggcttcaaatccagcacctttcccggctggtgctcgtgacccaagtatggcttcttttccaagagggatgaatcccactggcacagggatacattggcctgcaggtcccagttcacatgtagtcccctgctcaccattggagaatcagctcactgctctctagaaacgtggcgttggtgaacggaccatgcttccgtagctctgacctgggcagcttggacctggtcatcctctactgccatacctttccctgggggcttgaacacagaacagggagatggacaaccacttcaaagaaagacccaccgaatgcagtttctgcttgactgactgggcctgcagctcccttctcctgggacttagaggtggccagatttaaggcccctctactcatccaactccctcttcactggtactcccaatcaatcaaagaacctcaaaatttaaactgatgtggatgggaatatgggaattagggtgggggtggggg

SEQ ID NO: 119564 - DNA, 734 bp, Homo sapiens
  Payload ID: 3433
  Gene Symbol: CHTF8
  Gene Name: chromosome transmission fidelity factor 8
  ENST ID: ENST00000567763
  CDS Start-End: 1-314
gcagtgctcgcggcggcggcgacggcggcgggaggttcggttgtcgcccgttggccgcgcggcgccgcgctcggcggccgccattgcagggaatccctgtgctgatcgtggggcatcatatcctgtatgggaaaatcatccacctggagaaaccttttgcagtccttgtcaaacacactcctggggatcaggactgtgatgagcttggccgcgagactggcacccggtacctggtgacagcactcatcaaagacaagatccttttcaaaacccgccccaagcccattatcaccagcgtccccaagaaagtatgaaagaacctcggattttccctagagagcggccaactccttggactcgtgctccgctgccacctcgaggacggctcgacggttccctgggaccacaggggggtcctgttctgaacacaggccacccactgggtgtgaactcggatcccttccttatggcggccggttctcttggtggaaatctgaccccatttccaaggaacccatctccttttccagcttcatcaggctcattggcttcaaatccagcacctttcccggctggtgctcgtgacccaagtatggcttcttttccaagagggatgaatcccactggcacaggtgcagtttctttcccaaggcctggtggcctcttggggccaggcccaggcccaggccccaccctaaaccctaggacaggggctctgccaggcccagggcctc

SEQ ID NO: 119565 - DNA, 863 bp, Homo sapiens
  Payload ID: 3433
  Gene Symbol: CHTF8
  Gene Name: chromosome transmission fidelity factor 8
  ENST ID: ENST00000522091
  CDS Start-End: 131-430
gcgcaggcagtgctcgcggcggcggcgacggcggcgggaggttcggttgtcgcccgttggccgcgcggcgccgcgctcggcggccgccattgcagcttgttttcacttgctttttaaagacagaaagctcatggtgcaaattgttatttccagtgcgagggctggaggcctggcagaatgggtgctgatggagctacagggggagatcgaggctcgctacagcactggattagctggaaacctcctgggagacctacattacaccactgaggtgagggggcttttctttccctgcctaatgcctcaggaaagcaagctacaccaaggtggtgctcccaggacccagagtgaggactgcctcaggtttgttattcaaggcctagctaatctgcgatgctctctgcttgttctccccctacctctgcagtagcagggaaatttaattttggggaatctggaaagctcacatttctgaaagtggaaattctcctatgtggggctagaaagtaaaaagggcacatgggtgggtggtccagtgtggctgctcaacaatggcagagccagaccagggattggaggtgccagcatagcctgccaagagcagctttaggaggcgcctgagtgttatggccttgccccggaacctcaggaatctcgttcttgttctgccaaagggaatccctgtgctgatcgtggggcatcatatcctgtatgggaaaatcatccacctggagaaaccttttgcagtccttgtcaaacacactcctggggatcaggactgtgatgagcttggccgcgagactggcacccggtacctggtgacagcactcatcaaagacaagatccttttcaaaacccgcccc

SEQ ID NO: 119566 - DNA, 723 bp, Homo sapiens
  Payload ID: 3433
  Gene Symbol: CHTF8
  Gene Name: chromosome transmission fidelity factor 8
  ENST ID: ENST00000519534
  CDS Start-End: 1-198
catatcctgtatgggaaaatcatccacctggagaaaccttttgcagtccttgtcaaacacactcctggggatcaggactgtgatgagcttggccgcgagactggcacccggtacctggtgacagcactcatcaaagacaagatccttttcaaaacccgccccaagcccattatcaccagcgtccccaagaaagtatgaaagaacctcggattttccctagagagcggccaactccttggactcgtgctccgctgccacctcgaggacggctcgacggttccctgggaccacaggggggtcctgttctgaacacaggccacccactgggtgtgaactcggatcccttccttatggcggccggttctcttggtggaaatctgaccccatttccaaggaacccatctccttttccagcttcatcaggctcattggcttcaaatccagcacctttcccggctggtgctcgtgacccaagtatggcttcttttccaagagggatgaatcccactggcacagggatacattggcctgcaggtcccagttcacatgtagtcccctgctcaccattggagaatcagctcactgctctctagaaacgtggcgttggtgaacggaccatgcttccgtagctctgacctgggcagcttggacctggtcatcctctactgccatacctttccctgggggcttgaacacagaacagggagatggacaaccacttca

SEQ ID NO: 119567 - DNA, 1855 bp, Homo sapiens
  Payload ID: 3434
  Gene Symbol: CXorf21
  Gene Name: chromosome X open reading frame 21
  Uniprot ID: Q9HAI6
  ENST ID: ENST00000378962
  CDS Start-End: 324-1229
acaaatcggacttgaacaaaaacaactctttttccatgggaccaattataaaaagaatggctttgcactgagcagctcagtctactggtctcatcagtgaaaggcttgtgaaaatttctggaaagagcattggctggcttgttcatctctctgtttggtcagttgctgtgtttctgccggatcagatgagcagattggttagtgaaggtcagtgtgagaagaagattgtttctgagcttgagaagcttctggaggattgaagagtatttgaagtctgtgtcaaacatccatatcataagtggaattttggagatattcaaagaatgctgtcagaagggtatctcagtggacttgagtactggaatgacatccactggagttgtgcctcttataatgagcaggtggctggggaaaaggaagaggagacaaattctgttgctaccctttcctattcctctgtggatgaaacacaagtcagaagtctctacgtgagctgcaaatcatctggcaagtttatctcttcagtgcattcaagagagagccaacatagcagaagtcagagagtcacagtgctgcagacaaaccccaatcctgtgtttgaaagcccaaacttggctgcagttgaaatatgtagagatgccagcagagagacctacttggttccatcttcttgcaaaagtatttgcaagaattataatgacttacagattgcagggggccaggtgatggccattaattcagtgacaacagattttccctctgagagcagttttgaatatggccctttgctgaagtcatctgagattcctttacccatggaggattccatttctactcagcccagtgactttccccaaaaacctatccagcggtactcatcctattggagaataacaagcatcaaagagaaaagcagcttgcaaatgcagaatcctatttctaatgcagttctgaatgagtacctggagcagaaggttgtggagttatataaacagtacattatggacaccgtgtttcatgacagttctcctacccagattctggcgtctgaactcatcatgacaagtgtagaccaaatcagtcttcaagtgtctagagagaagaatctggagacctcaaaagccagagatatagtctttagccgcctattgcaattgatgtcaactgaaattactgaaattagcactcctagtctccatatttctcagtatagcaatgtaaatccatagagaggatgcttccattactgtctcgcatttacttaaacatgaagcaacactttatccatttattctgagaatgtgcaggaggggttagtgaaggggaattaagggctagagaagtaaagatcagctggaagtcatgtgtgaatcatggagaaatctcataatattacacttgatgaaggaatatggtaagaggagccataaggaatgatttcaaagagaggtgtgtacagcaaggaagcaaaaataaaaatgatcaaaaaagaaacggttaattcatttgaagaaacataggaattaaaaaagaagacagtcaaatgagatgaaacaaaaaggccaaaaggtggccgggtgtagtggctcacgcctgtaatcccagcatttcggaggctgatgtgggtggattacctgacgtcaggaattcgagaccggcctggccaatatggtgaaaccccatctctactaaaaatacaaaaaattagctggacatggtggtgggtacctgtaatcccagctactagggaggctgaggcaggagaatctcttgaacctgagaggcagaggttgcagtgagccgaggtcgctccattgcactccagcctgggcaacaagagtgagactcccgtctc

SEQ ID NO: 119568 - DNA, 2272 bp, Homo sapiens
  Payload ID: 3435
  Gene Symbol: CXorf23
  Gene Name: chromosome X open reading frame 23
  ENST ID: ENST00000340625
  CDS Start-End: 1-703
aagtcaaaaacttcctgatgtgaaaccctcgcctatcaatcttaggaagaaatcacttacagttaaagtagatgtgaagaaaacagtagatacattcagggttgcttctagctattccacagagagacagatgtcacatgatttggttgctgttggcaggaaaagtgagaactttcatccagtgtttgaacatcttgactcaactcagaatactgaaaacaaacctacaggagaatttgctcaggaaatcataacaataatccatcaagttaaagcaaattattttccatcacctggcattactttacatgagcgtttctcaacaatgcaagatatacacaaggcagatgtaaatgaaattccattgaattcagatccagaaatacacaggagaatagatatgtctttggccgagcttcagagtaaacaagctgtgatctatgaatcggaacagactctgatcaaaataatagatccaaatgacctacgacatgacattgaaagaaggcgaaaagaacggttacagaatgaagatgagcacatttttcacatagctagtgctgcagagagggatgatcagaattccagtttttcaaagggtctcgctctgtcacccagactggagtgtggtgtcacaatcacagcttactgcagcctctacctccaagactcaagctatctcccacctcagcctcctgagtagctgggactacaggcatgagccaccatgcccagctaagaataaaaattaaaaatatatatattgatatataaaatgagctaggaagccagcttgagagaaacctactttctcaccatcattgactctttctgttttaacatctataaggcctagaatccaggacagctccaagtaccagacagtttttcatctgtttttttgttttgttttgtttgagacagggtctcactctgtcacccaggctggagcgcagtggcactcttttgtacttttcaagcatagagaacagtgactcgctgcaacgtccgcctcccaggttcaagcaattctcctgccttagcctcctgagtagctgggattacaggcgcctgccaccacgcctggctaatttttgtatttttagtagagacggggtttcaccatgttggccaggctggtctcgaactcctgacctcaagcgatcagcttgaggagttctgcctcagtctcccaaagtgctgggattacaggcgtgagctactgcacccaaccacccactcatctgtttactaataaagtagacttggaaggtgtagttttagcatttaattccttttttttccttcacagagcaactttagaggtggcagatgccagcccaattataaatcaggcctggtacagaagagcttgtacattcaggctaagtatcagcgtttacggttcactggcccaaggggatttatcactcataagttcagagaaagattaatgagaaaaaagaaggttagttgaattaaaatgatttaaaaatgtttagtgacttttaaactcctagattatctatgttcattagataaattggtttctcatttaattttaagaaacaacctgggtttttaaatgttcttgttgcatgatagttgaataagatcttcagggagtaatggtaatacagttgtgaggctgtgtaaccttaaaatgcttttaggcattatgccttgaatactttgcatatgttagctgtttgaacttttgactttagaatttctgttgtatggttaatctttgaaatggaaactcaggtaaaggcttttaattgatgtattttaatcttatacaaagtgaattatctgaatgccaaaaatatattgaatatatacaaagggtgcataattgcaaaatacactaactcttttccccattcatatatttttttgttgtggtaaaatatgtataatataaaatttgccattttaaccatttttaagtagcatcaagtacatacagttcagcgacactaatttcattcacagtgctatgcaatcatcaccattatatgttcttttgcaatttatgtttttaattgacaagtaaaaattatatatatttatggtgttcaacatgatgttttgatgtatgtatacattgtggaatggctaaatcaagctatttaaaatacccattacctcacatacttatttttttgtattgagaacacttaaaatctactctgttagcaattttcaggtgtacaatatattgtaattaactgtagtcaccatgatgtataatacatcttttgaacgt

SEQ ID NO: 119569 - DNA, 3217 bp, Homo sapiens
  Payload ID: 3435
  Gene Symbol: CXorf23
  Gene Name: chromosome X open reading frame 23
  Uniprot ID: A2AJT9
  ENST ID: ENST00000379682
  CDS Start-End: 35-2170
tgtaaaaagtggatagtggctcacgtgtcaaaggatggcacggtcacgatctagatcccccaggtggaaacacaggtctttatcaccagtacctagaaatgctgaacactacaagcaaagacattcacacgggcattatggctgtgaatataggaaggatccaaaaagacccgtcgcgtggagaatggacagtgagaaacatggacagagtaaaccaaggattccctctcgtggaaatatatattaccagtcttatgaacatagatcaccttcccctaacataagaaactctttagaaaatgtttatatgtataagcctcacagaggatattcgcctggaagaggggacagtaacaggagagctcagtatatgcccaaatactcagagggtataccctacaaagagcatgaaaggaattcttatccccagaaagtgcaaggagggcatagtcctgatgaccacagagttagaggaagtggaaaaggagggaaaccacctcagaggtcaatagcagattcttttagatttgaaggaaagtggcatgaagatgagttgaggcaccagaggatacaagaagaaaaatactcccagtcaactagaagaggctctgaagactttgagacaaggagctcatttcagaagaggtatcctgaggatcgtgatttcagaaaatatggacacacatcaaaaagacctaaagacgtggagaggtatgaaagcagagagcctgccaggaacccaaagtggaagcctgagcattccctcccaccttaccaagaggacacagaccagtggaaccttgggccccaaacttatcgacatgctgagagggaacacccagagaccagttcagcaaccaaagtatcctatgactatcgtcacaaacgtcctaagctcttggatggggaccaggacttttctgatgggagaactcagaagtactgtaaggaagaagatagaaaatatagttttcaaaaaggccctctaaatagagagttagattgttttaatactggaagagggagagagactcaagatggacaagtcaaagaaccttttaaaccgtctaagaaagacagcattgcctgtacttattcaaataaaaatgatgttgatttgcgatctagtaatgacaaatggaaggaaaaaataaagaaagaaggggattgtagaaaagagagcaattcttccagtaaccaacttgataaaagtcaaaaacttcctgatgtgaaaccctcgcctatcaatcttaggaagaaatcacttacagttaaagtagatgtgaagaaaacagtagatacattcagggttgcttctagctattccacagagagacagatgtcacatgatttggttgctgttggcaggaaaagtgagaactttcatccagtgtttgaacatcttgactcaactcagaatactgaaaacaaacctacaggagaatttgctcaggaaatcataacaataatccatcaagttaaagcaaattattttccatcacctggcattactttacatgagcgtttctcaacaatgcaagatatacacaaggcagatgtaaatgaaattccattgaattcagatccagaaatacacaggagaatagatatgtctttggccgagcttcagagtaaacaagctgtgatctatgaatcggaacagactctgatcaaaataatagatccaaatgacctacgacatgacattgaaagaaggcgaaaagaacggttacagaatgaagatgagcacatttttcacatagctagtgctgcagagagggatgatcagaattccagtttttcaaaggtaaagaatgttcatactgatggattccaaaaacccacacattttataaaatcaaattttagaaaatgtattgaaaaaccttacatgaattatactacgcagagaaaagacataattactcacaaaccatttgaggttgagggaaaccaccgaaacacaagagtaagaccttttaagagcaactttagaggtggcagatgccagcccaattataaatcaggcctggtacagaagagcttgtacattcaggctaagtatcagcgtttacggttcactggcccaaggggatttatcactcataagttcagagaaagattaatgagaaaaaagaaggaatatacagatgttgccacaggaatctaatctgaaatcgtacaaatggaaatgacgctacaggaggatgtttgggagcatctctctctttttgtcaggagttagaagtgacactaaggcactaatactgtaacttcttgataaaataactttattttttagtagtggaatgctgcaacttttttacacctaacaattgcttttaaattacagtattcaatttaaaagttgtattaactacagtttcctttgcaaaaagtctcaaaagaatcacttgaagggcattatttgttgatgcatttttctctgagcatggtttcatagagagaacttcaccaagtaatattcagacgtttatatgttgaaagttttgcttacataataaaaacaaaaacaagtgtctgaattgtatagtgtctttacatgaaagaactttaaacagtggccttatggtagaaaattttataccagatttttctttttctgatgacattttggcttataactcgaagttttcttaagtttctgaagatcaaggcctatataattcatacatttcatattataagaaggcaagagacaaggtgcttcaaatattccatcaggtagttgtgagtgcactgaatttttagtaatatgttcattcagtttttttccacaactatttgctcttttccaatttcaaaatgctattgtggaaaatatgtaaagattttgtaatctatagtccatcttatttttccctcagggcaagcttgtgcatatcatatttttaaaggctttttaaaaatctgacaaacaaaatctcatatttgaaaattgtactttactactacagcattacacattttgcaagcacatcttatagagtgtttacttttagttcagttgatatgtattgcatacctactatgtgtaagagcaaatggatgggatttttaaatgaaatttttaggccccaataccttatttctttatgttttctgtgttctgcttaacagtacatatacattcccaattacatttttgtgaaatgtttatttgtaataaaataaaatgttgttgctctttctgctt

SEQ ID NO: 119570 - DNA, 6528 bp, Homo sapiens
  Payload ID: 3435
  Gene Symbol: CXorf23
  Gene Name: chromosome X open reading frame 23
  Uniprot ID: A2AJT9
  ENST ID: ENST00000379687
  CDS Start-End: 35-2083
tgtaaaaagtggatagtggctcacgtgtcaaaggatggcacggtcacgatctagatcccccaggtggaaacacaggtctttatcaccagtacctagaaatgctgaacactacaagcaaagacattcacacgggcattatggctgtgaatataggaaggatccaaaaagacccgtcgcgtggagaatggacagtgagaaacatggacagagtaaaccaaggattccctctcgtggaaatatatattaccagtcttatgaacatagatcaccttcccctaacataagaaactctttagaaaatgtttatatgtataagcctcacagaggatattcgcctggaagaggggacagtaacaggagagctcagtatatgcccaaatactcagagggtataccctacaaagagcatgaaaggaattcttatccccagaaagtgcaaggagggcatagtcctgatgaccacagagttagaggaagtggaaaaggagggaaaccacctcagaggtcaatagcagattcttttagatttgaaggaaagtggcatgaagatgagttgaggcaccagaggatacaagaagaaaaatactcccagtcaactagaagaggctctgaagactttgagacaaggagctcatttcagaagaggtatcctgaggatcgtgatttcagaaaatatggacacacatcaaaaagacctaaagacgtggagaggtatgaaagcagagagcctgccaggaacccaaagtggaagcctgagcattccctcccaccttaccaagaggacacagaccagtggaaccttgggccccaaacttatcgacatgctgagagggaacacccagagaccagttcagcaaccaaagtatcctatgactatcgtcacaaacgtcctaagctcttggatggggaccaggacttttctgatgggagaactcagaagtactgtaaggaagaagatagaaaatatagttttcaaaaaggccctctaaatagagagttagattgttttaatactggaagagggagagagactcaagatggacaagtcaaagaaccttttaaaccgtctaagaaagacagcattgcctgtacttattcaaataaaaatgatgttgatttgcgatctagtaatgacaaatggaaggaaaaaataaagaaagaaggggattgtagaaaagagagcaattcttccagtaaccaacttgataaaagtcaaaaacttcctgatgtgaaaccctcgcctatcaatcttaggaagaaatcacttacagttaaagtagatgtgaagaaaacagtagatacattcagggttgcttctagctattccacagagagacagatgtcacatgatttggttgctgttggcaggaaaagtgagaactttcatccagtgtttgaacatcttgactcaactcagaatactgaaaacaaacctacaggagaatttgctcaggaaatcataacaataatccatcaagttaaagcaaattattttccatcacctggcattactttacatgagcgtttctcaacaatgcaagatatacacaaggcagatgtaaatgaaattccattgaattcagatccagaaatacacaggagaatagatatgtctttggccgagcttcagagtaaacaagctgtgatctatgaatcggaacagactctgatcaaaataatagatccaaatgacctacgacatgacattgaaagaaggcgaaaagaacggttacagaatgaagatgagcacatttttcacatagctagtgctgcagagagggatgatcagaattccagtttttcaaagaattatactacgcagagaaaagacataattactcacaaaccatttgaggttgagggaaaccaccgaaacacaagagtaagaccttttaagagcaactttagaggtggcagatgccagcccaattataaatcaggcctggtacagaagagcttgtacattcaggctaagtatcagcgtttacggttcactggcccaaggggatttatcactcataagttcagagaaagattaatgagaaaaaagaaggaatatacagatgttgccacaggaatctaatctgaaatcgtacaaatggaaatgacgctacaggaggatgtttgggagcatctctctctttttgtcaggagttagaagtgacactaaggcactaatactgtaacttcttgataaaataactttattttttagtagtggaatgctgcaacttttttacacctaacaattgcttttaaattacagtattcaatttaaaagttgtattaactacagtttcctttgcaaaaagtctcaaaagaatcacttgaagggcattatttgttgatgcatttttctctgagcatggtttcatagagagaacttcaccaagtaatattcagacgtttatatgttgaaagttttgcttacataataaaaacaaaaacaagtgtctgaattgtatagtgtctttacatgaaagaactttaaacagtggccttatggtagaaaattttataccagatttttctttttctgatgacattttggcttataactcgaagttttcttaagtttctgaagatcaaggcctatataattcatacatttcatattataagaaggcaagagacaaggtgcttcaaatattccatcaggtagttgtgagtgcactgaatttttagtaatatgttcattcagtttttttccacaactatttgctcttttccaatttcaaaatgctattgtggaaaatatgtaaagattttgtaatctatagtccatcttatttttccctcagggcaagcttgtgcatatcatatttttaaaggctttttaaaaatctgacaaacaaaatctcatatttgaaaattgtactttactactacagcattacacattttgcaagcacatcttatagagtgtttacttttagttcagttgatatgtattgcatacctactatgtgtaagagcaaatggatgggatttttaaatgaaatttttaggccccaataccttatttctttatgttttctgtgttctgcttaacagtacatatacattcccaattacatttttgtgaaatgtttatttgtaataaaataaaatgttgttgctctttctgcttaaataagttacttgccagtttgtgagagcattattttaattttgtttgagacttatagccttggatagcacctctgtttaaacagtgtttaaagcactgttctgtgcttacaaagacagagctttcaaaattaaaatgtgaaggttgataagaacttggtttttcatgactggatgtgaaaaatcttagtacattcagttttcttgtccatatctttaaaagagagggcagccttttccttaagtgagttcatgataaggggggcaagtgcacttgattcattgctaagcaggtaataaatttgggtagatggcctgtcttgtactgtgtacaatctctataggtcaggttttccaaacatatttagcattccacttatggtaagaaagaaatgcatgcacacaggtagtatggcaactttatattgtgttaggtacttataaaatctgtcttaaattttaaaataattgatttcatttactcccatattctaggggacagtaatgagctttgaatatttaatcatttgattgacaactatgtattgcacagatactgtactaaaattacagcaatgaacaagaagacaagacacatggaccctgcctttatggtacgaagagtctaataggaaaaatggacattaaacagaaatataacttggtaaatcgcctttatagctcgctttttatttattgtaacacataaaggtaagatggctgatttactattattcattccacaactgattccctatttggatattcttttggcactgtctcaatatgcaaagcgtgttatctgcaaaatacctgtgcagaaaacattgtgtgtataagatctaaagcctaaaaggaaaaaccaactttataatttagagtataaaataaggacagggaccgtgtctgtcttgtccaccatagtatccccagcacccagcttcctatttgacgtgtggtaagagttcattaaatattagttgaataatgaatgaataaatagggaataatagaatatgtttattaggaactacatgtgtaattttcatatggagattgaacaaaaggttatccatagcattttttattgactggaaagaatttgacttcttgaatgcataagacttgagaagagaagttttttttttttttcttttttttgataagtcccctaccattgcctcctcaccttcctccactacgtgctaggcccttcgctggtactgggaagacaaagataataagacacagtccctgctgtgaggaagctcatgcactgctgaagaagagattcacaaaaacaaagaatcacaatgtagagtaagtactttagtggacatatatacaaaaggttgagaggaaagttgacatttctgattcagcatcccctcgtcatgtttctttcctattggtttcaccaacctcagaaggcactattctgttggtggttttactggttttaaaaattgatgcattgggggaaactgggtaaattgtacgcgggatctctctgtattatttcttttatagctgcatgtgaatctagagttacttcaacataaatttcaatttgaagaattgcccatagtcttatcacagagaacactattataaatattttagatgatacattttcatttttttctattggaaaaaaactcgctacatttatgtgtaacaatttatgtagatgtatactatgtaccacattttacctaataaatcctacatttttgaatagttttttttttaaaaaaaagacggggatacttccaggcagaagcaagaaaagtaaagctggatgagaaactcttattgtctttattacccagcaaattcagtaaccaccaggcacaaattcaccaggaacaaccaagcaaggaaggaagaagaagctgatgcaacaaggtgtggtatgacttcatccctcgcccatccccagaagtagcactgagtaaaacaatggagatgacaaaaatattggtaacagtgggccccagtatggacaaaggcactgacgaggtgaccaggccacgtggaggagagtcaaggaaaactcttgggacaacgaagtctttgcttccatctcaggacctcagcagaaggggtaagattcaccaggactaggcatttcccaggtctcagagcagcctgggaaagccaaatcctgcagaagtcagagacacctttgactgtgtctagtgagttctggttctggacatttaatgggaacctagaagagaggggataccaggttccccaacaaagttccgtcaaataggatgattatgagctctgagtccattaaaatacagaatgaacatttaagaactgaggaatcatagatgtagaatagtatgtaaatgttataaatcttgacaaagaaaaattaatgtacattgacaaattcagacatggaggaggtaaagtgggataaagacttaagaactaaccgtctcatcattcatggccaggtgtcatgtcacgtcatgtcttaaaattataatatggggaaaaacgctagtgaccaaccttaagtttttccacaatcttttttttccttgaccttaatacagtggttctcaaagtgtggtcccagaccagcaacatcagcatcacctgagaacttgttaaaaatgcagattcttggccccaccccagacctcctgaatcagaaaccctgggggtggggccaagcaatctgtgatttaacaagtcctccaggggattctggcacatacttgagtttgagaataactggcttatttatcccttttaggaaccaatgaagaaacatttatctgaagttcagcagccccttcaatttaatgcctaattttttttctattgcattcaaataaagttaaatctaaaacttgtttgctggccgggcacagtgagtcacgcctgtaatcccagcactttgggaggccgaggcgagtggatcacttgaggtcaggagtttgagaccagcctggccaatatggtgaaaccccatctctaataaaaatacataaattagccgggcgcagtagcatgcacctgtaatcccagctacctgggaggctgaggcaggagaattgcttaaacccgggaggcgaaggttgcagtgaaccgaggccacgccattgcactccagcctgggcgacagagcgagactccatgtcaaaaaagaaaataaataaataaaacttgttagaataaaaagtttagggattccccccgtcaatcctgtctgtacatatgagtgaattgagaggtctggaaacatacccacccactgttaacactgttgatttttttaaatggtgggattatgagtgactgtactcttctgtatctatcaaatataatgaatgttgtatcatttttataaaataaagtctttcttttttaaaa

SEQ ID NO: 119571 - DNA, 2327 bp, Homo sapiens
  Payload ID: 3435
  Gene Symbol: CXorf23
  Gene Name: chromosome X open reading frame 23
  ENST ID: ENST00000472158
  CDS Start-End: 284-1006
ttttaaaccgtctaagaaagacagcattgcctgtacttattcaaataaaaatgatgttgatttgcgatctagtaatgacaaatggaaggaaaaaataaagaaagaaggggattgtagaaaagagagcaattcttccagtaaccaacttgataaaagtcaaaaacttcctgatgtgaaaccctcgcctatcaatcttaggaagaaatcacttacagttaaagtagatgtgaagaaaacagtagatacattcagggttgcttctagctattccacagagagacagatgtcacatgatttggttgctgttggcaggaaaagtgagaactttcatccagtgtttgaacatcttgactcaactcagaatactgaaaacaaacctacaggagaatttgctcaggaaatcataacaataatccatcaagttaaagcaaattattttccatcacctggcattactttacatgagcgtttctcaacaatgcaagatatacacaaggcagatgtaaatgaaattccattgaattcagatccagaaatacacaggagaatagatatgtctttggccgagcttcagagtaaacaagctgtgatctatgaatcggaacagactctgatcaaaataatagatccaaatgacctacgacatgacattgaaagaaggcgaaaagaacggttacagaatgaagatgagcacatttttcacatagctagtgctgcagagagggatgatcagaattccagtttttcaaagaattatactacgcagagaaaagacataattactcacaaaccatttgaggttgagggaaaccaccgaaacacaagagtaagaccttttaagagcaactttagaggtggcagatgccagcccaattataaatcaggcctggtacagaagagcttgtacattcaggctaagtatcagcgtttacggttcactggcccaaggggatttatcactcataagttcagagaaagattaatgagaaaaaagaaggtcccctagctctcaaagctagacaagccaagctggaaacgtgtcctactaattctcccagttctctttccaactttaatggtttcaagtcttctcatttccatcactcattcattactacatttgtttcatccattttaatggctgcatattattccactctgtggatatatgaattatttcagtggtcttcaacctttttgctccatactgtaaagttttgaaaagttatctaccttcttgcacattggaatatacagatgttgccacaggaatctaatctgaaatcgtacaaatggaaatgacgctacaggaggatgtttgggagcatctctctctttttgtcaggagttagaagtgacactaaggcactaatactgtaacttcttgataaaataactttattttttagtagtggaatgctgcaacttttttacacctaacaattgcttttaaattacagtattcaatttaaaagttgtattaactacagtttcctttgcaaaaagtctcaaaagaatcacttgaagggcattatttgttgatgcatttttctctgagcatggtttcatagagagaacttcaccaagtaatattcagacgtttatatgttgaaagttttgcttacataataaaaacaaaaacaagtgtctgaattgtatagtgtctttacatgaaagaactttaaacagtggccttatggtagaaaattttataccagatttttctttttctgatgacattttggcttataactcgaagttttcttaagtttctgaagatcaaggcctatataattcatacatttcatattataagaaggcaagagacaaggtgcttcaaatattccatcaggtagttgtgagtgcactgaatttttagtaatatgttcattcagtttttttccacaactatttgctcttttccaatttcaaaatgctattgtggaaaatatgtaaagattttgtaatctatagtccatcttatttttccctcagggcaagcttgtgcatatcatatttttaaaggctttttaaaaatctgacaaacaaaatctcatatttgaaaattgtactttactactacagcattacacattttgcaagcacatcttatagagtgtttacttttagttcagttgatatgtattgcatacctactatgtgtaagagcaaatggatgggatttttaaatgaaatttttaggccccaataccttatttctttatgttttctgtgttctgcttaacagtacatatacattcccaattacatttttgtgaaatgtttatttgtaataaaataaaatgttgttgctctttctgcttaaa

SEQ ID NO: 119572 - DNA, 2513 bp, Homo sapiens
  Payload ID: 3436
  Gene Symbol: CXorf36
  Gene Name: chromosome X open reading frame 36
  Uniprot ID: Q9H7Y0
  ENST ID: ENST00000377934
  CDS Start-End: 76-624
ctctttggccaagccctgcctctgtacagcctcgagtggacagccagaggctgcagctggagcccagagcccaagatggagccccagctggggcctgaggctgccgccctccgccctggctggctggccctgctgctgtgggtctcagccctgagctgttctttctccttgccagcttcttccctttcttctctggtgccccaagtcagaaccagctacaattttggaaggactttcctcggtcttgataaatgcaatgcctgcatcgggacatctatttgcaagaagttctttaaagaagaaataagatctgacaactggctggcttcccaccttggactgcctcccgattccttgctttcttatcctgcaaattactcagatgattccaaaatctggcgccctgtggagatctttagactggtcagcaaatatcaaaacgagatctcagacaggagaatctgtgcctctgcatcagccccaaagacctgcagcattgagcgtgtcctgcggaaaacagagaggttccagaaatggctgcaggccaagcgcctcacgccggacctggtgcaggactgtcaccagggccagagagaactaaagttcctgtgtatgctgagataacaccagtgaaaaagcctggcatggagcccagcactgagaacttccagaaagtgttagccttctcccaactgtgttataccaaccacattttcaaatagtaatcattaaagaggcttctgcatcaaaccttcacatgcagctcccatgccaccctccagaattcaccaacacacaggcccaccagcaacaggctacctttgcacaatattctctgatgacaactccaaagccccggctctttccaccacactgtggtcccctagatggggctgttgctgagcccaccccaatccagatgtgatccccctgtgatctacttctggcaagattctcagtctggacaggtcttccctatgagatagaacctgataaggagctagggcaattctgacaacattaccaaaggcccacataacttctaaattttggtctggtctgaaggaaaacctgttcttgccctagtgatggatgaactctcttatctctggcttctagagggaaaaaaaagcatacctcttttactttttaagtacctccatcagagtcatgaaatcacctgtcaagactatctatcttttatgtttccattctggtaagaactctttaaatgaggacactgctgattgctggtgatgttttttgagcaaacactcgggggtatggatgaaagccaatcgcaggtcaaatgactccttggggaagctacttctcctctattcagatttcactaaaatcttccaagatgaaagcaaatctagatttcggtcttcattgctgtccatttttgtaatgaacgagtgtttttcctttagctagtgtatcaggcagggttctaccagagaaacagaaccagtaggagatacatatacatgtccagatttatttcaaagaattgatttacatgattgtggggattggcaagtccaaaatccatatggtaggcctgcaatctgtaaacctttgggcaggagctgatgctgtagtttgcagatagaattccttgttccttaaaaaaatctgtttttgttcttaagggctttgaatgattggatcaggcccacccagattacctagataatctcttttacttaaagtaaactgattgtaggtgctaatcacatctatgaaatgccttcacagcaacacctagattagcattcaattgaataactggggaatacagcctagccaagttgacacataaaattaaccatcacagcaacatgcctgctaaattttatcgaccgtcttcagactgttaaggattgtggtagagaactgtgacagccactctcagcatcaccctgaaccaaaggcccctatcaagtaacaatatagccaagcaaaattccagtcaatagagacattgactggttggctggcttcccaagggatagcaccagacaagaaatgcaaggatgaggaaaccaggcacgggagagagaggggcaacagaggtccagggtttggttatctttttatttttcactgggaggtggtaagttagccctgttgcccatgtatgcagatgggagaagtgatttagaaactccaaagcaattggtaatccccaaaatgggtgtatctggtttgaaatgaaaccttattttattggaaatggttggtttcccaattctgtttgccattggccaatataattgtgggtttgcacatggccagcacatgccaaacagaagtagacaaaggtctcactctgtaagtgggaccttggggaggagctgcctccatcataaagggaggggttagtaaaaatggtctcttaagcctgttcctgctacagttatagaggttgctcagaaccttctcagcaaatatagcagttatctattgttgtgtattaaaccatttcaacacatagtggcttaaaa

SEQ ID NO: 119573 - DNA, 4655 bp, Homo sapiens
  Payload ID: 3436
  Gene Symbol: CXorf36
  Gene Name: chromosome X open reading frame 36
  Uniprot ID: Q9H7Y0
  ENST ID: ENST00000398000
  CDS Start-End: 76-1377
ctctttggccaagccctgcctctgtacagcctcgagtggacagccagaggctgcagctggagcccagagcccaagatggagccccagctggggcctgaggctgccgccctccgccctggctggctggccctgctgctgtgggtctcagccctgagctgttctttctccttgccagcttcttccctttcttctctggtgccccaagtcagaaccagctacaattttggaaggactttcctcggtcttgataaatgcaatgcctgcatcgggacatctatttgcaagaagttctttaaagaagaaataagatctgacaactggctggcttcccaccttggactgcctcccgattccttgctttcttatcctgcaaattactcagatgattccaaaatctggcgccctgtggagatctttagactggtcagcaaatatcaaaacgagatctcagacaggagaatctgtgcctctgcatcagccccaaagacctgcagcattgagcgtgtcctgcggaaaacagagaggttccagaaatggctgcaggccaagcgcctcacgccggacctggtgcagggcctggccagcccgctcctgcgctgcccttcgcagcgactcctggatcgcgtggtcaggcgctatgcagaggtggccgacgccggcagcatcttcatggaccacttcaccgaccgtgacaagctgcgcctgctctacacgctggctgtcaactcgcaccccatcctcctacagatcttccctggggctgagggatggccgctgcccaagtacctgggctcctgtggcagattcctcgtcagcaccagcaccagaccgctgcaggaattctatgatgcacccccagatcaggcagccgaccttgcctaccagctcctgggtgtcctggagtctttgaggagcaacgatttgaactatttcttctacttcacccacattgatgcaggcatgttcggcgtctttaacaacgggcatctgttcatccgggatgccagtgcagtgggcgtcatcgacaagcaggaaggcagccaagaagccaacagggcaggagagaataaagacatttttagctgcctggtttccggctgccaggcccagctgccctcctgcgaaagcatctctgagaagcagagcctggtgctggtgtgtcagaagttgctgcctcgacttctccaggggaggttcccctccccagtgcaagacgacatagactccatccttgttcagtgtggggacagcatccgcccagacccagaagtccttggggccgccagccagctgaaagacatcttgaggcccctgagaacgtgtgactccagatttgcctatcgttacccagattgcaaatataacgataagttctgaagggctggtgtctagctggccttggggacaacacgcttggctctccattctcccagtcgggttgctgcaaggtagaaagaagcagctcttttttaaagatgagaagaaaggcacactcatttcttagggactgagaggggagttgtgagataccacgtggctgtctctgctggctgggacgtcctggcaaagcccgcggtgggcatcagaagacctgggtgtggacgctcactcaatgtctttgagcctcagtttcctctgttctccaccagactctcctgagggtgaaagaagacacagatggagccaccactgagcatatatcccaagcatgggtcttgggacacatgctcaccacctccatcccaggtggttacaaagtgtgttctggaaaagcacagaggcggggagcatgagaaagagctgctcaggtcaggaggctggagtggagggaaggcaggggaaggacaggctccctgccactaccactttagactcggacaagaggggcccccttcctgctccctatggccctgcgtcactccccacaccatcgcgggatgaggagactgcaggccaaggggacatgcctgccaccacctagagcctggtacctgaggctccatacacctgcgcatggggcttctcgtggtgtgggaagaagccaggggtaagaagataaaggggggccggcgggggaccaatgtgttagcccaagtcttccaagaatatgtgtcaagatagagtgaatggaacaaagatttgttaggggaaatgattgtgtgtaaggaaagaaggagggagccggagaagattgggaggaccagtaagtcgagctgcaagctgagccccggtgaaggagagaatgtctggcaggagcttgctaagctcaaaatcaaagaaaggttcagcaaggctgtcagggtgtcctcaagacaaaggcagccatcagaagagccccgtgtctcccacaaatagaccccgttagcatccctgctgcactcagtggttggcggaaacagcaaagatagatttcagagcacagcagcaggggtccctggtcagccccgctccctagagcaggagatcttgagtgggagaacattcttgttgtagccacagctgaggccctggaccagctctctccacaccgcatgctccgagttgggactctaaggagtctaggaattttcattcaaacttggccttacaggtcactcatcagaaaaatacttttttcaaggtcaaccaatagaacatactttattcaacagtttgttagtttgctttttaaatatttagccacatggtatgtaggcttccatgtacactcttgccctggcccctgaaacataagcagggggctcttctgtacatttgcccagcttccctgccagcctttaaccccaggaacctctcagtctacctcctcttttctgcctctgaatccctacctttaaagtcagaacaggccaggcccggtggctcacgcctgtaatcccagcactttgggaggctgaggtgggtggatcacttgacatcagtagttcaagaccagcctggccaacatggtgaaaccccatccttactaaaaatacaaaaattagccaggtgtggtggcgggcacctgtaatcccagctactcaggaggctgaggcaggagaatcacttgaacccaggaggcagagtttgcagtcagccaagatcacgccactgtactccagcctggatgacacagcgagactccgtctcaaaataaataaataaaaataaagtcagaacacctggcttaataggcctcactgtgcagatgaggaaactgaggcccagggaggaagagcgatctgtggagatatttctagaacccctgcaagctgagccccagtgaaggagagaaggtccagtaggagcttgctaagctcaaaatcgaagaaaggttcagcaagactgtcagggtgacctcaaagcaatggcagccatcagaggagccccattgctattaggaggctcctattgccctccccttcagcctctgactttcacctgtgctacccaattctggttccttcactcccattcaaaaatggaccccagaaaagccttattttgtggagtacctagttcccttttgggtttgtctcttgactgctacgggcattgccccagggcaaccatgacagtgaagatgactggccaagcttgtggactggccagcaagcttgggctgcctgagacgctttgaaatggctgccttctgagttggtcttgagggtgaagactgaccacccttctcacctgcacagtcacagtccctctcctgctggcctgactgcagctgtcctcccagctggccacctgaccagagaccaggagagaggccacagcctccagaccctccagagtcccacggaggaagaaggcttaccagagagaccctctgatgcatgagccaggccccagcccttctccctgcatccaggtgtgtttccaccgcaaaatgcctccacacaatgagcgactttggccctgcgtgggtcagcatgtggtctgaggtaaccctcaaatgcctccaccacacatctgtccacctgcacgggttcaaggtaagcacttgcccccttctctcctccagaccagtcgcctgaaattctgagcaacattccttcaagactatcatgtaacccttggtgatgctgagtccagacaggaaatgcagacttgggacccacctgtatcagcagaaagaggccttgtgccccgtttgtccgagtcccagaacggagcaaatgagaaaaccggcgagctgtcccccgaggagctgtagggagattggtttttagtataaattacaataaaattttgtgtatgtgtacagctgtgttcacatccacagtgtaagctgtgatatggtttggatgtttgtcccctccaaatctcatgttgaaatgtgatccccagcattggaggtggggcctgatgggaggtgattgggtgatgggggaagttgcctcatgaatgacttggtgccctcctggaagtgatgagtgagttctcgctgagctcactcaagatgtggttgtttaaaagagtgtggcacgtccctcccccaactctccctctcactcccgctctcaccatgtgacacacctgctcccccttcgccttccaccatgattggaagcttcctgaagcccttaccagaagcagatgccagccccacacttcctgtaccacctgcagaaccataaaccaaaataaagctcttttctttatcaatt

SEQ ID NO: 119574 - DNA, 2118 bp, Homo sapiens
  Payload ID: 3437
  Gene Symbol: CXorf38
  Gene Name: chromosome X open reading frame 38
  Uniprot ID: Q8TB03
  ENST ID: ENST00000327877
  CDS Start-End: 28-987
gcaacctcctggttccaagtgggagacatggtgctgtcggagctagcggcgcgcctcaactgcgccgagtacaagaactgggtgaaggcgggccactgcctgttactgctgcgcagctgcctgcagggtttcgtcggccgcgaggtgctctccttccaccgcggcctactcgccgcagcccccggcctggggccccgcgccgtctgccgcggcggctcacggtgcagccctcgcgcccgccagtttcagcctcagtgtcaggtgtgcgctgaatggaaaagggagattttgagacatcatgtcaacagaaatggagatgtgcactggggaaactgccggccgggccgctggcccgtggacgcctgggaggtggccaaggccttcatgccccgaggactagcagacaaacaaggacctgaggaatgtgatgcagttgctcttttaagtctcatcaactcctgcgatcacttcgtggttgatcgaaagaaagtcacagaggtaattaaatgtcgtaatgagatcatgcactcttcagagatgaaagtatcttctacgtggcttcgagattttcagatgaagatccaaaattttctgaatgaattcaagaacatcccagagattgtggcagtatactccagaatagaacagctgttgacgtctgactgggctgttcacatccccgaggaagatcagcgagatgggtgtgaatgtgaaatgggaacttacctgagtgagagccaagtcaatgaaatagaaatgcagttactaaaggagaaacttcaagagatatatcttcaagcagaagaacaagaggtgttgcctgaagagctctcaaatcgactggaagtggtgaaggaatttctgagaaacaatgaggatcttagaaatggccttacagaagatatgcagaagctagacagcctctgtctacatcaaaaactggattcacaggaacctgggagacaaacacctgacaggaaggcctgaggttgcccgtcaacaaaaatcaggcatgttctgtgaaagtcagcatggcttccatctcagacatccttttctgtgcaaaaggaaaaagttaccagagtattgtacccaaacaaaaaggaatttttgttgttttgtcctggactttcctctaactctttggaactattttaatatttataaacttggggttgtataatctattgcaataaaaaatattagatactctatgccaaaacttgctaccaggccaggtgtgatggctcacacctgtaatccccagcactttgggaggccaaggcgggcggatcacctgaggtcaggagttcgagaccagcctggccaacatggcgaaaccccatctctacttaaaaaaaaatacaaatattagccgggcgtggtggcatgtgcctgtaatcccagctactcgggaggctgaggcaggagaatcgcttgaacctgggaggcagaggttgcagtgagctgagaccatgccactgtactccagcctgggcaatagagcgagattctgtctcccaaaaaaacaaaaaacaacaacaaaacttgctaccacccagggattttctgctatttaaaaggtgaatttcttttctggtactaaactgtagctgcttaacttagtaaaggctgtgtttggccaggcctgtgccagaggctcacctggagtgctccacccactggcaggcaagtcctattcctattcacccaggatccccaaggctgggctgggatataaatgttgggataggaaagaaatatttcctttttagaggaaagcaagaagaaacattgcctgaaaggtgattttctagtcatttccaattagtacagaaatgttactgcctctgggtgcagtggttcacgcctgtaatcccagcactgtgggcggatcacttgagcccaggagtttgagaccaacctgggcaagatggcgagaccccatctctacaaaaaaatttaaaaattacctgggcatggtggcacacacctttattctcagctactcaggtggctgaggtgggaggatcccttgagcccaggtggtcaaggctgtggtgagctatgatcatgccactgcactccagcctgggtagcagaacaagaccctgtctc

SEQ ID NO: 119575 - DNA, 2380 bp, Homo sapiens
  Payload ID: 3437
  Gene Symbol: CXorf38
  Gene Name: chromosome X open reading frame 38
  Uniprot ID: Q8TB03
  ENST ID: ENST00000378421
  CDS Start-End: 1551-2153
catggtgctgtcggagctagcggcgcgcctcaactgcgccgagtacaagaactgggtgaaggcgggccactgcctgttactgctgcgcagctgcctgcagggtttcgtcggccgcgaggtgctctccttccaccgcggcctactcgccgcagcccccggcctggggccccgcgccgtctgccgcggcggctcacggtgcagccctcgcgcccgccagtttcagcctcagtgtcaggtgtgcgctgaatggaaaagggagattttgagacatcatgtcaacagaaatggagatgtgcactggggaaactgccggccgggccgctggcccgtggacgcctgggaggtggccaagggtcttgatctgttatccagactggagtgcagtggtgaatcagagcttattgcaaccttgaactcctgggctcaagcaatcctcctgcctcagcctcttgagtacctgggactatagcacacaccacaatgcatggctaatttttttttttaatagagatgggagtcttgctttgttgcccaggctgggctcaaacgatcctcctgcttttgcctcccgaagtgctgggattacaggaatgagccactgtacccagcctatttagagttcttattgcgagtaactttttgttctagtcccttggcaggagtgtacccttgtgattcttagcctagtaaagttgttgcatcccagtataagttgagaaatatttcaggaaagaaatacgcccaagctttcccataacaccattttgggggtctgtgccataaaattcctactaaaggcaagatcctgctagcttgaggcccttctggcatatctagtatctcccatccccggattccatctgtaactcctatgtgggtcctactcgccttgcaccatctacataataattgccaacattgatgtcctggttactagcacgtgcctagcactgtgctagtgctatacctgcattctcttatttcattctcacaatatcctttgaagtagataaggacagttatcccccatttactgataaggaatctgagggtaacttgaccaaggtcacagctggcaaatggcagagctggcatttgaacccagtttgcactccaaagcccagactcttaatataatacttccatacggaacttcctcaagtcatttagaaagtgtccacttttattttatttttaaatcttcttatttaacaactcaaccactgaaatttcagtaaggaaaagaaaaaagatgccttctagttatgctttctgtttatatgccattaagacagaatggaaagcctgttatatcatatgtatctaatagcagggataatacagcccttcagttattgcccttggccaaggtttagctgtgacagtttccctacttgcattttgggctcatgaggctttaagttgaaacctcagtgcataagagaacttcagtcatcatttggaaaatagacaagtaaccattgcctttccatctcctagagttggaagagactcaggtccccctcctccctcccttgctataggccttcatgccccgaggactagcagacaaacaaggacctgaggaatgtgatgcagttgctcttttaagtctcatcaactcctgcgatcacttcgtggttgatcgaaagaaagtcacagaggtaattaaatgtcgtaatgagatcatgcactcttcagagatgaaagtatcttctacgtggcttcgagattttcagatgaagatccaaaattttctgaatgaattcaagaacatcccagagattgtggcagtatactccagaatagaacagctgttgacgtctgactgggctgttcacatccccgaggaagatcagcgagatgggtgtgaatgtgaaatgggaacttacctgagtgagagccaagtcaatgaaatagaaatgcagttactaaaggagaaacttcaagagatatatcttcaagcagaagaacaagaggtgttgcctgaagagctctcaaatcgactggaagtggtgaaggaatttctgagaaacaatgaggatcttagaaatggccttacagaagatatgcagaagctagacagcctctgtctacatcaaaaactggattcacaggaacctgggagacaaacacctgacaggaaggcctgaggttgcccgtcaacaaaaatcaggcatgttctgtgaaagtcagcatggcttccatctcagacatccttttctgtgcaaaaggaaaaagttaccagagtattgtacccaaacaaaaaggaatttttgttgttttgtcctggactttcctctaactctttggaactattttaatatttataaacttggggttgtataatctattgcaataaaaaatattagatactcta

SEQ ID NO: 119576 - DNA, 4895 bp, Homo sapiens
  Payload ID: 3437
  Gene Symbol: CXorf38
  Gene Name: chromosome X open reading frame 38
  Uniprot ID: Q8TB03
  ENST ID: ENST00000378426
  CDS Start-End: 599-1201
acgccccgcaacctcctggttccaagtgggagacatggtgctgtcggagctagcggcgcgcctcaactgcgccgagtacaagaactgggtgaaggcgggccactgcctgttactgctgcgcagctgcctgcagggtttcgtcggccgcgaggtgctctccttccaccgcggcctactcgccgcagcccccggcctggggccccgcgccgtctgccgcggcggctcacggtgcagccctcgcgcccgccaggtgagcacctggctcggggccttgaccaccgcccccaccccacccctcctcatccccgttcctgtcccagacccagagcgcaagtgtcctgttccctccgcgatgcggggcccaccgcgacgtccctccctcctgggcccctcctcaccgccgccccctgtagtttcagcctcagtgtcaggtgtgcgctgaatggaaaagggagattttgagacatcatgtcaacagaaatggagatgtgcactggggaaactgccggccgggccgctggcccgtggacgcctgggaggtggccaagagttggaagagactcaggtccccctcctccctcccttgctataggccttcatgccccgaggactagcagacaaacaaggacctgaggaatgtgatgcagttgctcttttaagtctcatcaactcctgcgatcacttcgtggttgatcgaaagaaagtcacagaggtaattaaatgtcgtaatgagatcatgcactcttcagagatgaaagtatcttctacgtggcttcgagattttcagatgaagatccaaaattttctgaatgaattcaagaacatcccagagattgtggcagtatactccagaatagaacagctgttgacgtctgactgggctgttcacatccccgaggaagatcagcgagatgggtgtgaatgtgaaatgggaacttacctgagtgagagccaagtcaatgaaatagaaatgcagttactaaaggagaaacttcaagagatatatcttcaagcagaagaacaagaggtgttgcctgaagagctctcaaatcgactggaagtggtgaaggaatttctgagaaacaatgaggatcttagaaatggccttacagaagatatgcagaagctagacagcctctgtctacatcaaaaactggattcacaggaacctgggagacaaacacctgacaggaaggcctgaggtgagttcaggcagatgatggtgttaaagaaggacagaatcacctcatctctttcatgtctattctctcatgtgaggccatcatgaacacacaacaatctaatctgaagtttgcctttgtccttattgtttcaaagaaaggacactgaggtttgtgttcttcacttaatgattcttacgtctgtgaagtaattcagcatcaactccctgtttagccaaatacacctgaagtcattggtctagaattaaatgaatcagctttataacataatcaaaaagcatttctgccttaaaatgacaccattgatgcctagctcttaccatggcattaatagcaattgactagtcaatttccataaggagaacttcttaaaatgagtaactgtcttcagcattttactttttcccccctcaaataaaaaaaataaataaaacattctctttcattttaggttgcccgtcaacaaaaatcaggcatgttctgtgaaagtcagcatggcttccatctcagacatccttttctgtgcaaaaggaaaaagttaccagagtattgtacccaaacaaaaaggaatttttgttgttttgtcctggactttcctctaactctttggaactattttaatatttataaacttggggttgtataatctattgcaataaaaaatattagatactctatgccaaaacttgctaccaggccaggtgtgatggctcacacctgtaatccccagcactttgggaggccaaggcgggcggatcacctgaggtcaggagttcgagaccagcctggccaacatggcgaaaccccatctctacttaaaaaaaaatacaaatattagccgggcgtggtggcatgtgcctgtaatcccagctactcgggaggctgaggcaggagaatcgcttgaacctgggaggcagaggttgcagtgagctgagaccatgccactgtactccagcctgggcaatagagcgagattctgtctcccaaaaaaacaaaaaacaacaacaaaacttgctaccacccagggattttctgctatttaaaaggtgaatttcttttctggtactaaactgtagctgcttaacttagtaaaggctgtgtttggccaggcctgtgccagaggctcacctggagtgctccacccactggcaggcaagtcctattcctattcacccaggatccccaaggctgggctgggatataaatgttgggataggaaagaaatatttcctttttagaggaaagcaagaagaaacattgcctgaaaggtgattttctagtcatttccaattagtacagaaatgttactgcctctgggtgcagtggttcacgcctgtaatcccagcactgtgggcggatcacttgagcccaggagtttgagaccaacctgggcaagatggcgagaccccatctctacaaaaaaatttaaaaattacctgggcatggtggcacacacctttattctcagctactcaggtggctgaggtgggaggatcccttgagcccaggtggtcaaggctgtggtgagctatgatcatgccactgcactccagcctgggtagcagaacaagaccctgtctcaaaaaaaaaaaaaccccaaaaactgttactactaggttggagtagcctaaggcagtagggcaaggaggtgggcccaggctggtctgtggggagctggagaatggtgactcgagtgaccagtggacaggcaggacccaggccagcattacaagcggggatgtcaggcaggagcaggggagcttctcgcttggcagctggtttatggtacacttttgaaaagtaagctcccagggcctggccctcacatgctcagtgaatatttgactgaagggtcccctcatagcttgggagtattcacaggcctaaatgttagttatactattagctaagcctggtcctttgttacgaaatttaaaaatgaaattgcaacattcttgtggaaattcaaagacatcattttctttcaacaaattcacacattcgttcatgcttcttctataccttttacccctaaagtcatccactcctgagttcctcctgctggtttcccaaactgcgcaatgactgccccatcataggcagtggtccgtggagtcggcctcactttcgcctttccccgcatctacttgtttccaaggccagtggtacttaactgggtcaagttgcctgtggaccttcaggaacagaattgccatgttcctcactgcctgcaggaaaggctccattccaagcccagtgaagatgtgtgcctatccagccgcccaccaaggatgtcatctgtagaatgggtggagggcaggggtttatttggtgtatatttttacattaaaatgcacttaatatcactttgtaaagcccagatgagtgcaaatgtgcctgtaacttcctcctttaatctgtccaggtagtatttagtctttagtcttacattttctttctccctttatttcatgaaattccttgagaaaacttcaacagtaaagaaagaaatttcattcatctcacaactcttccaaacgaggaaacttagtgaaatatttcagagcttctagatgtgaggtacaaaacttgggatcaaatggaatcttgattcactaaccaatttaagatctgacttctaattttaggaactttgggttatgaacgcttccattttatacctgtgtctagttagtttctgcctatctatccaagaagcttttatcaagggtccaccatgtgccagccactgaagtagatataaatacaaggatgtgtaaggtatggatgatggtatacgaactgtcatcttactggatttgtccgctctgttaaagatacggttccgaaaactttttaaagccctagagagggctttaaggcaatgtagcatcatatatagaggcatcaacctgttcatatctttctatttaacagaactgtgcacctgggcacaagggtgtgcacaacaggatgtgtacagcagcactgttaaagtgtagcacatccatactacaggatcttatgcaactgttggaaagaatgaagcgatgctgcactgtggtcatgcagtgatctctaagacatattaactagaaagcaaaaggtttaacaatgtatagcagctgggcgcagtgactcgcgcctgtaatcccagcactttgggaggctgagtagggcggatcacctgaggtcaggagtttgagaccaacctggccaatgtggcgaaacgctgtctctactaaaactacaaaaattagctgggcgtggtggcgcgtgcctgtaatcccagctactcggcaggctgaggcaggagaatcgcttgaactggggaggtggaggttgcagtgagccgagatcacaccactgcattccagcctgggtgacagagggagactccgtctctaaaaaacaaccccccccccccaaaaaaaaaaatgcatagcaagctgtaatgctctttgtgttttagaatagtagaggtctggaaagttgtttgcttttccccagtttttttttgctgtgttacctctgaagggaattgaggtagaggggagagttagaaggaatattcggcttttctattttatatcctcctaggtgaaatttttacaacaaacatgtactggtgtattttgaaatgtttttaaatttttgtatttcaaaataataaaatataaattcaaactgcaa

SEQ ID NO: 119577 - DNA, 974 bp, Homo sapiens
  Payload ID: 3438
  Gene Symbol: CXorf40A
  Gene Name: chromosome X open reading frame 40A
  Uniprot ID: Q8TE69
  ENST ID: ENST00000359293
  CDS Start-End: 154-630
gacggaagcaggagaccatcaaggtcagtgcgatttaggccacctgagagacacggggggaaggtcaggccactgcccatgagcttggagggctggcgtgtgatgcgcttctgtgcttccgcaggctacgggaggcccggggcgcttgcgaagatgaagtttggctgcctctccttccggcagccttatgctggctttgtcttaaatggaatcaagactgtggagacgcgctggcgtcccctgctgagcagccagcggaactgtaccatcgccgtccacattgctcacagggactgggaaggcgatgcctggcgggagctgctggtggagagactcgggatgactcctgctcagattcaggccttgctcaggaaaggggaaaagtttggtcgaggagtgatagcgggactcgttgacattggggaaactttgcaatgccccgaagacttaactcccgatgaggttgtggaactagaaaatcaagctgtactgaccaacctgaagcagaagtacctgactgtgatttcaaaccccaggtggttactggagcccatacctaggaaaggaggcaaggatgtattccaggtagacatcccagagcacctgatccctttggggcatgaagtgtgacaagtgtgggctcctgaaaggaatgttccagagaaaccagctaaatcatgacaccttcaatttgccatcatgacgcagacctgtatacattaggttaaatctgaatttccactgctttggagagtcccacccactaagcactgtgcatgtaaacaggttcctttgctcagatgaaggaagtagggggtggggctttccttgtgtgatgcctccttaggcacacaggcaatgtctcaagtactttgaccttagggtagaaggcaaagctgccagtaaatgtctcagcattgctgctaattttggtcctgctagtttctggattgtacaaataaatgtgttgtaga

SEQ ID NO: 119578 - DNA, 1148 bp, Homo sapiens
  Payload ID: 3438
  Gene Symbol: CXorf40A
  Gene Name: chromosome X open reading frame 40A
  Uniprot ID: Q8TE69
  ENST ID: ENST00000393985
  CDS Start-End: 600-1076
gttcttcgtgaaagggatgacgggagctgtatgaaagcggaagagttatagaccgctaacacctgtcactggccactggtttcccggagttagcggcaacgaccttgcagcctggacactagccaggcgctccctcttctcacagcggcccacgtctccttgcttgggagcccatcgtcctggctccggtggcctcgctgggtctcggggaagcagaggactgttcattcctgtggcgaaaagccggagtcggccctagacacccacgactcgcagggtccatggttccggaggccgtgagacctgccggggctgacaggtgccagggcccatgctgcgggagcctgtgtgctcagccttcttgcggacggtaaagaagctaagtggaagagtgtttcctcctctggccgtaaagcaggtactctctgcagcaccagctgtccccgccctactccggaccgccccaaagactccatgggatggacctgagtcagccgaatcccagccccttcccttgggcctgctgtggtgctggacatcagtgacagacggaagcaggagaccatcaaggctacgggaggcccggggcgcttgcgaagatgaagtttggctgcctctccttccggcagccttatgctggctttgtcttaaatggaatcaagactgtggagacgcgctggcgtcccctgctgagcagccagcggaactgtaccatcgccgtccacattgctcacagggactgggaaggcgatgcctggcgggagctgctggtggagagactcgggatgactcctgctcagattcaggccttgctcaggaaaggggaaaagtttggtcgaggagtgatagcgggactcgttgacattggggaaactttgcaatgccccgaagacttaactcccgatgaggttgtggaactagaaaatcaagctgtactgaccaacctgaagcagaagtacctgactgtgatttcaaaccccaggtggttactggagcccatacctaggaaaggaggcaaggatgtattccaggtagacatcccagagcacctgatccctttggggcatgaagtgtgacaagtgtgggctcctgaaaggaatgttccagagaaaccagctaaatcatgacaccttcaatttgccatcatg

SEQ ID NO: 119579 - DNA, 1536 bp, Homo sapiens
  Payload ID: 3438
  Gene Symbol: CXorf40A
  Gene Name: chromosome X open reading frame 40A
  ENST ID: ENST00000422892
  CDS Start-End: 528-968
attaggtgccacgtactgggctgggtgctcttggtgccttatctcccttcctcacagccatgtggaaactgaggcatctcaagagtctatgactgggctgaggttctggtttcgagcccagggttccttccaaggcacagggccgtcctccatgcaagaggaggggaccctctcccaagccagacacgcaggaggctgggcaagagttgtgggaagtcagagcccgtgtgactgtgggctggtgcctcattctcctcagccatagagtgggcctcacagtaccactgaccctgctgggttacttgaagattcaatttgatgatccgaggatcatgccatcccagaggctggcacgtggaaggcatctgtccccgccctactccggaccgccccaaagactccatgggatggacctgagtcagccgaatcccagccccttcccttgggcctgctgtggtgctggacatcagtgacagacggaagcaggagaccatcaaggctacgggaggcccggggcgcttgcgaagatgaagtttggctgcctctccttccggcagccttatgctggctttgtcttaaatggaatcaagactgtggagacgcgctggcgtcccctgctgagcagccagcggaactgtaccatcgccgtccacattgctcacagggactgggaaggcgatgcctggcgggagctgctggtggagagactcgggatgactcctgctcagattcaggccttgctcaggaaaggggaaaagtttggtcgaggagtgatagcgggactcgttgacattggggaaactttgcaatgccccgaagacttaactcccgatgaggttgtggaactagaaaatcaagctgtactgaccaacctgaagcagaagtacctgactgtgatttcaaaccccaggtggttactggagcccatacctaggaaaggaggcaaggatgtattccagaatccatagaggttcagctggcgaatgaaactcgtcaagctgtctgttttgaagatcctctctgcacctttccgttgaagaacctccctctggaagagatccttgtcgatgatcacggcgtctccatcatcgttccagctcacagacttgaatgtgtcttcctccacaatcgtccaaagctttcttgggaaggagagcctaaaaaggttgtggttgtcttccacgttgaccacgcgttggtttcggtcttctggtggtgagttatcttgggagcctggatcttggctcatggcttggtcctcgtgcctgtccaaaacctcgctggaatctggatttggatcaggtgaagaaccagatgggcccccgcttgttggctctccaccaacagatggggccagcttggcttcatattcctgttcagtgttctgactcgccatggagctacaccagaatcaggagcattttgtacccaaggcccttatcactgtcctagcaagtccaaaatgccttcagtcagagtaggcgtgcccaataaatactgtccacaaaattctagagtctcggtatcagggcaacc

SEQ ID NO: 119580 - DNA, 1403 bp, Homo sapiens
  Payload ID: 3438
  Gene Symbol: CXorf40A
  Gene Name: chromosome X open reading frame 40A
  Uniprot ID: Q8TE69
  ENST ID: ENST00000423421
  CDS Start-End: 580-1056
ttcttcgtgaaagggatgacgggagctgtatgaaagcggaagagttatagaccgctaacacctgtcactggccactggtttcccggagttagcggcaacgaccttgcagcctggacactagccaggcgctccctcttctcacagcggcccacgtctccttgcttgggagcccatcgtcctggctccggtggcctcgctgggtctcggggaagcagaggactgttcattcctgtggcgaaaagccggagtcggccctagacacccacgactcgcagggtccatggttccggaggccgtgagacctgccggggctgacaggtgccagggcccatgctgcgggagcctgtgtgctcagccttcttgcggacggtaaagaagctaagtggaagagtgtttcctcctctggccgtaaagcagctgtccccgccctactccggaccgccccaaagactccatgggatggacctgagtcagccgaatcccagccccttcccttgggcctgctgtggtgctggacatcagtgacagacggaagcaggagaccatcaaggctacgggaggcccggggcgcttgcgaagatgaagtttggctgcctctccttccggcagccttatgctggctttgtcttaaatggaatcaagactgtggagacgcgctggcgtcccctgctgagcagccagcggaactgtaccatcgccgtccacattgctcacagggactgggaaggcgatgcctggcgggagctgctggtggagagactcgggatgactcctgctcagattcaggccttgctcaggaaaggggaaaagtttggtcgaggagtgatagcgggactcgttgacattggggaaactttgcaatgccccgaagacttaactcccgatgaggttgtggaactagaaaatcaagctgtactgaccaacctgaagcagaagtacctgactgtgatttcaaaccccaggtggttactggagcccatacctaggaaaggaggcaaggatgtattccaggtagacatcccagagcacctgatccctttggggcatgaagtgtgacaagtgtgggctcctgaaaggaatgttccagagaaaccagctaaatcatgacaccttcaatttgccatcatgacgcagacctgtatacattaggttaaatctgaatttccactgctttggagagtcccacccactaagcactgtgcatgtaaacaggttcctttgctcagatgaaggaagtagggggtggggctttccttgtgtgatgcctccttaggcacacaggcaatgtctcaagtactttgaccttagggtagaaggcaaagctgccagtaaatgtctcagcattgctgctaattttggtcctgctagtttctggattgtacaaataaatgtgttgtagatga

SEQ ID NO: 119581 - DNA, 2411 bp, Homo sapiens
  Payload ID: 3438
  Gene Symbol: CXorf40A
  Gene Name: chromosome X open reading frame 40A
  Uniprot ID: Q8TE69
  ENST ID: ENST00000441248
  CDS Start-End: 1588-2064
agctctgggcccaaaactcctgcctggtgtcctcgtcccacccttccacttactcttcctccctcccgttccttttcctccttccggttcttcgtcgaggctgccggtctcgaggtcccctggccttggcctggttggctggcgcgcatcagggccaggtaaagagaatagcgtctcctagcagccagggcgtgcgtacgtgcgtgatgtcgtcagtgcgtgtcttcgagaatgcgagattcataatgtttgctgtctatatgcatggctgagtacgtgcctcccgcgtacgtgcgtggtgtgcatacatgcgtgattgcgcgcccacgtacgttcttcgtgaaagggatgacgggagctgtatgaaagcggaagagttatagaccgctaacacctgtcactggccactggtttcccggagttagcggcaacgaccttgcagcctggacactagccaggcgctccctcttctcacagcggcccacgtctccttgcttgggagcccatcgtcctggctccggtggcctcgctgggtctcggggaagcagaggactgttcattcctgtggcgaaaagccggagtcggccctagacacccacgactcgcagggtccatggttccggaggccgtgagacctgccggggctgacaggtgccagggcccatgctgcgggagcctgtgtgctcagccttcttgcggacggtacctgagggctggggtttccctggatgtggggctgggaactcgtgcggggcgcgaccgaggcgccttttcctgtcccctgctgtcggcagggtctcggctccgctccttctaagcgcgtgtacccgcgacgtgcgtctgcgagtagaaagcccgtgtactgctccacacacagcggccccacctcagtccggtcttccctgcctcccgttggcccttctgctgtgagctcgcctggacctgaggccgggcggtgcacagctctgtggcctgtggcgccgtgctcagcgtgacctacccagaattaagctgaggacaatgggatttagagtcccaaacactcgccccgtgacaatgggaggggaagtgtcatttttctcccttcgaatggagcatgcttggctgcaagaatgctgctcaacatggtgaaatgattttctgccctgcgggctggtgcaccctgtggtccttgacccagacaggtgcggagggtcccactgctgtgattagcagaaccaaactgtgatgtgcacatgtgtgttactgataagaccaggcctcccagctcttcttggtttccaatgcctgctaagtacatgaccttcttagggccattaaccagctttgctgtcttgcacttaatgacctttcctctttatcttccttgttgtgcaggtaaagaagctaagtggaagagtgtttcctcctctggccgtaaagcagctgtccccgccctactccggaccgccccaaagactccatgggatggacctgagtcagccgaatcccagccccttcccttgggcctgctgtggtgctggacatcagtgacagacggaagcaggagaccatcaaggctacgggaggcccggggcgcttgcgaagatgaagtttggctgcctctccttccggcagccttatgctggctttgtcttaaatggaatcaagactgtggagacgcgctggcgtcccctgctgagcagccagcggaactgtaccatcgccgtccacattgctcacagggactgggaaggcgatgcctggcgggagctgctggtggagagactcgggatgactcctgctcagattcaggccttgctcaggaaaggggaaaagtttggtcgaggagtgatagcgggactcgttgacattggggaaactttgcaatgccccgaagacttaactcccgatgaggttgtggaactagaaaatcaagctgtactgaccaacctgaagcagaagtacctgactgtgatttcaaaccccaggtggttactggagcccatacctaggaaaggaggcaaggatgtattccaggtagacatcccagagcacctgatccctttggggcatgaagtgtgacaagtgtgggctcctgaaaggaatgttccagagaaaccagctaaatcatgacaccttcaatttgccatcatgacgcagacctgtatacattaggttaaatctgaatttccactgctttggagagtcccacccactaagcactgtgcatgtaaacaggttcctttgctcagatgaaggaagtagggggtggggctttccttgtgtgatgcctccttaggcacacaggcaatgtctcaagtactttgaccttagggtagaaggcaaagctgccagtaaatgtctcagcattgctgctaattttggtcctgctagtttctggattgtacaaataaatgtgttgtagatga

SEQ ID NO: 119582 - DNA, 1524 bp, Homo sapiens
  Payload ID: 3438
  Gene Symbol: CXorf40A
  Gene Name: chromosome X open reading frame 40A
  ENST ID: ENST00000434353
  CDS Start-End: 568-1008
gggatgacgggagctgtatgaaagcggaagagttatagaccgctaacacctgtcactggccactggtttcccggagttagcggcaacgaccttgcagcctggacactagccaggcgctccctcttctcacagcggcccacgtctccttgcttgggagcccatcgtcctggctccggtggcctcgctgggtctcggggaagcagaggactgttcattcctgtggcgaaaagccggagtcggccctagacacccacgactcgcagggtccatggttccggaggccgtgagacctgccggggctgacaggtgccagggcccatgctgcgggagcctgtgtgctcagccttcttgcggacggtaaagaagctaagtggaagagtgtttcctcctctggccgtaaagcagctgtccccgccctactccggaccgccccaaagactccatgggatggacctgagtcagccgaatcccagccccttcccttgggcctgctgtggtgctggacatcagtgacagacggaagcaggagaccatcaaggctacgggaggcccggggcgcttgcgaagatgaagtttggctgcctctccttccggcagccttatgctggctttgtcttaaatggaatcaagactgtggagacgcgctggcgtcccctgctgagcagccagcggaactgtaccatcgccgtccacattgctcacagggactgggaaggcgatgcctggcgggagctgctggtggagagactcgggatgactcctgctcagattcaggccttgctcaggaaaggggaaaagtttggtcgaggagtgatagcgggactcgttgacattggggaaactttgcaatgccccgaagacttaactcccgatgaggttgtggaactagaaaatcaagctgtactgaccaacctgaagcagaagtacctgactgtgatttcaaaccccaggtggttactggagcccatacctaggaaaggaggcaaggatgtattccagaatccatagaggttcagctggcgaatgaaactcgtcaagctgtctgttttgaagatcctctctgcacctttccgttgaagaacctccctctggaagagatccttgtcgatgatcacggcgtctccatcatcgttccagctcacagacttgaatgtgtcttcctccacaatcgtccaaagctttcttgggaaggagagcctaaaaaggttgtggttgtcttccacgttgaccacgcgttggtttcggtcttctggtggtgagttatcttgggagcctggatcttggctcatggcttggtcctcgtgcctgtccaaaacctcgctggaatctggatttggatcaggtgaagaaccagatgggcccccgcttgttggctctccaccaacagatggggccagcttggcttcatattcctgttcagtgttctgactcgccatggagctacaccagaatcaggagcattttgtacccaaggcccttatcactgtcctagcaagtccaaaatgccttcagtcagagtaggcg

SEQ ID NO: 119583 - DNA, 460 bp, Homo sapiens
  Payload ID: 3438
  Gene Symbol: CXorf40A
  Gene Name: chromosome X open reading frame 40A
  ENST ID: ENST00000431132
  CDS Start-End: 371-460
ctctcagcggacacctgcctccccctgctgattctcaagagtccgcgagctcttcctgcagcttctcctcgctcagctctcccacggccctgcccacaatggctgccggtctcgaggtcccctggccttggcctggttggctggcgcgcatcagggccaggtaaagaagctaagtggaagagtgtttcctcctctggccgtaaagcagctgtccccgccctactccggaccgccccaaagactccatgggatggacctgagtcagccgaatcccagccccttcccttgggcctgctgtggtgctggacatcagtgacagacggaagcaggagaccatcaaggctacgggaggcccggggcgcttgcgaagatgaagtttggctgcctctccttccggcagccttatgctggctttgtcttaaatggaatcaagactgtggagacgcgctggcgtcccctg

SEQ ID NO: 119584 - DNA, 1840 bp, Homo sapiens
  Payload ID: 3438
  Gene Symbol: CXorf40A
  Gene Name: chromosome X open reading frame 40A
  ENST ID: ENST00000514208
  CDS Start-End: 314-754
gaccgctaacacctgtcactggccactggtttcccggagttagcggcaacgaccttgcagcctggacactagccaggcgctccctcttctcacagcggcccacgtaaagaagctaagtggaagagtgtttcctcctctggccgtaaagcagctgtccccgccctactccggaccgccccaaagactccatgggatggacctgagtcagccgaatcccagccccttcccttgggcctgctgtggtgctggacatcagtgacagacggaagcaggagaccatcaaggctacgggaggcccggggcgcttgcgaagatgaagtttggctgcctctccttccggcagccttatgctggctttgtcttaaatggaatcaagactgtggagacgcgctggcgtcccctgctgagcagccagcggaactgtaccatcgccgtccacattgctcacagggactgggaaggcgatgcctggcgggagctgctggtggagagactcgggatgactcctgctcagattcaggccttgctcaggaaaggggaaaagtttggtcgaggagtgatagcgggactcgttgacattggggaaactttgcaatgccccgaagacttaactcccgatgaggttgtggaactagaaaatcaagctgtactgaccaacctgaagcagaagtacctgactgtgatttcaaaccccaggtggttactggagcccatacctaggaaaggaggcaaggatgtattccagaatccatagaggttcagctggcgaatgaaactcgtcaagctgtctgttttgaagatcctctctgcacctttccgttgaagaacctccctctggaagagatccttgtcgatgatcacggcgtctccatcatcgttccagctcacagacttgaatgtgtcttcctccacaatcgtccaaagctttcttgggaaggagagcctaaaaaggttgtggttgtcttccacgttgaccacgcgttggtttcggtcttctggtggtgagttatcttgggagcctggatcttggctcatggcttggtcctcgtgcctgtccaaaacctcgctggaatctggatttggatcaggtgaagaaccagatgggcccccgcttgttggctctccaccaacagatggggccagcttggcttcatattcctgttcagtgttctgactcgccatggagctacaccagaatcaggagcattttgtacccaaggcccttatcactgtcctagcaagtccaaaatgccttcagtcagagtaggcgtgcccaataaatactgtccacaaaattctagagtctcggtatcagggcaaccagtggcttaactcatcatctgctgtatttgtcacatgatgtcacaaaggtggctctcagccaatctggagagggggccctggccaggtgttgggggagtagacaggtggcatggccttcagcttctccctcttctaaaagtataaacaggcatggttcaagttcccagaaaagtctcccatcttctgacagtcacattgtgtcaaagggccaggccccagatgagctgagaaaccatggctctatggccactcccaaccctgaagacaggggaggccatttgctggcctctaatttgctcaagagccagcccctagttatccctagcttgggtttcaccaagactgcctgactcatatggacccctcatgggtgactgccttctaggagatggtggtccctaccaggctgtttggcctgatctgtgtggtagcacccctcttttccaatccccccatctcctttctgctttggtctcttccaggtactcctaatgattggttgcatgtgctccagtgg

SEQ ID NO: 119585 - DNA, 1208 bp, Homo sapiens
  Payload ID: 3438
  Gene Symbol: CXorf40A
  Gene Name: chromosome X open reading frame 40A
  Uniprot ID: Q8TE69
  ENST ID: ENST00000423540
  CDS Start-End: 540-1016
gaaagggatgacgggagctgtatgaaagcggaagagttatagaccgctaacacctgtcactggccactggtttcccggagttagcggcaacgaccttgcagcctggacactagccaggcgctccctcttctcacagcggcccacgtctccttgcttgggagcccatcgtcctggctccggtggcctcgctgggtctcggggaagcagaggactgttcattcctgtggcgaaaagccggagtcggccctagacacccacgactcgcagggtccatggttccggaggccgtgagacctgccggggctgacaggtaaagaagctaagtggaagagtgtttcctcctctggccgtaaagcaggtactctctgcagcaccagctgtccccgccctactccggaccgccccaaagactccatgggatggacctgagtcagccgaatcccagccccttcccttgggcctgctgtggtgctggacatcagtgacagacggaagcaggagaccatcaaggctacgggaggcccggggcgcttgcgaagatgaagtttggctgcctctccttccggcagccttatgctggctttgtcttaaatggaatcaagactgtggagacgcgctggcgtcccctgctgagcagccagcggaactgtaccatcgccgtccacattgctcacagggactgggaaggcgatgcctggcgggagctgctggtggagagactcgggatgactcctgctcagattcaggccttgctcaggaaaggggaaaagtttggtcgaggagtgatagcgggactcgttgacattggggaaactttgcaatgccccgaagacttaactcccgatgaggttgtggaactagaaaatcaagctgtactgaccaacctgaagcagaagtacctgactgtgatttcaaaccccaggtggttactggagcccatacctaggaaaggaggcaaggatgtattccaggtagacatcccagagcacctgatccctttggggcatgaagtgtgacaagtgtgggctcctgaaaggaatgttccagagaaaccagctaaatcatgacaccttcaatttgccatcatgacgcagacctgtatacattaggttaaatctgaatttccactgctttggagagtcccacccactaagcactgtgcatgtaaacaggttcctttgctcagatgaaggaagtagggggtgggg

SEQ ID NO: 119586 - DNA, 887 bp, Homo sapiens
  Payload ID: 3438
  Gene Symbol: CXorf40A
  Gene Name: chromosome X open reading frame 40A
  ENST ID: ENST00000428236
  CDS Start-End: 250-540
gtaaagaagctaagtggaagagtgtttcctcctctggccgtaaagcaggtactctctgcagcaccagctgtccccgccctactccggaccgccccaaagactccatgggatggacctgagtcagccgaatcccagccccttcccttgggcctgctgtggtgctggacatcagtgacagacggaagcaggagaccatcaagggactgggaaggcgatgcctggcgggagctgctggtggagagactcgggatgactcctgctcagattcaggccttgctcaggaaaggggaaaagtttggtcgaggagtgatagcgggactcgttgacattggggaaactttgcaatgccccgaagacttaactcccgatgaggttgtggaactagaaaatcaagctgtactgaccaacctgaagcagaagtacctgactgtgatttcaaaccccaggtggttactggagcccatacctaggaaaggaggcaaggatgtattccaggtagacatcccagagcacctgatccctttggggcatgaagtgtgacaagtgtgggctcctgaaaggaatgttccagagaaaccagctaaatcatgacaccttcaatttgccatcatgacgcagacctgtatacattaggttaaatctgaatttccactgctttggagagtcccacccactaagcactgtgcatgtaaacaggttcctttgctcagatgaaggaagtagggggtggggctttccttgtgtgatgcctccttaggcacacaggcaatgtctcaagtactttgaccttagggtagaaggcaaagctgccagtaaatgtctcagcattgctgctaattttggtcctgctagtttctggattgtacaaataaatgtgttgtagatga

SEQ ID NO: 119587 - DNA, 1204 bp, Homo sapiens
  Payload ID: 3438
  Gene Symbol: CXorf40A
  Gene Name: chromosome X open reading frame 40A
  Uniprot ID: Q8TE69
  ENST ID: ENST00000450602
  CDS Start-End: 381-857
tgctggtatagcagctctgggcccaaaactcctgcctggtgtcctcgtcccacccttccacttactcttcctccctcccgttccttttcctccttccggttcttcgtcgaggctgccggtctcgaggtcccctggccttggcctggttggctggcgcgcatcagggccaggtaaagaagctaagtggaagagtgtttcctcctctggccgtaaagcagctgtccccgccctactccggaccgccccaaagactccatgggatggacctgagtcagccgaatcccagccccttcccttgggcctgctgtggtgctggacatcagtgacagacggaagcaggagaccatcaaggctacgggaggcccggggcgcttgcgaagatgaagtttggctgcctctccttccggcagccttatgctggctttgtcttaaatggaatcaagactgtggagacgcgctggcgtcccctgctgagcagccagcggaactgtaccatcgccgtccacattgctcacagggactgggaaggcgatgcctggcgggagctgctggtggagagactcgggatgactcctgctcagattcaggccttgctcaggaaaggggaaaagtttggtcgaggagtgatagcgggactcgttgacattggggaaactttgcaatgccccgaagacttaactcccgatgaggttgtggaactagaaaatcaagctgtactgaccaacctgaagcagaagtacctgactgtgatttcaaaccccaggtggttactggagcccatacctaggaaaggaggcaaggatgtattccaggtagacatcccagagcacctgatccctttggggcatgaagtgtgacaagtgtgggctcctgaaaggaatgttccagagaaaccagctaaatcatgacaccttcaatttgccatcatgacgcagacctgtatacattaggttaaatctgaatttccactgctttggagagtcccacccactaagcactgtgcatgtaaacaggttcctttgctcagatgaaggaagtagggggtggggctttccttgtgtgatgcctccttaggcacacaggcaatgtctcaagtactttgaccttagggtagaaggcaaagctgccagtaaatgtctcagcattgctgctaattttggtcctgctagtttctggattgtacaaataaatgtgttgtagatga

SEQ ID NO: 119588 - DNA, 1067 bp, Homo sapiens
  Payload ID: 3439
  Gene Symbol: CXorf40B
  Gene Name: chromosome X open reading frame 40B
  Uniprot ID: Q96DE9
  ENST ID: ENST00000355203
  CDS Start-End: 245-721
atgacctttcctctttatcttccttgttgtgcaggtaaagaaaccaagtggaagagtgtttcctcctctggccgtaaagcagctgtccccgccctactccggaccgccccaaagactccatgggatggacctgagtcagccgaatcctagccccttcccttgggcctgctgtggtgctcgacatcagtgacagacggaagcagcagaccatcaaggctacgggaggcccggggcgcttgcgaagatgaagtttggctgcctctccttccggcagccttatgctggctttgtcttaaatggaatcaagactgtggagacgcgctggcgtcctctgctgagcagccagcggaactgtaccatcgccgtccacattgctcacagggactgggaaggcgatgcctgtcgggagctgctggtggagagactcgggatgactcctgctcagattcaggccttgctcaggaaaggggaaaagtttggtcgaggagtgatagcgggactcgttgacattggggaaactttgcaatgccccgaagacttaactcccgatgaggttgtggaactagaaaatcaagctgcactgaccaacctgaagcagaagtacctgactgtgatttcaaaccccaggtggttactggagcccatacctaggaaaggaggcaaggatgtattccaggtagacatcccagagcacctgatccctttggggcatgaagtgtgacaagtgtgggctcctgaaaggaatgttccagagaaaccagctaaatcatggcaccttcaatttgccatcgtgacgcagacctgtataaattaggttaaagatgaatttccactgctttggagagtcccacccactaagcactgtgcatgtaaacaggttcctttgctcagatgaaggaagtagggggtggggctttccttgtgtgatgcctccttaggcacacaggcaatgtctcaagtactttgaccttagggtagaaggcaaagctgccagtaaatgtctcagcattgctgctaattttggtcctgctagtttctggattgtacaaataaatgtgttgtagatg

SEQ ID NO: 119589 - DNA, 1316 bp, Homo sapiens
  Payload ID: 3439
  Gene Symbol: CXorf40B
  Gene Name: chromosome X open reading frame 40B
  Uniprot ID: Q96DE9
  ENST ID: ENST00000370404
  CDS Start-End: 497-973
ggagctgcatgaaagccgaagttatggaccgctagcatctgtcactggccaccggtttccgggagtaagcggcagctaccttacagccctgacacgagccgggtgctctctcttctcaccgcggcccacgtctcctcgctggctccggtggcctcgctgggtcgcgaggaggcggaggactgtactctgaggccaaaagccagagtcggccctgaacgcccacgactctcagggtccagaggccgtgagaccggccgcggctgaaaggtaaagaaaccaagtggaagagtgtttcctcctctggccgtaaagcaggtactctctgcagcaccagctgtccccgccctactccggaccgccccaaagactccatgggatggacctgagtcagccgaatcctagccccttcccttgggcctgctgtggtgctcgacatcagtgacagacggaagcagcagaccatcaaggctacgggaggcccggggcgcttgcgaagatgaagtttggctgcctctccttccggcagccttatgctggctttgtcttaaatggaatcaagactgtggagacgcgctggcgtcctctgctgagcagccagcggaactgtaccatcgccgtccacattgctcacagggactgggaaggcgatgcctgtcgggagctgctggtggagagactcgggatgactcctgctcagattcaggccttgctcaggaaaggggaaaagtttggtcgaggagtgatagcgggactcgttgacattggggaaactttgcaatgccccgaagacttaactcccgatgaggttgtggaactagaaaatcaagctgcactgaccaacctgaagcagaagtacctgactgtgatttcaaaccccaggtggttactggagcccatacctaggaaaggaggcaaggatgtattccaggtagacatcccagagcacctgatccctttggggcatgaagtgtgacaagtgtgggctcctgaaaggaatgttccagagaaaccagctaaatcatggcaccttcaatttgccatcgtgacgcagacctgtataaattaggttaaagatgaatttccactgctttggagagtcccacccactaagcactgtgcatgtaaacaggttcctttgctcagatgaaggaagtagggggtggggctttccttgtgtgatgcctccttaggcacacaggcaatgtctcaagtactttgaccttagggtagaaggcaaagctgccagtaaatgtctcagcattgctgctaattttggtcctgctagtttctggattgtacaaataaatgtgttgtag

SEQ ID NO: 119590 - DNA, 1653 bp, Homo sapiens
  Payload ID: 3439
  Gene Symbol: CXorf40B
  Gene Name: chromosome X open reading frame 40B
  Uniprot ID: Q96DE9
  ENST ID: ENST00000370406
  CDS Start-End: 830-1306
gcagctctgggcttaaaaatcctgcctggtggtctcgtcccgcccctcctcttcctccctccggttccttttcctccttccggttcttggtctaggctgcctgtctcgagctccccggccttgtcctggttggctggcgcgggacaggatccggtaaactgaacagcgtctccttgtggcaagtgcgtgcgtacgtgcgtggcgacgtcactgcgtggcttcgtgaatacgtggcttcctagcgatttggcggtgtataggcgtggctgaatacgggcctcctgcgtacgtgcgtggtgtacgtacgtgcgtgattacgcgcacacgtacgttcctcatgaaagggacgacgggagctgcatgaaagccgaagttatggaccgctagcatctgtcactggccaccggtttccgggagtaagcggcagctaccttacagccctgacacgagccgggtgctctctcttctcaccgcggcccacgtctcctcgctggctccggtggcctcgctgggtcgcgaggaggcggaggactgtactctgaggccaaaagccagagtcggccctgaacgcccacgactctcagggtccagaggccgtgagaccggccgcggctgaaaggtaaagaaaccaagtggaagagtgtttcctcctctggccgtaaagcagctgtccccgccctactccggaccgccccaaagactccatgggatggacctgagtcagccgaatcctagccccttcccttgggcctgctgtggtgctcgacatcagtgacagacggaagcagcagaccatcaaggctacgggaggcccggggcgcttgcgaagatgaagtttggctgcctctccttccggcagccttatgctggctttgtcttaaatggaatcaagactgtggagacgcgctggcgtcctctgctgagcagccagcggaactgtaccatcgccgtccacattgctcacagggactgggaaggcgatgcctgtcgggagctgctggtggagagactcgggatgactcctgctcagattcaggccttgctcaggaaaggggaaaagtttggtcgaggagtgatagcgggactcgttgacattggggaaactttgcaatgccccgaagacttaactcccgatgaggttgtggaactagaaaatcaagctgcactgaccaacctgaagcagaagtacctgactgtgatttcaaaccccaggtggttactggagcccatacctaggaaaggaggcaaggatgtattccaggtagacatcccagagcacctgatccctttggggcatgaagtgtgacaagtgtgggctcctgaaaggaatgttccagagaaaccagctaaatcatggcaccttcaatttgccatcgtgacgcagacctgtataaattaggttaaagatgaatttccactgctttggagagtcccacccactaagcactgtgcatgtaaacaggttcctttgctcagatgaaggaagtagggggtggggctttccttgtgtgatgcctccttaggcacacaggcaatgtctcaagtactttgaccttagggtagaaggcaaagctgccagtaaatgtctcagcattgctgctaattttggtcctgctagtttctggattgtacaaataaatgtgttgtagatga

SEQ ID NO: 119591 - DNA, 1440 bp, Homo sapiens
  Payload ID: 3439
  Gene Symbol: CXorf40B
  Gene Name: chromosome X open reading frame 40B
  ENST ID: ENST00000462691
  CDS Start-End: 454-894
tggaccgctagcatctgtcactggccaccggtttccgggagtaagcggcagctaccttacagccctgacacgagccgggtgctctctcttctcaccgcggcccacgtctcctcgctggctccggtggcctcgctgggtcgcgaggaggcggaggactgtactctgaggccaaaagccagagtcggccctgaacgcccacgactctcagggtccagaggccgtgagaccggccgcggctgaaaggtaaagaaaccaagtggaagagtgtttcctcctctggccgtaaagcagctgtccccgccctactccggaccgccccaaagactccatgggatggacctgagtcagccgaatcctagccccttcccttgggcctgctgtggtgctcgacatcagtgacagacggaagcagcagaccatcaaggctacgggaggcccggggcgcttgcgaagatgaagtttggctgcctctccttccggcagccttatgctggctttgtcttaaatggaatcaagactgtggagacgcgctggcgtcctctgctgagcagccagcggaactgtaccatcgccgtccacattgctcacagggactgggaaggcgatgcctgtcgggagctgctggtggagagactcgggatgactcctgctcagattcaggccttgctcaggaaaggggaaaagtttggtcgaggagtgatagcgggactcgttgacattggggaaactttgcaatgccccgaagacttaactcccgatgaggttgtggaactagaaaatcaagctgcactgaccaacctgaagcagaagtacctgactgtgatttcaaaccccaggtggttactggagcccatacctaggaaaggaggcaaggatgtattccagaatccatagaggttcagctggcgaatgaaactcgtcaagttgtctgttttgaagatcctctctgcacctttccgttgaagaacctccctctggaagagatccttgtcgatgatcacggcgtctccatcatcgttccagctcacagacttgaatgtgtcttcctccacaatcgtccaaagctttcttgggaaggagagcctaaaaaggttgtggttgtcttccacgttgaccacgcgttggtttcggtcttctggtggtgagttatcttgggagcctggatcttggctcatggcttggtcctcgtgcctgtccaaaacctcgctggaatctggatttggatcaggtgaagaaccagatgggcccccgcttgttggctctccaccaacagatggggccagcttggcttcatattcctgttcagtgttctgactcgccatggagctacaccagaatcaggagcattttgtacccaaggcccttatcactgtcctagcaagtccaaaatgccttcagtcagagtaggcgtgcccaataaatactgtccacaaaattcta

SEQ ID NO: 119592 - DNA, 1129 bp, Homo sapiens
  Payload ID: 3439
  Gene Symbol: CXorf40B
  Gene Name: chromosome X open reading frame 40B
  ENST ID: ENST00000370409
  CDS Start-End: 688-1129
gaaagggacgacgggagctgcatgaaagccgaagttatggaccgctagcatctgtcactggccaccggtttccgggagtaagcggcagctaccttacagccctgacacgagccgggtgctctctcttctcaccgcggcccacgtctcctcgctggctccggtggcctcgctgggtcgcgaggaggcggaggactgtactctgaggccaaaagccagagtcggccctgaacgcccacgactctcagggtccagaggccgtgagaccggccgcggctgaaaggtaaagaaaccaagtggaagagtgtttcctcctctggccgtaaagcagctcagattgggacaggggcgtctgctgacagtggagagcagtggtgggggaaggggcttgaggaaggtggcacccagaggggtggagaggagatgtctgactgagggccatctgaggtcacggtgcatcctgaggacagagctgagattggatatcaacgatgtgggctcagcagccctggagtaggagctgggaagctgtccccgccctactccggaccgccccaaagactccatgggatggacctgagtcagccgaatcctagccccttcccttgggcctgctgtggtgctcgacatcagtgacagacggaagcagcagaccatcaaggctacgggaggcccggggcgcttgcgaagatgaagtttggctgcctctccttccggcagccttatgctggctttgtcttaaatggaatcaagactgtggagacgcgctggcgtcctctgctgagcagccagcggaactgtaccatcgccgtccacattgctcacagggactgggaaggcgatgcctgtcgggagctgctggtggagagactcgggatgactcctgctcagattcaggccttgctcaggaaaggggaaaagtttggtcgaggagtgatagcgggactcgttgacattggggaaactttgcaatgccccgaagacttaactcccgatgaggttgtggaactagaaaatcaagctgcactgaccaacctgaagcagaagtacctgactgtgatttcaaaccccaggtggttactggagcccatacctaggaaaggaggcaaggatgtattccaggtagacatcc

SEQ ID NO: 119593 - DNA, 808 bp, Homo sapiens
  Payload ID: 3439
  Gene Symbol: CXorf40B
  Gene Name: chromosome X open reading frame 40B
  ENST ID: ENST00000483447
  CDS Start-End: 672-808
cgggagctgcatgaaagccgaagttatggaccgctagcatctgtcactggccaccggtttccgggagtaagcggcagctaccttacagccctgacacgagccgggtgctctctcttctcaccgcggcccacgtctcctcgctggctccggtggcctcgctgggtcgcgaggaggcggaggactgtactctgaggccaaaagccagagtcggccctgaacgcccacgactctcagggtccagaggccgtgagaccggccgcggctgaaaggtaaagaaaccaagtggaagagtgtttcctcctctggccgtaaagcagattgggacaggggcgtctgctgacagtggagagcagtggtgggggaaggggcttgaggaaggtggcacccagaggggtggagaggagatgtctgactgagggccatctgaggtcacggtgcatcctgaggacagagctgagattggatatcaacgatgtgggctcagcagccctggagtaggagctgggaagctgtccccgccctactccggaccgccccaaagactccatgggatggacctgagtcagccgaatcctagccccttcccttgggcctgctgtggtgctcgacatcagtgacagacggaagcagcagaccatcaaggctacgggaggcccggggcgcttgcgaagatgaagtttggctgcctctccttccggcagccttatgctggctttgtcttaaatggaatcaagactgtggagacgcgctggcgtcctctgctgagcagccagcggaactgtaccatcgccgtccacattgctcacag

SEQ ID NO: 119594 - DNA, 1715 bp, Homo sapiens
  Payload ID: 3440
  Gene Symbol: CXorf49
  Gene Name: chromosome X open reading frame 49
  Uniprot ID: A8MYA2
  ENST ID: ENST00000535490
  CDS Start-End: 1-1545
atgagctcccccgacaaggtgtccgtttgtggggccggtttcgacctggagggtggcaaaaaggctggctcccgcacggccagccccggagccccaggggcccacagccacggcctcgatttgggggtgccgggcagcggcgatggcaagagcgagagcgggttcacagatccagagggcttcagcttcgagtctgagagcgaattgatagagcaaggaagggtggtgctctggggccgggaaggccggccaggcaccccggtggatgaccaaggggacgttgtggactactcattctacctggctgacgaaccagccgccatcgtgccgccgcccagcgtccagggacacccgttcccagaaggtgccgctgccgaagggtcggctgagaattgggcagatgcggaggtcggtcccagtgggagagacgtgctgggccacagccctggaaaatggcagcaggcctctgccggccgtctccacctctgcggtcctgggccagtgcgggcctggaagaacccggaaaggggctcgaagagcagatggagcctccgcgtggatccccagcagccctctgcgaaaggccccaccaggctgcctacccacgactctgattccgcagatgagagcagcgacttaccactgatgaaggtaggcatttgccgcaacgaaggaagccaggccaagcccggcagccccaagaagcgagcagacacatccagacaggcaagcttccactgcaaggagagttacctgcctgtgccgggccgtttcctgacctctgctccccgcggactcactccagtcgcagagaggccggctgtgggagagctggaggactctccccagaagaaaatgcagagcagggcctggggaaaggtggaggtcaggcccagctgctcaggagctgctgctgcaggggccctgccccagggcctttcgaggaggaagatggccggggggaagaagtccctagggggtgcctctcaactggccctggggagaggctttcctgcctgcggagagagactctcagccgctcccccggagccggccaccttcccgccattctctggtgtgcggccacaggggatgtccaagaaaccccaaaagcctaagcacagcagccctgggaagaaaccagcagggaggaagaccagggagtcccaggctgcggccagagaagataatgacccaaatagagatgaggtcccaagagcccaacttcccacccacaggccaggactgcctcgcctgtctgtgcgtcgtggagaattcagcagtagcgaccccaacatcagagctccccaacttccgggaacttcagagccctcggcctacagcccgggaggcctcgtgcccagacgccatgcaccctccggtaaccagcagccgcctgtccatcccccaagaccggaaaggcagcagcagcccccgggagcccagggctgtcctcggtgcatctggctgcagagggaaattgaggaccttacacagcagctagcggccatgcagttcctcactgacaagttccaggacctttgaagttggagccagcatcttcctacaagatgaacagctgccacctttggagctccggagctgcagccaagcgggttccctccatatcctgttcagccagggcttcctctcttccgctgcatttgcccccttcccaacgcagttcaaagcaatttgaaataaagtcgttctca

SEQ ID NO: 119595 - DNA, 1715 bp, Homo sapiens; identical to SEQ ID NO: 119594
  Payload ID: 3441
  Gene Symbol: CXorf49B
  Gene Name: chromosome X open reading frame 49B
  Uniprot ID: A8MYA2
  ENST ID: ENST00000542739
  CDS Start-End: 1-1545

SEQ ID NO: 119596 - DNA, 2372 bp, Homo sapiens
  Payload ID: 3442
  Gene Symbol: CXorf56
  Gene Name: chromosome X open reading frame 56
  Uniprot ID: Q9H5V9
  ENST ID: ENST00000320339
  CDS Start-End: 273-794
agattgctcttgggaatcatgccgaaagtagtgtctcggtcagtagtctgctctgacactcgggaccgggaggaatatgacgacggcgagaagcccctccatgtttactactgtttgtgcggccagatggtcctagtgctgggtgagtagccgggaactgcgggggcgtctgcaaggagccagacttcgggttcttgaaggcgaatttcctctggctgtgatctgggagccacttctcaacgaagattgactgccagttagagaaattgcccatgaggccccgggaccggtcccgtgtgattgatgctgccaaacatgcccataagttttgtaacacagaagatgaggagactatgtatctgcggagacctgaaggcattgaacgacagtacaggaagaaatgtgcaaagtgtggactgccgctcttctaccaatcccagccaaagaatgctcctgttaccttcattgtggatggagcagtagtcaagtttggccagggctttgggaaaacgaacatatatactcagaaacaagagcctcctaagaaggtgatgatgaccaaacggaccaaagacatgggcaagttcagttctgtcaccgtgtctaccattgatgaagaggaagaggagattgaggctagggaagttgctgactcatatgcacagaatgccaaagtgattgaaaaacagctggagcgcaaaggcatgagcaagaggcgactgcaagagctggctgaattggaagccaagaaagcgaaaatgaaggggaccttgattgacaaccagttcaaataaccaggcctttttctaagccctagactagaggcaagcatttagatcaggaggcaaagtaatttcttgattacatagacggattcctatttatgccctagcagaaggctttacgttgtttcccattgattctcctacattcagtgaggtctttaactgagtccatttaacttgctttcttttttttttttttttttttgagataaagtcttgctctttcgcccaggatggagtgcagtggtgcgatctcggctcactgcaacctccgcctcccgggttcaagcagttctcctgcctcagcctcctgagtagctgggattacaggcatgtgccaccacgcctggctaatttttgtatttttagtagagacgggttccaccatgttggccaggctggtctccaactcctgacctcaaatgatccacccacctaggcctcccaaagtgctgggattacaggagtgagccaccgtgcccagccttgccctgctttctaggagatggagttttctgaatttttctgtatttaggttttctgtactattttttgtccacttgatgcaaacttcttcagctgtgtagaaactttatgaatagatgagtgcttgagtgtctccagtctctaaagtggctgcttttattctttcttcaaagttaataacatgttgcaagatttttggacaaaatattatggtgtgtcataggaaaagcaccatgaattatatttaggtatagcaagtcagatcctttgaagtgactctgtctctgttcttagaagggttcttggaattggctgtggtttgaatctttctactgtcagaggagacccattaaaagccagaatctgcataaagctttctttacttcaaacactgaagctgtaggcgagccatcccgtatcgactttatactcaaagaaggaaaagccagattgcagtgagtgggtaggacagctcagatccaaatgaaagtagggtctcaagtaacccaagggtggccgggtacggtggctcacgcctgtaatcctagcagtttgggaggcagaggcgggcagattgcctgagctcaggagtttgagaccagcctgggcaacatggtgaaaccctgtctctactaaaatacaaaagaaattagccaggtgtggcggcatacccctgtagtcacggctacttgggaggcagaggcaggagaattgcttgaactcgggaggtggaggttgcagtgagctgagattgcaccactgtactccagcactccagcctgggcgacagagtgagactctgtctctacaaaaaaaaaaaaaaaaaaaagtaacccaagggagggagctaccctctagtcgggcagctgatactgcttccttgcatggatacatgggagggagacgttatagattaagaaatgatagcaagataaacaaaatgatttgttgggtatcttttactttacatttgttatttgcagaggagtgttgtatatatagatgttattttatgtcacactgcttcaatgatacctatatccatgtgtttgtatccatgtttttatccattcaactgtattaaaaggtgttgggacagga

SEQ ID NO: 119597 - DNA, 1089 bp, Homo sapiens
  Payload ID: 3442
  Gene Symbol: CXorf56
  Gene Name: chromosome X open reading frame 56
  Uniprot ID: Q9H5V9
  ENST ID: ENST00000536133
  CDS Start-End: 54-680
tttcggggcgaccctcttcttggcgtagagttttcagattgctcttgggaatcatgccgaaagtagtgtctcggtcagtagtctgctctgacactcgggaccgggaggaatatgacgacggcgagaagcccctccatgtttactactgtttgtgcggccagatggtcctagtgctggactgccagttagagaaattgcccatgaggccccgggaccggtcccgtgtgattgatgctgccaaacatgcccataagttttgtaacacagaagatgaggagactatgtatctgcggaggtgtggactgccgctcttctaccaatcccagccaaagaatgctcctgttaccttcattgtggatggagcagtagtcaagtttggccagggctttgggaaaacgaacatatatactcagaaacaagagcctcctaagaaggtgatgatgaccaaacggaccaaagacatgggcaagttcagttctgtcaccgtgtctaccattgatgaagaggaagaggagattgaggctagggaagttgctgactcatatgcacagaatgccaaagtgattgaaaaacagctggagcgcaaaggcatgagcaagaggcgactgcaagagctggctgaattggaagccaagaaagcgaaaatgaaggggaccttgattgacaaccagttcaaataaccaggcctttttctaagccctagactagaggcaagcatttagatcaggaggcaaagtaatttcttgattacatagacggattcctatttatgccctagcagaaggctttacgttgtttcccattgattctcctacattcagtgaggtctttaactgagtccatttaacttgctttcttttttttttttttttttttgagataaagtcttgctctttcgcccaggatggagtgcagtggtgcgatctcggctcactgcaacctccgcctcccgggttcaagcagttctcctgcctcagcctcctgagtagctgggattacaggcatgtgccaccacgcctggctaatttttgtatttttagtagagacgggttccaccatgttggccaggctggtctccaactcctgacc

SEQ ID NO: 119598 - DNA, 3607 bp, Homo sapiens
  Payload ID: 3443
  Gene Symbol: CXorf57
  Gene Name: chromosome X open reading frame 57
  Uniprot ID: Q6NSI4
  ENST ID: ENST00000372544
  CDS Start-End: 152-2428
aaagtctttgcagcctcgctacggggcggagtcttgcctgtcagcaggggcagagtagcgatcgtcgccaaagcgcgcggttttatttctctccgctttggacggggcaaactagcttttgggagtgaagcgggtacgcagttatccaacaatgtctggtgagtcaggacagcctgaggctggtccctcacatgcagggctagattggccgaaccctgagaggaatcgggctggggtcccgggaggggtgatccgaagagctggttcccaagggcccaggtcctggatccaaaaggttcttgagcagattatggactcacctcgccagtgtgtcaccccctcggaggtggtgcctgtaactgtgctggccgtccagaggtacctgttagaggatgagccacgcgacacggtgcccaagcctcccctttattgctatgatgtgacgatctcagatggggtgtaccaggagaagtgctacctggaccccagcttgaactctctcgtatatcaaaatattcttaaagttggcattcaaatgagaatttccagggtctcatgtctttacaatgagaaaaggataggccaggggatcctgtgcatagataacgtccactgtggggagacttcagacagtatttctttagaaactcccttcagaaatagagcgcaccaggagaaaccagagaggcctttaagaggcgggaagagtcattacctggcgctgtggaataacgaagatccctatggagatatctggttaacagacaagcaacctgaggaacacaactttagcgataccaaaataatttccctttctcatcttgaaatgacctggactaacagaagaaattttcctgcattgcttgtgaggatcttacataaatcaaaactgcgatactatggaaaacctgataaaaagatgattgaaccatatcagacctttttggaagttgctgacagttcaggcacagtgtcagtgattatgtggaatgccctgtgtcctgagtggtataaaagtttgcgggttggtttagttcttctgcttcaagactattctgttaaaaagagttatccattcagaatacagcctgtccccgtggatccacagatcaaactaatttctacaatggaaatctgcctgaatcttcgagatcccccaacaaatataattatcattccagaaaagcaggtgaaaccagaatggagactgccaaagctaaatcaccgatttaccacaaggtcagaactggatgatatgccagaaaattgcatctgtgatgttattggccttttagtttttgtaggaagggtccagcggtcaaaaaagaaagaaaaccgtgaagatttttggtcatatcgctggattcacattgctgacggtacttcagaacaaccatttatagtggaactgttttcaacatcgcagccagaaatctttgaaaatatttacccaatggcatattttgtgtgtacacagttgaaagttgtcagaaatgacaatcaagtacctaagctgctttacctcaccactacaaatgagagtggagtgtttattactggtcatagaggccagccgtatacgtatgatgccaagaatgctaacagaccctcgacctctcaagcagctagagtagaaattcaagaaagaaatggtaaacggcatcaagatgatgagcctgtgaattctcagtatttccaaactacatctacaaatttaagtctgagcaataaaataagaattcttcaaggcccacacgctaatccagttgctgtacctcaaccaggagcttctgtacaaacaaagggaattaaaccgggcatgccaagcatcttcaaccgtcgagcaaatataaatgctaatctgcaagggaaagccagaaaaactataagtgataggtgggagagtcagctgtggagagagaaaaagtttggcttaatagatcacctacactacagccgtgtttatcctgaaagtattccacggaaatttatgtttgaacacagaaagtttcttagtgaccagtataattctcagcctgcgaaatatgtaccaccagaaggaaggcccccaaaacttgatgattttaagagcgcccgaagccttggacattttgaagtaaccatactaggtctgaaccatgagatagcaatcgatgttgctttcctacccatgtattgtccagaagatattcgaacatctcaaatagacacactgttgacctccatgaattacagctgtgcatatccacaggacacaactggaaatgaccgattgccaggtccaagagcggttgcaggtgatattataaaagcagcaactgaactggatagagtgcatatcgtcggtatcttggatatctgtaatttgggtaataataaagtggaagtctatttgcacaagatttatagtccagagaatacttcttaaaagttagcaaatgaaattattacagattatacgagtgtactgctttaaagatattccatcattttgctggtaatttcagtaactgttttcagcaagaatattacatgagctctaaagttattaagcagttttatgttcgttttgtgtttagggagctttttaaaacacttcatttcagattcattattgaaaaaggtcatcaaaataatttttgtgtataagggaatttaccttgcttaccttactagtatgactattatcttgacttctggtaatttatgttcactattccatttgtgaagtgtactttcattctaaagcctcagtataaggcatcctaacttacaagagtaactttccatggacatttaacatccttccaattttattcacatataatgggaaattttgaattgccagtttgaagactgttctcctaaagtgttcaacctgcacttcttacaaccaaggtagtttgtatcattttcaaaagtacacattattagggtctagttgcccctggtccttagcttgctcagctgcaaaataagcgtgctaaattaaattgtcttaaggtttttccacttcattttgtgactttgtgtggttcgaatttctcagtattttaaccagtgtgttgatgttaaagtcaaaggctgcagtatgtctatattcttgctgtactcattggtagtttcagtatatgtaatgtgagtttaaatagtgaaattgtatctcatattaacatttcaaatgctcatattgaaaatggaaaatagtaaacacgggaattgattttattctggttgtctataatacttcattttaaatgtaaatggccactctgcatttgcaaggcccggtggttgacatctgtgtggtttgttagatgagacaaaatgaccattaaatgagtttatagattattctgtatcaagataaatctgattccagttaagctataaacttgtgggattttcttgtagccctatagttctgtgacttcatttgctatacgctttaaatgtgttgagcagcctatgaacctaaagacatactgcagtttgttcataaatgtattcagtcttttattctttataattgtgtgtaaatgttaactaaacagtggattcctctcgtgttacagttttgagtgaattattaaagaagttaaaatgc

SEQ ID NO: 119599 - DNA, 3861 bp, Homo sapiens
  Payload ID: 3443
  Gene Symbol: CXorf57
  Gene Name: chromosome X open reading frame 57
  Uniprot ID: Q6NSI4
  ENST ID: ENST00000372548
  CDS Start-End: 110-2677
agcaggggcagagtagcgatcgtcgccaaagcgcgcggttttatttctctccgctttggacggggcaaactagcttttgggagtgaagcgggtacgcagttatccaacaatgtctggtgagtcaggacagcctgaggctggtccctcacatgcagggctagattggccgaaccctgagaggaatcgggctggggtcccgggaggggtgatccgaagagctggttcccaagggcccaggtcctggatccaaaaggttcttgagcagattatggactcacctcgccagtgtgtcaccccctcggaggtggtgcctgtaactgtgctggccgtccagaggtacctgttagaggatgagccacgcgacacggtgcccaagcctcccctttattgctatgatgtgacgatctcagatggggtgtaccaggagaagtgctacctggaccccagcttgaactctctcgtatatcaaaatattcttaaagttggcattcaaatgagaatttccagggtctcatgtctttacaatgagaaaaggataggccaggggatcctgtgcatagataacgtccactgtggggagacttcagacagtatttctttagaaactcccttcagaaatagagcgcaccaggagaaaccagagaggcctttaagaggcgggaagagtcattacctggcgctgtggaataacgaagatccctatggagatatctggttaacagacaagcaacctgaggaacacaactttagcgataccaaaataatttccctttctcatcttgaaatgacctggactaacagaagaaattttcctgcattgcttgtgaggatcttacataaatcaaaactgcgatactatggaaaacctgataaaaagatgattgaaccatatcagacctttttggaagttgctgacagttcaggcacagtgtcagtgattatgtggaatgccctgtgtcctgagtggtataaaagtttgcgggttggtttagttcttctgcttcaagactattctgttaaaaagagttatccattcagaatacagcctgtccccgtggatccacagatcaaactaatttctacaatggaaatctgcctgaatcttcgagatcccccaacaaatataattatcattccagaaaagcaggtgaaaccagaatggagactgccaaagctaaatcaccgatttaccacaaggtcagaactggatgatatgccagaaaattgcatctgtgatgttattggccttttagtttttgtaggaagggtccagcggtcaaaaaagaaagaaaaccgtgaagatttttggtcatatcgctggattcacattgctgacggtacttcagaacaaccatttatagtggaactgttttcaacatcgcagccagaaatctttgaaaatatttacccaatggcatattttgtgtgtacacagttgaaagttgtcagaaatgacaatcaagtacctaagctgctttacctcaccactacaaatgagagtggagtgtttattactggtcatagaggccagccgtatacgtatgatgccaaggtaaaaaactttattcaatggattagaacaaagtctgattccggggaacagaagaatatggttattggtggatattacccctatccaccagtgccagagacattttccaagtatagtagttctattaaagttgagtcgctcttgacagctataagtgaagtcaggaaggagattgaagacttgcagtatagggaacaaaagcgcattgcaattcaggggataattactgctataaagtatatcccccatagcagtgcgactgaaagtgcctcagcatcagaaacacttcggaatgctaacagaccctcgacctctcaagcagctagagtagaaattcaagaaagaaatggtaaacggcatcaagatgatgagcctgtgaattctcagtatttccaaactacatctacaaatttaagtctgagcaataaaataagaattcttcaaggcccacacgctaatccagttgctgtacctcaaccaggagcttctgtacaaacaaagggaattaaaccgggcatgccaagcatcttcaaccgtcgagcaaatataaatgctaatctgcaagggaaagccagaaaaactataagtgataggtgggagagtcagctgtggagagagaaaaagtttggcttaatagatcacctacactacagccgtgtttatcctgaaagtattccacggaaatttatgtttgaacacagaaagtttcttagtgaccagtataattctcagcctgcgaaatatgtaccaccagaaggaaggcccccaaaacttgatgattttaagagcgcccgaagccttggacattttgaagtaaccatactaggtctgaaccatgagatagcaatcgatgttgctttcctacccatgtattgtccagaagatattcgaacatctcaaatagacacactgttgacctccatgaattacagctgtgcatatccacaggacacaactggaaatgaccgattgccaggtccaagagcggttgcaggtgatattataaaagcagcaactgaactggatagagtgcatatcgtcggtatcttggatatctgtaatttgggtaataataaagtggaagtctatttgcacaagatttatagtccagagaatacttcttaaaagttagcaaatgaaattattacagattatacgagtgtactgctttaaagatattccatcattttgctggtaatttcagtaactgttttcagcaagaatattacatgagctctaaagttattaagcagttttatgttcgttttgtgtttagggagctttttaaaacacttcatttcagattcattattgaaaaaggtcatcaaaataatttttgtgtataagggaatttaccttgcttaccttactagtatgactattatcttgacttctggtaatttatgttcactattccatttgtgaagtgtactttcattctaaagcctcagtataaggcatcctaacttacaagagtaactttccatggacatttaacatccttccaattttattcacatataatgggaaattttgaattgccagtttgaagactgttctcctaaagtgttcaacctgcacttcttacaaccaaggtagtttgtatcattttcaaaagtacacattattagggtctagttgcccctggtccttagcttgctcagctgcaaaataagcgtgctaaattaaattgtcttaaggtttttccacttcattttgtgactttgtgtggttcgaatttctcagtattttaaccagtgtgttgatgttaaagtcaaaggctgcagtatgtctatattcttgctgtactcattggtagtttcagtatatgtaatgtgagtttaaatagtgaaattgtatctcatattaacatttcaaatgctcatattgaaaatggaaaatagtaaacacgggaattgattttattctggttgtctataatacttcattttaaatgtaaatggccactctgcatttgcaaggcccggtggttgacatctgtgtggtttgttagatgagacaaaatgaccattaaatgagtttatagattattctgtatcaagataaatctgattccagttaagctataaacttgtgggattttcttgtagccctatagttctgtgacttcatttgctatacgctttaaatgtgttgagcagcctatgaacctaaagacatactgcagtttgttcataaatgtattcagtcttttattctttataattgtgtgtaaatgttaactaaacagtggattcctctcgtgttacagttttgagtgaattattaaagaagttaaaatgcaataa

SEQ ID NO: 119600 - DNA, 2880 bp, Homo sapiens
  Payload ID: 3443
  Gene Symbol: CXorf57
  Gene Name: chromosome X open reading frame 57
  ENST ID: ENST00000421550
  CDS Start-End: 1-1701
aataacgaagatccctatggagatatctggttaacagacaagcaacctgaggaacacaactttagcgataccaaaataatttccctttctcatcttgaaatgacctggactaacagaagaaattttcctgcattgcttgtgaggatcttacataaatcaaaactgcgatactatggaaaacctgataaaaagatgattgaaccatatcagacctttttggaagttgctgacagttcaggcacagtgtcagtgattatgtggaatgccctgtgtcctgagtggtataaaagtttgcgggttggtttagttcttctgcttcaagactattctgttaaaaagagttatccattcagaatacagcctgtccccgtggatccacagatcaaactaatttctacaatggaaatctgcctgaatcttcgagatcccccaacaaatataattatcattccagaaaagcaggtgaaaccagaatggagactgccaaagctaaatcaccgatttaccacaaggtcagaactggatgatatgccagaaaattgcatctgtgatgttattggccttttagtttttgtaggaagggtccagcggtcaaaaaagaaagaaaaccgtgaagatttttggtcatatcgctggattcacattgctgacggtacttcagaacaaccatttatagtggaactgttttcaacatcgcagccagaaatctttgaaaatatttacccaatggcatattttgtgtgtacacagttgaaagttgtcagaaatgacaatcaagtacctaagctgctttacctcaccactacaaatgagagtggagtgtttattactggtcatagaggccagccgtatacgtatgatgccaagaatgctaacagaccctcgacctctcaagcagctagagtagaaattcaagaaagaaatggtaaacggcatcaagatgatgagcctgtgaattctcagtatttccaaactacatctacaaatttaagtctgagcaataaaataagaattcttcaaggcccacacgctaatccagttgctgtacctcaaccaggagcttctgtacaaacaaagggaattaaaccgggcatgccaagcatcttcaaccgtcgagcaaatataaatgctaatctgcaagggaaagccagaaaaactataagtgataggtgggagagtcagctgtggagagagaaaaagtttggcttaatagatcacctacactacagccgtgtttatcctgaaagtattccacggaaatttatgtttgaacacagaaagtttcttagtgaccagtataattctcagcctgcgaaatatgtaccaccagaaggaaggcccccaaaacttgatgattttaagagcgcccgaagccttggacattttgaagtaaccatactaggtctgaaccatgagatagcaatcgatgttgctttcctacccatgtattgtccagaagatattcgaacatctcaaatagacacactgttgacctccatgaattacagctgtgcatatccacaggacacaactggaaatgaccgattgccaggtccaagagcggttgcaggtgatattataaaagcagcaactgaactggatagagtgcatatcgtcggtatcttggatatctgtaatttgggtaataataaagtggaagtctatttgcacaagatttatagtccagagaatacttcttaaaagttagcaaatgaaattattacagattatacgagtgtactgctttaaagatattccatcattttgctggtaatttcagtaactgttttcagcaagaatattacatgagctctaaagttattaagcagttttatgttcgttttgtgtttagggagctttttaaaacacttcatttcagattcattattgaaaaaggtcatcaaaataatttttgtgtataagggaatttaccttgcttaccttactagtatgactattatcttgacttctggtaatttatgttcactattccatttgtgaagtgtactttcattctaaagcctcagtataaggcatcctaacttacaagagtaactttccatggacatttaacatccttccaattttattcacatataatgggaaattttgaattgccagtttgaagactgttctcctaaagtgttcaacctgcacttcttacaaccaaggtagtttgtatcattttcaaaagtacacattattagggtctagttgcccctggtccttagcttgctcagctgcaaaataagcgtgctaaattaaattgtcttaaggtttttccacttcattttgtgactttgtgtggttcgaatttctcagtattttaaccagtgtgttgatgttaaagtcaaaggctgcagtatgtctatattcttgctgtactcattggtagtttcagtatatgtaatgtgagtttaaatagtgaaattgtatctcatattaacatttcaaatgctcatattgaaaatggaaaatagtaaacacgggaattgattttattctggttgtctataatacttcattttaaatgtaaatggccactctgcatttgcaaggcccggtggttgacatctgtgtggtttgttagatgagacaaaatgaccattaaatgagtttatagattattctgtatcaagataaatctgattccagttaagctataaacttgtgggattttcttgtagccctatagttctgtgacttcatttgctatacgctttaaatgtgttgagcagcctatgaacctaaagacatactgcagtttgttcataaatgtattcagtcttttattctttataattgtgtgtaaatgttaactaaacagtggattcctctcgtgttacagttttgagtgaattattaaagaagttaaaatgc

SEQ ID NO: 119601 - DNA, 2299 bp, Homo sapiens
  Payload ID: 3443
  Gene Symbol: CXorf57
  Gene Name: chromosome X open reading frame 57
  Uniprot ID: Q6NSI4
  ENST ID: ENST00000461251
  CDS Start-End: 107-1810
aggggcagagtagcgatcgtcgccaaagcgcgcggttttatttctctccgctttggacggggcaaactagcttttgggagtgaagcgggtacgcagttatccaacaatgtctggtgagtcaggacagcctgaggctggtccctcacatgcagggctagattggccgaaccctgagaggaatcgggctggggtcccgggaggggtgatccgaagagctggttcccaagggcccaggtcctggatccaaaaggttcttgagcagattatggactcacctcgccagtgtgtcaccccctcggaggtggtgcctgtaactgtgctggccgtccagaggtacctgttagaggatgagccacgcgacacggtgcccaagcctcccctttattgctatgatgtgacgatctcagatggggtgtaccaggagaagtgctacctggaccccagcttgaactctctcgtatatcaaaatattcttaaagttggcattcaaatgagaatttccagggtctcatgtctttacaatgagaaaaggataggccaggggatcctgtgcatagataacgtccactgtggggagacttcagacagtatttctttagaaactcccttcagaaatagagcgcaccaggagaaaccagagaggcctttaagaggcgggaagagtcattacctggcgctgtggaataacgaagatccctatggagatatctggttaacagacaagcaacctgaggaacacaactttagcgataccaaaataatttccctttctcatcttgaaatgacctggactaacagaagaaattttcctgcattgcttgtgaggatcttacataaatcaaaactgcgatactatggaaaacctgataaaaagatgattgaaccatatcagacctttttggaagttgctgacagttcaggcacagtgtcagtgattatgtggaatgccctgtgtcctgagtggtataaaagtttgcgggttggtttagttcttctgcttcaagactattctgttaaaaagagttatccattcagaatacagcctgtccccgtggatccacagatcaaactaatttctacaatggaaatctgcctgaatcttcgagatcccccaacaaatataattatcattccagaaaagcaggtgaaaccagaatggagactgccaaagctaaatcaccgatttaccacaaggtcagaactggatgatatgccagaaaattgcatctgtgatgttattggccttttagtttttgtaggaagggtccagcggtcaaaaaagaaagaaaaccgtgaagatttttggtcatatcgctggattcacattgctgacggtacttcagaacaaccatttatagtggaactgttttcaacatcgcagccagaaatctttgaaaatatttacccaatggcatattttgtgtgtacacagttgaaagttgtcagaaatgacaatcaagtacctaagctgctttacctcaccactacaaatgagagtggagtgtttattactggtcatagaggccagccgtatacgtatgatgccaaggtaaaaaactttattcaatggattagaacaaagtctgattccggggaacagaagaatatggttattggtggatattacccctatccaccagtgccagagacattttccaagtatagtagttctattaaaggtactaatgtaattgccagtccttctaaatatgtttatattttatatgtatggcttatgctatttcaattagtcatctttattcttttcttttatgggagtgatctaaagtttagcaacattcaccgataatagctttgtcttaatgcagatctaaaaatatatgtcacgtattttctatatagttttccctatatctcgcatggtgctctaaagattaatactttgatttttatcagactggaagaaaagagaaaacacagatgataaccaactggagatataggttgagtattcctaatccaaaaatccgaaatctgaaatgttccaaaacctgaaacttctttttttttttttgagacggagtctcgctctgtcgcccaggctggagtgcagtggcgggatctcggctcactgcaagctccgcctcccgggttcacgccattctcctgcctcagcctcccatgtagctgggactacaggcgtgagccaccgcgcccggcctaacctgaaacttcttgagtactgaagtgacactcaaagaactactcattggagcagttcagattttggaattttgcattagggaagctgaactgataagtataatacaaatattcc

SEQ ID NO: 119602 - DNA, 1752 bp, Homo sapiens
  Payload ID: 3444
  Gene Symbol: CXorf58
  Gene Name: chromosome X open reading frame 58
  Uniprot ID: Q96LI9
  ENST ID: ENST00000379211
  CDS Start-End: 550-1548
aaccgcaagcaggcagcggtgcgggtgacggccgtactgcaaactcggtgcggcgaaggtttagttcaatcacccggttctagaagccgcgtcgctgagccgcagcgcgtcgcgcccgggcagcgggtgaacgcaaaccccgccctccaggaggctccgcccctgcgccggcggttgctaggcggcaagaaagcgccggctctgtgtggacggtacgcggaggcgcgaggagggaggcgcctggcgttgccgcggcgctgggaaactgtctttgcagcggcgactgggcgcccagcggcgtgtactgggatttctgtgagcagaggctgccgagagggggcgcttggagggccaccggcggcttcgaaagcttcgcagccggaagccgccggttggcggcctggatttaccttacgaaaggttttaaccaaggacttgaggtttctcaggttttaaatttaaactaatatgctgtgtcctttaatcggaaaaggctctgaccttattttttcccgttaagaaacaagcgattacttcattggagggaaaatgaatcgttcctcaaatgtaccacgtaaaggtattctgaaatcaggtacaagatccttacaaaaagttcgcagagtacatttcgcaaatgcacgaaatgcaagatcattactatcaatgcttaaagacatttcagctcaaataatacagagggcttggttatctcatacaaacaaaatgatatttcgactcctaaaacacgcaatttgtgcagcggaattctatgtaacacatgaaatactgaagaaagtggcccccttagaggctaagcttattaaggatcctactatgcagtgtaaaattagattcagatttagaggtgaaacgtttccacctttcatcgtgtttaaaatttttcttcatactgatggccatggttacaagtattttagtggaaaaaatgtattaatgccgtcaagtaaggcagtggatgatgcttgcaaactaatgggggaaaggaaatttcaccgtataattatggaagatgaacgtattttcccgaagtccaaagtaactgatataatggatgttgtcaccatgcaagattatgtacaatatcgcagttttttcgatgaggcccctgcattttctggcggcagaaataacagctggcgcaaattaaatcttgaaaatattcccaggacaatgctaatgtatgacatagttcattattcagagtctggagtgatctcaaaccgtctacgaaatgaaatgaagtttctgttacagagaccagtaacgcaagagatccataagcaccagctacggattgtttctgaaattaggggtccatacttaactgtccaacctctatatcggccctacaaacagcaaaatcaagttaaatttctgggtcgtcgatccaagcaagctcaaatgaaagttgaaaaaatgagaaaagtttatttggctaaagaaaaaaatacttctgaggtgactgaaccaaaaacgggcccatcaggtacaaaggataactatcatctccactccatcttttgacattgtgaaaactaaggaatctatgtcagagtgtcagctggaaaaagaaaaaaggactcattttcctggtatcaaaacttggcagctggtgattctccatcatgataatgaacagttaattgacagaaaaccaaagttgtttaacaatctgcttgtctgtctataaataatgagtatgtgtaataaaggaaaataacatagaat

SEQ ID NO: 119603 - DNA, 516 bp, Homo sapiens
  Payload ID: 3444
  Gene Symbol: CXorf58
  Gene Name: chromosome X open reading frame 58
  ENST ID: ENST00000435707
  CDS Start-End: 1-379
tttcgcaaatgcacgaaatgcaagatcattactatcaatgcttaaagacatttcagctcaaataatacagagggcttggttatctcatacaaacaaaatgatatttcgactcctaaaacacgcaatttgtgcagcggaattctatgtaacacatgaaatactgaagaaagtggcccccttagaggctaagcttattaaggatcctactatgcagtgtaaaattagattcagatttagaggtgaaacgtttccacctttcatcgtgtttaaaatttttcttcatactgatggccatggttacaagtattttagtggaaaaaatgtattaatgccgtcaagtaaggtgacgtttcatgatgtacattttatgttaacttagctttttaacatctacatagtatctgaattgcattcaaattatacagaataagttatttcaccatgaaacagcccaccaggtaggtagtgtgtttttttttaagcaccatgtttcaaagtgtctccacttactagcta

SEQ ID NO: 119604 - DNA, 601 bp, Homo sapiens
  Payload ID: 3445
  Gene Symbol: CXorf65
  Gene Name: chromosome X open reading frame 65
  Uniprot ID: A6NEN9
  ENST ID: ENST00000374251
  CDS Start-End: 50-601
tgcatgactcatcagggcactttgtgaagagtgaggcgatcttgagggcatgttcatcttcatcaaacatggagataatcagcagtttctggtcaataccaactgtgctgtcgtcgtgttgctgtattacatccgcagtaaagtaaagttgcctaaaacaaacaccatcgatttgtgtgaacaaacggggaaaatgaagatgcttttcctgatgaagcccaatcatgcagagtatgccagcaaataccttacagctcgaagcacctactacgtttgtaaggtggaacgtgggccaccaggaaccaggctggagaatgcttacagagcttttgtgcctctcctcaagaatccggagccttggctgcttgttgcactgcgcatacaatgtgatgccctggagaggagacgaattcagatgcttaaaatgaaagaagccaagaaggtcgttataattgaaccccctgcgagtgtcccgtccaagcaatcaggacgatcagacaaaaagaagtccactcgcaagtctccgacctttaggaacagaccagacttcaggaagaataaaggtcgccaactcaataaaaccaccaagcaaaagaagtaa

SEQ ID NO: 119605 - DNA, 863 bp, Homo sapiens
  Payload ID: 3445
  Gene Symbol: CXorf65
  Gene Name: chromosome X open reading frame 65
  ENST ID: ENST00000438526
  CDS Start-End: 233-361
ataatcccttaactgcagtctcaggccccacccctggggatactggttatccacaactatcaacagctctctcctgcctgtccagcctgggcatcctcagcctatgaaatccatctgcctctctagtccaccaaccctataggcctatttgccccacacaaggcctctagaacaccctccttctgcatgactcatcagggcactttgtgaagagtgaggcgatcttgagggcatgttcatcttcatcaaacatggagataatcagcagtttctggtcaataccaactgtgctgtcgtcgtgttgctgtattacatccgcagtaaaacaccatcgatttgtgtgaacaaacggggaaaatgaagatgcttttcctgatgaagcccaatcatgcagagtatgccagcaaataccttacagctcgaagcacctactacgtttgtaaggtggaacgtgggccaccaggaaccaggctggagaatgcttacagagcttttgtgcctctcctcaagaatccggagccttggctgcttgttgcactgcgcatacaatgtgatgccctggagaggagacgaattcagatgcttaaaatgaaagaagccaagaaggtcgttataattgaaccccctgcgagtgtcccgtccaagcaatcaggacgatcagacaaaaagaagtccactcgcaagtctccgacctttaggaacagaccagacttcaggaagaataaaggtcgccaactcaataaaaccaccaagcaaaagaagtaatactaggtgtgaaattactggaatttaacgtgagatttctttttctagaaagactccttctcccaatatctgcactaaggcttgagtacatacgcccc

SEQ ID NO: 119606 - DNA, 1281 bp, Homo sapiens
  Payload ID: 3446
  Gene Symbol: CXorf66
  Gene Name: chromosome X open reading frame 66
  Uniprot ID: Q5JRM2
  ENST ID: ENST00000370540
  CDS Start-End: 25-1110
aatcatttgaaccaagttgcggacatgaatcttgttatttgtgtcctacttttgtccatttggaaaaataattgcatgactacaaaccaaaccaatggatcttctactacaggagataaacctgttgaatcaatgcagacaaaattgaactaccttagaagaaatctactcattttagttggtattatcatcatggtttttgtctttatctgtttttgttatctccattataattgtctgagcgatgatgcgtccaaagcaggaatggtcaagaaaaaaggcatagcagccaagtcatctaaaacatcattcagtgaagccaagacagcctctcaatgcagtccagaaacacaacccatgctatctactgcagacaagtcatctgattcatcgagtccagaaagggcatccgcacaatccagcacagaaaaattaatcagaccctcaagtctacaaaagccatccataccaaacagtgcaggaaagttaactaggccatcatatccaaaaaggtcatccaagtcatcatgctcaaaaaaattaagcaagtcatctcacctggaaaaggcacataagaaaggcagcctagaaaaattatgtaagctagactatgcgtgtaagctagccagttcagataagccagtcaggccacctcagctattcaagccactttattcatctcatccacaaaatgaaatctcaccatccaagccattcggtccacaggaattggctaagcctcccaaacattttaatccaaaaaggtcagtgagtctaggcagggcagccttattatccaactctgaattagctgaaacttgtcaaccctacaagaaaaaacatcttgttgccaaaacttataggcctttggtcaatgatatttctgaggcaaaggagaaaaacactcaaaacctacatgtttcaagcaaagtcaagtcctcttccaggtcctttcgtaagttagattccaggaacaatgcatacggtgatcatgtgaatgacagtgatacgatgaaatattatagtgaggttgacagtgataaagttataatcattacgtgtgacagagggtacaatcaagtcacctctgaagtaaccctaaatgattaggagctcaacaaaaataaaatccaagtgtgaaagagcaaacttataccaactattttatgctcatcatcccttaagaaaccagtagagggaaaaatcactatcaagatcacccatatctgtcttggaggcgatttattttaaaaatatcaataaaatgcatgacataaatta

SEQ ID NO: 119607 - DNA, 1929 bp, Homo sapiens
  Payload ID: 3447
  Gene Symbol: CXorf67
  Gene Name: chromosome X open reading frame 67
  Uniprot ID: Q86X51
  ENST ID: ENST00000342995
  CDS Start-End: 103-1614
ggactggctgggctccacccaccttcttgctctaccagttcgcgctctcctccggcagaagtagcagctgcgctcttgctctctgggggagaacctggcgttatggccactcagtcagacatggagaaggagcagaagcaccagcaggacgaggggcagggagggctgaacaacgaaaccgcccttgcctccggggatgcctgcgggaccgggaatcaagatcctgctgcttccgtcaccacagtctccagccaagcatctccctcgggcggcgccgccctaagcagcagcacagccggttcttccgctgcagccgccacctccgccgccattttcatcaccgatgaggcctcggggctgccaatcatagctgctgtgctgacggagaggcattctgaccgccaggactgccgcagtcctcacgaagtttttgggtgtgtggtgcccgaggggggcagccaggccgctgtggggccccagaaggccactggccacgccgacgagcacctggcccagaccaagagccccgggaacagccgtcgtaggaagcagccctgccgcaaccaggctgccccggctcagaagcctccagggcggcgtctgtttcctgagcctttgccgccatcttctccagggttccggcccagcagctatccctgttccggggcttctacgtcgagtcaggcaacccagccaggccctgcactcctaagccacgcatctgaggcaaggcctgctacccgaagccgcatcaccctggtagcttctgctctccgcagacgtgcatctggtccaggccctgtcatccgaggctgcaccgcccagccaggccctgcttttccacaccgcgccactcatctagaccctgctcgtctaagccctgaatctgcgccaggccctgcccgccgaggccgtgcatctgtgccaggccctgcccgccgaggctgcgattctgcgccaggccctgcccgccgaggccgcgattctgcgccagtctctgccccccgaggccgcgattctgcgccaggctctgcccgccgaggccgcgattctgcgccaggccctgcccttcgcgtccgcacagcaaggtcagacgccggtcatcgcagcaccagcacgacgccaggcactggcctccggagccgttccacccagcaaagatcagcccttctcagccgccgctctctgtctgggtcagctgatgagaatccttcctgtgggactggctcagaaaggcttgcctttcagagcagatcaggctctcctgatcctgaggtcccaagccgtgcttccccgcctgtttggcatgcagtccgtatgcgtgcctcctcaccctcaccccctgggaggttcttccttcccatccctcagcagtgggatgagagctcctcctcctcctatgcttccaactcctcctccccgagtaggtctcctggcctaagcccctcatccccttcccctgagtttttgggcctgagatctatctccactcctagccctgaaagccttaggtatgctttgatgcctgagttttatgctctgagccctgtccctccagaagagcaggcagaaatagagagcacagctcaccccgcaacaccgcctgagccgtgaccctctataagcatcctctaagacccacagaaggaatcaacatttacccactttgtgaatgggctgcctgccctgtagttagctgcgaggtctcccaaagttccagccgttaaccaacatcctgagtagtttagaagcctctcctccccatgactccaccacctagcacttaacctgctgttggcctttgattctgggccaccttcttcctcaagagtttgcctttgcccttgagctgagatttctgttttccaagttgcttttctgttatgaaatgttttaattagtaaaataaattgttttgtttaaacaaaa

SEQ ID NO: 119608 - DNA, 3897 bp, Homo sapiens
  Payload ID: 3448
  Gene Symbol: CLLU1
  Gene Name: chronic lymphocytic leukemia up-regulated 1
  Uniprot ID: Q5K131
  ENST ID: ENST00000378485
  CDS Start-End: 723-1088
gaaggtaaaaaaaagagggaggtctgagaaatagaaatatcagaggaaggaaataaaggagggtgagagtaaattctcttttagcattcagattccacagattccacaaatcacatttctttttttaccaactaaggaaaaataacacttgacctaacatttcattgcagttagctaaaggatgctagaaaaactatgttgcagtggtttgctctaatttcttcaggaatagagaaaagtgacaaaaagatcagagaagagaagaaaggaaactatcagaaaaatacagaattggagtaggatataacatatttgggttgaaggtaaaattttatattgtaatcttaagtatcttgctacttcagtttggtccctggaacagcagcatcagaatctgccgagggcttgttaaaaaggcagaatctcaggtcccatcccagactcactgaatcagaatataaatactgacaagatgccccgggattcatatgcacagtagagctggcgaagttccattgtagcctgtgattgttttctgcaacttagtatttctgagttttcccaaggaagaaaacccaggccttagcttctggcagacttgtgtttctcctttacttactagctgcatgactcatgagcaaggaaatcaaactttatgtgcctgagtttcctcatctataaaatggagactataataatcatctcctaggcttgttttgaggatgttcaacaaatgctcctttcattcctctatttacagacctgccgcagacaattctgctagcagcctttgtgctattatctgttttctaaacttagtaattgagtgtgatctggagactaactctgaaataaataagctgattatttatttattttctcaaaacaacagaatacgatttagcaaattacttcttaagatattattttacatttctatattctcctaccctgagttgatgtgtgagcaatatgtcactttcataaagccaggtatacattatggacaggtaagtaaaaaacatattatttattctacgtttttgtccaaaaattttaaatttcaactgttgcgcgtgtgttggtaatgtaaaacaaactcagtacagtagtattcagtacagtatttaagcccctgtacttaaacatattcctcgtaccaatgaagttacatgaaaagcaaatttgtgtgagatatcgtagatggaagtaaattagtctttatgttccccacaaattgaaatgcatttcaaaaactctgtgtgtgtatgtgtgtgtgtgacagagtgtgtgtgagagagagacagagagatacgctttggttgcctccataagctggctgctatgattaataagaccaagttttctaaagaaaatgagatcataacaaaagccctctttatgactatcttttatcaggggcaaaaaggaaagagacaaaacagcatgaaatgatgagaccaagtgatgaaaattcattcacaatgattgctttcaagagtaatttctcttgggtaattcagcagcctgttactatggctctctggagtgatagctaatgtaaatgaagcctctaaaagtggattatcctgacaagaatatactcagccaataatgcaacagaaatccattcaaagcattcgggaaaaattcaaaagaataaatattctttttttttttttaaagttaatgacctacgatccatttcttccctgactaacaagcagcaagcacttaaaaatatccagccaggatgaaatagaaacccacctgacttgttaatatttttgtttggtcccagggactcagattctaagccaaattctttgaatgatcttggcaaatgtctcgaattatttttgccaacttttctttatcttggaaaaaaagtttcatgaatgggtgtcaaaattgattagttttaaaaacctttcttgcagatacgtatggcaccctaaaactgtattagaaaaaaatttcatatctccaggcctttcattgggtcaggttggcatttcgctgccctttatgtgtgtgacaagtgaaaataaggaaagaaaaaaactcaagtgaagaaaatcagaatctgcgcagcagttcctgggcgtttcagctgcttcccacatcacctgcctcatcaagccccagcatccatctccttgctcatcttacaccctgtgtgcatgacaggcccaccattcatttatcagagcaaaggctctcccactattctggttcacccccctacttagccagatatacaagaatatctgcacggatgacctgcctcacctgggagctcagaggagctcagattccattactatcgcaccaaggacagatctcccagcaagaatgacagaaaagactaactgcccccaaaatctcccttccaaaacacagttctcttaattctcccaagaaaccagaatgtgactgctcacctctctaaggacctgaaaacaactggccatttcagctatttaaatcaactttaaaaaatccaaccgccaaaatattaaaccattttggttggaatgataacataactaacctgctgacagctgcttctgctaggtgcaaaaatggaaaaaaaaatacttctaatcaggtcaaatcactctacctttgggattctaaatttactcatattctcaaagaaatatattcagtcatagtggggaaaataggattattcctttagctcgataagcaaccagaagttcttccttcaaatcttgacatttaatcaatcagaaattgatttttggaaaactgtttcctatgaagctatctctgcctgaaggatttttcttttacaatccagactatagaaggaaattcacaacctggactttcacctccattggtcagagttttactgaccaattcccacctctgccttacacctaacggaagtttatgcctgttttctcttcacataccccaacagttacaaatggttgttattattaagcatcttttattttgtggcctctgattacatggtcccctaaattttgacctaatcacaaaagattggtaaaatttcttaacatattaataatattttgtttatgtgtcaatatcttagcatgtatcaattaagacagaggtcttaacgttctctttttgaaagagaatattaggattcagagatattaagagattctcccaggatcacagttaggtaacagagctggattttagtccaggtctgtctacagctctaacgtatatacaccctttgtataacatgtcacgaattcagcataaagggatcttcagtgatctaagtcaggggtcagcaaccttttctaaaaaggaccaaatagtaatatttcaggctttgtggaccctatggtctctatcataactgttcaaatcaccatgtagtgtaaaaggagccataagcaaaatataaactaacgaatgtggctgttttatgggatttttttttaactctttatttacaaaagcaggtggcagatcagaactcacttatgggccatagttctctgacccctgacctgagaaaatcttatatttatggacaacatttagactgtgacttgccaagtaagaacaagaagctctgtcaactgaaggtcaaggctggagttctgaaagcaaagagctgtctggtgttaatgataagtgaaatagttaaagttagaagatcccagttataagaagcacaaagaataatgaccatagactcctgaacaagaatgtctggacttctggcttaggcactcttgttgtatggtccaggccaagttacctaatctctccaggcctccattttcttatcattaaatgaagataataaaagtattttcctcagagagctgtaagaataaactgagctaacccatgtcaagcacatagaatagg

SEQ ID NO: 119609 - DNA, 686 bp, Homo sapiens
  Payload ID: 3449
  Gene Symbol: CLLU1OS
  Gene Name: chronic lymphocytic leukemia up-regulated 1 opposite strand
  Uniprot ID: Q5K130
  ENST ID: ENST00000378487
  CDS Start-End: 3-308
agatgaacaaattggggcacaacgaacttaaggaatgccttaagactgccactgattctctacagacagtgcagcctagtatctcccagacttgtacttcctatggccctgcacttggggccccactgcctggtagaaatgaagtggccttgctaacaagtttacctccaaactatgagatttcagaaggaaaaccaagagccatctctgcatatgtgagagcgggcaaaggaaatgtgacaaggagaagaaagaagacacacttgggcaatgatgatgggaagaaggaagcacaggagaaaatgtaagaaatgtacagcccatgaggaagatccaaagagaactttggccttaactaagcttcctacattctcctggagtcggtggtttatgaatgtggtgccatctggggaactgacaacccctgatgtgttcactctgctcgtcttccaggtgagagaagaagaaggcgagaaagaaagagaagttccagaatttcacaggctgagggagatggtagtaacttctgtttatgttggtttctgtttattggtttgctttttattttgaactcgtttgacttcaggttccagatttgtttttttctttgtaaacgagactttgacattgttagcaggcccatctgtttgcttttcttaaataaaatgtaaattggtttttgtttt

SEQ ID NO: 119610 - DNA, 1468 bp, Homo sapiens
  Payload ID: 3450
  Gene Symbol: CHURC1-FNTB
  Gene Name: CHURC1-FNTB readthrough
  ENST ID: ENST00000549987
  CDS Start-End: 4-1419
gcgatgtgtggcgactgtgtggagaaggaatatcccaaccggggtaatacctgcctggagaatggatctttcttactgaactttacaggctgtgcagtgtgcagtaagcgggattttatgctgatcacaaacaaatccttgaaagaagaagatggagaagaaatagttacctatgatcatttgtgtaagaattgtcatcatgtaatagccagacatgagtatacattcagtatcatggatgaatttcaggcaaaagtagaagaaaagatccaagaggtcttcagttcttacaagttcaaccaccttgtaccaaggcttgttttgcagagggagaagcacttccattatctgaaaagaggccttcgacaactgacagatgcctatgagtgtctggatgccagccgcccatggctctgctattggatcctgcacagcttggaactgctagatgaacccatcccccagatagtggctacagatgtgtgtcagttcctggagctgtgtcagagcccagaaggtggctttggaggaggacccggtcagtatccacaccttgcacccacatatgcagcagtcaatgcattgtgcatcattggcaccgaggaggcctatgacatcattaacagagagaagcttcttcagtatttgtactccctgaagcaacctgacggctcctttctcatgcatgtcggaggtgaggtggatgtgagaagcgcatactgtgctgcctccgtagcctcgctgaccaacatcatcactccagacctctttgagggcactgctgaatggatagcaaggtgtcagaactgggaaggtggcattggcggggtaccagggatggaagcccatggtggctataccttctgtggcctggccgcgctggtaatcctcaagagggaacgttccttgaacttgaagagcttattacaatgggtgacaagccggcagatgcgatttgaaggaggatttcagggccgctgcaacaagctggtggatggctgctactccttctggcaggcggggctcctgcccctgctccaccgcgcactgcacgcccaaggtgaccctgcccttagcatgagccactggatgttccatcagcaggccctgcaggagtacatcctgatgtgctgccagtgccctgcgggggggcttctggataaacctggcaagtcgcgtgatttctaccacacctgctactgcctgagcggcctgtccatagcccagcacttcggcagcggagccatgttgcatgatgtggtcctgggtgtgcccgaaaacgctctgcagcccactcacccagtgtacaacattggaccagacaaggtgatccaggccactacatactttctacagaagccagtcccaggttttgaggagcttaaggatgagacatcggcagagcctgcaaccgactagaggacctgggtcccggcagctctttgctcacccatctccccagtcagac

SEQ ID NO: 119611 - DNA, 1847 bp, Homo sapiens
  Payload ID: 3450
  Gene Symbol: CHURC1-FNTB
  Gene Name: CHURC1-FNTB readthrough
  ENST ID: ENST00000552941
  CDS Start-End: 1-323
actgcgtcgcgatgtgtggcgactgtgtggagaaggaatatcccaaccggggtaatacctgcctggagaatggatctttcttactgaactttacaggctgtgcagtgtgcagtaagcgggattttatgctgatcacaaacaaatccttgaaagaagaagatggagaagaaatagttacctatgatcgcaaaagtagaagaaaagatccaagaggtcttcagttcttacaagttcaaccaccttgtaccaaggcttgttttgcagagggagaagcacttccattatctgaaaagaggccttcgacaactgacagatgcctatgagtgtctggatgccagccgcccatggctctgctattggatcctgcacagcttggaactgctagatgaacccatcccccagatagtggctacagatgtgtgtcagttcctggagctgtgtcagagcccagaaggtggctttggaggaggacccggtcagtatccacaccttgcacccacatatgcagcagtcaatgcattgtgcatcattggcaccgaggaggcctatgacatcattaacagagagaagcttcttcagtatttgtactccctgaagcaacctgacggctcctttctcatgcatgtcggaggtgaggtggatgtgagaagcgcatactgtgctgcctccgtagcctcgctgaccaacatcatcactccagacctctttgagggcactgctgaatggatagcaaggtgtcagaactgggaaggtggcattggcggggtaccagggatggaagcccatggtggctataccttctgtggcctggccgcgctggtaatcctcaagagggaacgttccttgaacttgaagagcttattacaatgggtgacaagccggcagatgcgatttgaaggaggatttcagggccgctgcaacaagctggtggatggctgctactccttctggcaggcggggctcctgcccctgctccaccgcgcactgcacgcccaaggtgaccctgcccttagcatgagccactggatgttccatcagcaggccctgcaggagtacatcctgatgtgctgccagtgccctgcgggggggcttctggataaacctggcaagtcgcgtgatttctaccacacctgctactgcctgagcggcctgtccatagcccagcacttcggcagcggagccatgttgcatgatgtggtcctgggtgtgcccgaaaacgctctgcagcccactcacccagtgtacaacattggaccagacaaggtgatccaggccactacatactttctacagaagccagtcccaggttttgaggagcttaaggatgagacatcggcagagcctgcaaccgactagaggacctgggtcccggcagctctttgctcacccatctccccagtcagacaaggtttatacgtttcaatacatactgcattctgtgctacacaagccttagcctcagtggagctgtggttctcttggtactttcttgtcaaacaaaaccaatggctctgggtttggagaacacagtggctggttttaaaaattctttccacacctgtcaaaccaaaaatctatcagcccacgtggtgtggttggtgaacagtgcatgccaggaggaagcagtccctcctcaccagctctccagccaggacgatcacacagagatgaatggcatctgagtattacggcatccagagccactgctgactcccacttgcacgccaccattcagtcaccagactgggtgccctccgatgggtggaataagtctgcttcatgccaaggctgggctttgggtcccaccaagatgagttctctgtaagactgtggtggagttgcaccag

SEQ ID NO: 119612 - DNA, 517 bp, Homo sapiens
  Payload ID: 3450
  Gene Symbol: CHURC1-FNTB
  Gene Name: CHURC1-FNTB readthrough
  ENST ID: ENST00000551823
  CDS Start-End: 1-258
ggctgtgcagtgtgcagtaagcgggattttatgctgatcacaaacaaatccttgaaagaagaagatggagaagaaatagttacctatgatccagatttgtgtaagaattgtcatcatgtaatagccagacatgagtatacattcagtatcatggatgaatttcaggagtataccatgctgtgtctgttatgcggcaaagccgaagatactatcagtattctccctgatgacccccgacaaatgactctcttattctaaggatccttctacagatctgttataactatattgtgttggtttacaatacagcaagcctgatggcaaaagtagaagaaaagatccaagaggtcttcagttcttacaagttcaaccaccttgtaccaaggcttgttttgcagagggagaagcacttccattatctgaaaagaggccttcgacaactgacagatgcctatgagtgtctggatgccagccgcccatggctctgctattggatcctgcacagcttggaactgct

SEQ ID NO: 119613 - DNA, 207 bp, Homo sapiens
  Payload ID: 3450
  Gene Symbol: CHURC1-FNTB
  Gene Name: CHURC1-FNTB readthrough
  ENST ID: ENST00000553743
  CDS Start-End: 1-207
ggctgtgcagtgtgcagtaagcgggattttatgctgatcacaaacaaatccttgaaagaagaagatggagaagaaatagttacctatgatcgcaaaagtagaagaaaagatccaagaggtcttcagttcttacaagttcaaccaccttgtaccaagtgtctggatgccagccgcccatggctctgctattggatcctgcacagcttg

SEQ ID NO: 119614 - DNA, 799 bp, Homo sapiens
  Payload ID: 3451
  Gene Symbol: CHURC1
  Gene Name: churchill domain containing 1
  ENST ID: ENST00000359118
  CDS Start-End: 53-379
ggtttcgtcttcccggaagcgttggaggacattccctgttgactgcgtcgcgatgtgtggcgactgtgtggagaaggaatatcccaaccggggtaatacctgcctggagaatggatctttcttactgaactttacaggctgtgcagtgtgcagtaagcgggattttatgctgatcacaaacaaatccttgaaagaagaagatggagaagaaatagttacctatgatccagatttgtgtaagaattgtcatcatgtaatagccagacatgagtatacattcagtatcatggatgaatttcaggagtataccatgctgtgtctgttatgcgcaaagccgaagatactatcagtattctccctgatgacccccgacaaatgactctcttattctaaggatccttctacagatctgttataactatattgtgttggtttacaatacagcaagcctgatggtttgtcttatttcattcatactgaaaattctttgcatattttttttctgcttagacttacttattctttgaggaaaaaaggtaatgtaggagctcattgttctctagagctgagctcttctgctaaagttcaaagttcacatcagtgtagccagagtgaagcatctttgttagcagttatgtggtcagaaaacaactagaatgggagcacacctggtgcccagattttggtttccaataaaaggaaccaggactccttagaaaatgaactgattctagaactgggatatgaactgtacaagatgagcctagagtatcttgtgccacagaaaaatgaagtactg

SEQ ID NO: 119615 - DNA, 1023 bp, Homo sapiens
  Payload ID: 3451
  Gene Symbol: CHURC1
  Gene Name: churchill domain containing 1
  ENST ID: ENST00000551093
  CDS Start-End: 1-379
ccctgttgactgcgtcgcgatgtgtggcgactgtgtggagaaggaatatcccaaccggggtaatacctgcctggagaatggatctttcttactgaactttacaggctgtgcagtgtgcagtaagcgggattttatgctgatcacaaacaaatccttgaaagaagaagatggagaagaaatagttacctatgatcatttgtgtaagaattgtcatcatgtaatagccagacatgagtatacattcagtatcatggatgaatttcaggacaaaatcaaagggacccttaggaggagagtgtgtcattttctaggggaaaaaagaagttttcagtgcctcagctcttgccaggctgaagagacaaagttgtgtttatcttgaaaagtctttcagtgcgtggtgccacttgtcctggagaacacaccagcctctgcccctgcactgtaccatctcctatattatatcccccacctccacctcatcccccagcccccaagtcatgaggctcagtcgttgctgggagaatggtgaagaggagtcacagaacaggtggataaacttagtggatgaactgcacctaccttcctctcagacagagatttggtccccaagacttttcagagcgggtttgtgctggtcaccttcccacagaaggaagtgtgtggaggaagttgaagctgctgtggttccagacgcaggcaggtcacccctgatgctttcaacaagaggcgtgcagtgcatcgcaggacatctgctaagggccatctcagaggcccacccctggaagccacagaaaccgaaaagacccaagcacccgccaactcaacaagttactcttttaaaaatgccttgatttcttcatcagtaaaactagcaatggggcttgacctagctttgggattttagagtgaaatttcaataacaaagcaaatgtttactagggtgttttcacaggggcacatccattgggaactgtctccttggaacaaagaataagcaagtccggggagcagctggtcttgaga

SEQ ID NO: 119616 - DNA, 1521 bp, Homo sapiens
  Payload ID: 3451
  Gene Symbol: CHURC1
  Gene Name: churchill domain containing 1
  ENST ID: ENST00000551947
  CDS Start-End: 1-251
aggtttcgtcttcccggaagcgttggaggacattccctgttgactgcgtcgcgatgtgtggcgactgtgtggagaaggaatatcccaaccggggtaatacctgcctggagaatggatctttcttactgaactttacaggctgtgcagtgtgcagtaagcgggattttatgctgatcacaaacaaatccttgaaagaagaagatggagaagaaatagttacctatgatcgacaaaatcaaagggacccttaggaggagagtgtgtcattttctaggggaaaaaagaagttttcagtgcctcagctcttgccaggctgaagagacaaagttgtgtttatcttgaaaagtctttcagtgcgtggtgccacttgtcctggagaacacaccagcctctgcccctgcactgtaccatctcctatattatatcccccacctccacctcatcccccagcccccaagtcatgaggctcagtcgttgctgggagaatggtgaagaggagtcacagaacaggtggataaacttagtggatgaactgcacctaccttcctctcagacagagatttggtccccaagacttttcagagcgggtttgtgctggtcaccttcccacagaaggaagtgtgtggaggaagttgaagctgctgtggttccagacgcaggcaggtcacccctgatgctttcaacaagaggcgtgcagtgcatcgcaggacatctgctaagggccatctcagaggcccacccctggaagccacagaaaccgaaaagacccaagcacccgccaactcaacaagttactcttttaaaaatgccttgatttcttcatcagtaaaactagcaatggggcttgacctagctttgggattttagagtgaaatttcaataacaaagcaaatgtttactagggtgttttcacaggggcacatccattgggaactgtctccttggaacaaagaataagcaagtccggggagcagctggtcttgagaatctgatttgttgagatgagatgaagtaattatcaccagggagcgccaagctgccttgcagcttttccatggctgttcaagtatacagggaccatgtgtctcagctggctgctccctaaaaacaagtttccattacctaagtggacagaaggagtgacaggaagtgtagagggaagtgtgtcccctgctgaagctgggtggagttcctagaagcaaccaataagaaagagtccccaccaagccactgagtcacaaggacttggcactgatagtgggcagaactgtaacttgccggatttatgtgcatacctagagcttccccctagtactctctgggcctccagagacacctcttattctctgctcttttgcaagccttcttcaagaaggccatgggagttcccaagatgaggagtgtgggggttccctcttccttaggtacatgccatcccttttctcctggtgtgaccttggacccttcagactcccagggttctcacctttcctaatggaatatacttggtgaggctctcct

SEQ ID NO: 119617 - DNA, 2629 bp, Homo sapiens
  Payload ID: 3451
  Gene Symbol: CHURC1
  Gene Name: churchill domain containing 1
  Uniprot ID: Q8WUH1
  ENST ID: ENST00000549115
  CDS Start-End: 55-474
agacttcggctcggttcccgagacggaatacccaggagtcgagtacttgggcgcatgcggcaaccgtatctcagttctcgcgaggtttcgtcttcccggaagcgttggaggacattccctgttgactgcgtcgcgatgtgtggcgactgtgtggagaaggaatatcccaaccggggtaatacctgcctggagaatggatctttcttactgaactttacaggctgtgcagtgtgcagtaagcgggattttatgctgatcacaaacaaatccttgaaagaagaagatggagaagaaatagttacctatgatcatttgtgtaagaattgtcatcatgtaatagccagacatgagtatacattcagtatcatggatgaatttcaggagtataccatgctgtgtctgttatgcggcaaagccgaagatactatcagtattctccctgatgacccccgacaaatgactctcttattctaaggatccttctacagatctgttataactatattgtgttggtttacaatacagcaagcctgatggtttgtcttatttcattcatactgaaaattctttgcatattttttttctgcttagacttacttattctttgaggaaaaaaggtaatgtaggagctcattgttctctagagctgagctcttctgctaaagttcaaagttcacatcagtgtagccagagtgaagcatctttgttagcagttatgtggtcagaaaacaactagaatgggagcacacctggtgcccagattttggtttccaataaaaggaaccaggactccttagaaaatgaactgattctagaactgggatatgaactgtacaagatgagcctagagtatcttgtgccacagaaaaatgaagtactgaaattaaaaaaaaaaaatcatagtgattgggagtatgtcagcatgatcgaactgaaggatctctgaaaggccacagctggagcaatttgagtaacaaaataaagtagtattgggttataacccaaactatataataaatatttacaagcccaaactaatataaatgattgaatgggaacaaatctcttgtgcagaagaatttcaaataatttatgtagatactccccacttagtgggctctgcatagtgacttccttgcagagtataatatggaaaggggggaaaagagtaactttacagtggagaaatctgacagacaccagctcagccaggtgattgaggttaacatcatccatgataagcccttttgatagcatgtatccttgatagcatcacatcatacagaatgtgataagaatggcactttacctctgtggtcctcctccccagaactcagaacccaagtctgatcaggagaaaaacatcacacaaattccaattgagaagcattctttaaaatacctaaccagtacttctcaaaactatcaaggccataaaaaacaaggaaaatctgagacatggtcacagccaagaggagcctgagaagacatgactgctagatgtaatgtggtatcctacatggaattatataccacgaaaagaaaaaaaggtcatttggtagaaactagggaaatctgaatacagtgtggacttcagttaatataaatgagaaaatggtttcattggctttaaagggattttagaatatcttactttgcatagtttcatgagcactggccaggaggttataaactggcatttaggcctctctgccatttagtagcagtatagtcattaagcaaagcattactctggactttattgtcctgtttctatcaaattggactaacaaaaattgatataatacattcatcacagtattgttaggagatttaaatgaattagtgaatgtaagatactttagaaagcatgtaaagtactagaaacaatgaggtggcttcaattagtgctcattctgagacctaaatttaaagggtcaggcattagaaacaaaagtgtttcttcatatctaggagatttggaaattctgaactaaggtcttataagaacaagaaatgagcaaagtgttcattgtagatactagggaaaagctttgttgaataacagtaatgatgataatatctgagctttattaagtacttactacatgctaagagctttttaagcacttatttaatcctcattaacaaattcataaggtaggtgctattgatagtttagccataaccagatatggcttgttatttgtaagttatcatgaaaaggtttatattcactattctttatttcagtgtagcacttttagagccaaaaaaactcaggcacaaagaagttaaataacttgccgggtgcggtggctcacccctgtaatcccagcactttgggaggccaaagcaggcggatcacctgaggtcaggagtttgagaccagccgggccaacatggtgcaacctcgtctttactaaaaatacaaaaacaaaaattagccaggggtggtggtatgcacctgcagtcccagcaacatgggaggctgaacaggagaatcgcttgaacccgcgacagggaggttgtgatgagccaaggtcatgccactgcactccagcctgggagacagagcaagactccatctcaaaaacaaaaacaaaacaaaacaacaacaaaaaaagaa

SEQ ID NO: 119618 - DNA, 326 bp, Homo sapiens
  Payload ID: 3451
  Gene Symbol: CHURC1
  Gene Name: churchill domain containing 1
  ENST ID: ENST00000547625
  CDS Start-End: 1-287
atggatctttcttactgaactttacaggctgtgcagtgtgcagtaagcgggattttatgctgatcacaaacaaatccttgaaagaagaagatggagaagaaatagttacctatgatcatttgtgtaagaattgtcatcatgtaatagccagacatgagtatacattcagtatcatggatgaatttcaggttgccatccaaatagcaatgcctggtgggttgaagcagtggaagtatttgagaacagtaaaagaccttgaagaggatgtatttttattttatttttaattcataaagccatctttccactgccacaactaagctccc

SEQ ID NO: 119619 - DNA, 2566 bp, Homo sapiens
  Payload ID: 3451
  Gene Symbol: CHURC1
  Gene Name: churchill domain containing 1
  ENST ID: ENST00000552002
  CDS Start-End: 73-411
ccgtatctcagttctcgcgaggtttcgtcttcccggaagcgttggaggacattccctgttgactgcgtcgcgatgtgtggcgactgtgtggagaaggaatatcccaaccggggtaatacctgcctggagaatggatctttcttactgaactttacaggctgtgcagtgtgcagtaagcgggattttatgctgatcacaaacaaatccttgaaagaagaagatggagaagaaatagttacctatgatcatttgtgtaagaattgtcatcatgtaatagccagacatgagtatacattcagtatcatggatgaatttcaggagtataccatgctgtgtctgttatgcggcaaagccgaagatactatcagtattctccctgatgacccccgacaaatgactctcttattctaaggatccttctacagatctgttataactatattgtgttggtttacaatacagcaagcctgatggtttgtcttatttcattcatactgaaaattctttgcatattttttttctgcttagacttacttattctttgaggaaaaaaggtaatgtaggagctcattgttctctagagctgagctcttctgctaaagttcaaagttcacatcagtgtagccagagtgaagcatctttgttagcagttatgtggtcagaaaacaactagaatgggagcacacctggtgcccagattttggtttccaataaaaggaaccaggactccttagaaaatgaactgattctagaactgggatatgaactgtacaagatgagcctagagtatcttgtgccacagaaaaatgaagtactgaaattaaaaaaaaaaaatcatagtgattgggagtatgtcagcatgatcgaactgaaggatctctgaaaggccacagctggagcaatttgagtaacaaaataaagtagtattgggttataacccaaactatataataaatatttacaagcccaaactaatataaatgattgaatgggaacaaatctcttgtgcagaagaatttcaaataatttatgtagatactccccacttagtgggctctgcatagtgacttccttgcagagtataatatggaaaggggggaaaagagtaactttacagtggagaaatctgacagacaccagctcagccaggtgattgaggttaacatcatccatgataagcccttttgatagcatgtatccttgatagcatcacatcatacagaatgtgataagaatggcactttacctctgtggtcctcctccccagaactcagaacccaagtctgatcaggagaaaaacatcacacaaattccaattgagaagcattctttaaaatacctaaccagtacttctcaaaactatcaaggccataaaaaacaaggaaaatctgagacatggtcacagccaagaggagcctgagaagacatgactgctagatgtaatgtggtatcctacatggaattatataccacgaaaagaaaaaaaggtcatttggtagaaactagggaaatctgaatacagtgtggacttcagttaatataaatgagaaaatggtttcattggctttaaagggattttagaatatcttactttgcatagtttcatgagcactggccaggaggttataaactggcatttaggcctctctgccatttagtagcagtatagtcattaagcaaagcattactctggactttattgtcctgtttctatcaaattggactaacaaaaattgatataatacattcatcacagtattgttaggagatttaaatgaattagtgaatgtaagatactttagaaagcatgtaaagtactagaaacaatgaggtggcttcaattagtgctcattctgagacctaaatttaaagggtcaggcattagaaacaaaagtgtttcttcatatctaggagatttggaaattctgaactaaggtcttataagaacaagaaatgagcaaagtgttcattgtagatactagggaaaagctttgttgaataacagtaatgatgataatatctgagctttattaagtacttactacatgctaagagctttttaagcacttatttaatcctcattaacaaattcataaggtaggtgctattgatagtttagccataaccagatatggcttgttatttgtaagttatcatgaaaaggtttatattcactattctttatttcagtgtagcacttttagagccaaaaaaactcaggcacaaagaagttaaataacttgccgggtgcggtggctcacccctgtaatcccagcactttgggaggccaaagcaggcggatcacctgaggtcaggagtttgagaccagccgggccaacatggtgcaacctcgtctttactaaaaatacaaaaacaaaaattagccaggggtggtggtatgcacctgcagtcccagcaacatgggaggctgaacaggagaatcgcttgaacccgcgacagggaggttgtgatgagccaaggtcatgccactgcactccagcctgggagacagagcaagactccatctcaaaaacaaaaacaaaacaaaacaacaacaaaaaaagaa

SEQ ID NO: 119620 - DNA, 439 bp, Homo sapiens
  Payload ID: 3451
  Gene Symbol: CHURC1
  Gene Name: churchill domain containing 1
  Uniprot ID: Q8WUH1
  ENST ID: ENST00000548752
  CDS Start-End: 1-318
atgcggcaaccgtatctcagttctcgcgaggtttcgtcttcccggaagcgttggaggacattccctgttgactgcgtcgcgatgtgtggcgactgtgtggagaaggaatatcccaaccggggtaatacctgcctggagaatggatctttcttactgaactttacaggctgtgcagtgtgcagtaagcgggattttatgctgatcacaaacaaatccttgaaagaagaagatggagaagaaatagttacctatgatcgagtataccatgctgtgtctgttatgcggcaaagccgaagatactatcagtattctccctgatgacccccgacaaatgactctcttattctaaggatccttctacagatctgttataactatattgtgttggtttacaatacagcaagcctgatggtttgtcttatttcattcatactgaaaa

SEQ ID NO: 119621 - DNA, 3615 bp, Homo sapiens
  Payload ID: 3451
  Gene Symbol: CHURC1
  Gene Name: churchill domain containing 1
  Uniprot ID: Q8WUH1
  ENST ID: ENST00000607599
  CDS Start-End: 55-477
agacttcggctcggttcccgagacggaatacccaggagtcgagtacttgggcgcatgcggcaaccgtatctcagttctcgcgaggtttcgtcttcccggaagcgttggaggacattccctgttgactgcgtcgcgatgtgtggcgactgtgtggagaaggaatatcccaaccggggtaatacctgcctggagaatggatctttcttactgaactttacaggctgtgcagtgtgcagtaagcgggattttatgctgatcacaaacaaatccttgaaagaagaagatggagaagaaatagttacctatgatccagatttgtgtaagaattgtcatcatgtaatagccagacatgagtatacattcagtatcatggatgaatttcaggagtataccatgctgtgtctgttatgcggcaaagccgaagatactatcagtattctccctgatgacccccgacaaatgactctcttattctaaggatccttctacagatctgttataactatattgtgttggtttacaatacagcaagcctgatggtttgtcttatttcattcatactgaaaattctttgcatattttttttctgcttagacttacttattctttgaggaaaaaaggtaatgtaggagctcattgttctctagagctgagctcttctgctaaagttcaaagttcacatcagtgtagccagagtgaagcatctttgttagcagttatgtggtcagaaaacaactagaatgggagcacacctggtgcccagattttggtttccaataaaaggaaccaggactccttagaaaatgaactgattctagaactgggatatgaactgtacaagatgagcctagagtatcttgtgccacagaaaaatgaagtactgaaattaaaaaaaaaaaatcatagtgattgggagtatgtcagcatgatcgaactgaaggatctctgaaaggccacagctggagcaatttgagtaacaaaataaagtagtattgggttataacccaaactatataataaatatttacaagcccaaactaatataaatgattgaatgggaacaaatctcttgtgcagaagaatttcaaataatttatgtagatactccccacttagtgggctctgcatagtgacttccttgcagagtataatatggaaaggggggaaaagagtaactttacagtggagaaatctgacagacaccagctcagccaggtgattgaggttaacatcatccatgataagcccttttgatagcatgtatccttgatagcatcacatcatacagaatgtgataagaatggcactttacctctgtggtcctcctccccagaactcagaacccaagtctgatcaggagaaaaacatcacacaaattccaattgagaagcattctttaaaatacctaaccagtacttctcaaaactatcaaggccataaaaaacaaggaaaatctgagacatggtcacagccaagaggagcctgagaagacatgactgctagatgtaatgtggtatcctacatggaattatataccacgaaaagaaaaaaaggtcatttggtagaaactagggaaatctgaatacagtgtggacttcagttaatataaatgagaaaatggtttcattggctttaaagggattttagaatatcttactttgcatagtttcatgagcactggccaggaggttataaactggcatttaggcctctctgccatttagtagcagtatagtcattaagcaaagcattactctggactttattgtcctgtttctatcaaattggactaacaaaaattgatataatacattcatcacagtattgttaggagatttaaatgaattagtgaatgtaagatactttagaaagcatgtaaagtactagaaacaatgaggtggcttcaattagtgctcattctgagacctaaatttaaagggtcaggcattagaaacaaaagtgtttcttcatatctaggagatttggaaattctgaactaaggtcttataagaacaagaaatgagcaaagtgttcattgtagatactagggaaaagctttgttgaataacagtaatgatgataatatctgagctttattaagtacttactacatgctaagagctttttaagcacttatttaatcctcattaacaaattcataaggtaggtgctattgatagtttagccataaccagatatggcttgttatttgtaagttatcatgaaaaggtttatattcactattctttatttcagtgtagcacttttagagccaaaaaaactcaggcacaaagaagttaaataacttgccgggtgcggtggctcacccctgtaatcccagcactttgggaggccaaagcaggcggatcacctgaggtcaggagtttgagaccagccgggccaacatggtgcaacctcgtctttactaaaaatacaaaaacaaaaattagccaggggtggtggtatgcacctgcagtcccagcaacatgggaggctgaacaggagaatcgcttgaacccgcgacagggaggttgtgatgagccaaggtcatgccactgcactccagcctgggagacagagcaagactccatctcaaaaacaaaaacaaaacaaaacaacaacaaaaaaagaagttaaataacttgtttaagatcacacagctagtgcagttaccccctctcagtaattatgtttggcaaatatgaaatacaaggatctggcaaggttaggaagaggttaagaatatcagtgacagtactctgaggcatctgggcatgtcagatgaagatttattattcagaaaagttaagtcagctgttgcagggatcagttgttttattcctggaaaatgtttttcattttgctgcaaatctatatctgacctgctgaggaaatcgtttggtgaaatgaatccagaaagcagagaaaatgcttcattactttaaatagcagcattaagcccattatagcctctgaattgtcccttccttgagtttgctaatgcttccaacttagtcatttgaagcccaagagtctaattttatatgccctgccaatgtcctcatctattgcagaatgtataattatctatttgttttggactatatgttacaaaaatttaaaacataagatcctctctctatatttcattattggtgaacccacattgtgctgtgttttgtgatattttatcattttctagattcttatgtggatctaataacgaccacttgaacccagtttcacagaatccttatttttctgttcaaattaggaattagggacatggatgaaattggaaatcttcattctcagtaaactatcgcaaggacaaaaaaccaaacaccacatgttctcactcatagataggaattgaacaatgagaacacatggagacaggaaggggaacatcacactctagggactgttgtggggtgaggggaggggtgagggatagcattaggagatatacctgatgctaaatgacgagttagtgggtgcagcacaccagcatggcacatgtatacgtatgtaactaacctgcacatcgtgcacatgtaccctaaaacttaaagtataataataataaaataaaaaaaaaggaattaggcaaaa

SEQ ID NO: 119622 - DNA, 633 bp, Homo sapiens
  Payload ID: 3452
  Gene Symbol: CMA1
  Gene Name: chymase 1, mast cell
  Uniprot ID: P23946
  ENST ID: ENST00000206446
  CDS Start-End: 213-623
agcatttgctcaggcagcctctctgggaagatgctgcttcttcctctccccctgctgctctttctcttgtgctccagagctgaagctggtctataacagtcacccttggagcccataacataacagaggaagaagacacatggcagaagcttgaggttataaagcaattccgtcatccaaaatataacacttctactcttcaccacgatatcatgttactaaagttgaaggagaaagccagcctgaccctggctgtggggacactccccttcccatcccaattcaactttgtcccacctgggagaatgtgccgggtggctggctggggaagaacaggtgtgttgaagccgggctcagacactctgcaagaggtgaagctgagactcatggatccccaggcctgcagccacttcagagactttgaccacaatcttcagctgtgtgtgggcaatcccaggaagacaaaatctgcatttaagggagactctgggggccctcttctgtgtgctggggtggcccagggcatcgtatcctatggacggtcggatgcaaagccccctgctgtcttcacccgaatctcccattaccggccctggatcaaccagatcctgcaggcaaattaatcctggatcc

SEQ ID NO: 119623 - DNA, 937 bp, Homo sapiens
  Payload ID: 3452
  Gene Symbol: CMA1
  Gene Name: chymase 1, mast cell
  Uniprot ID: P23946
  ENST ID: ENST00000250378
  CDS Start-End: 31-774
agcatttgctcaggcagcctctctgggaagatgctgcttcttcctctccccctgctgctctttctcttgtgctccagagctgaagctggggagatcatcgggggcacagaatgcaagccacattcccgcccctacatggcctacctggaaattgtaacttccaacggtccctcaaaattttgtggtggtttccttataagacggaactttgtgctgacggctgctcattgtgcaggaaggtctataacagtcacccttggagcccataacataacagaggaagaagacacatggcagaagcttgaggttataaagcaattccgtcatccaaaatataacacttctactcttcaccacgatatcatgttactaaagttgaaggagaaagccagcctgaccctggctgtggggacactccccttcccatcccaattcaactttgtcccacctgggagaatgtgccgggtggctggctggggaagaacaggtgtgttgaagccgggctcagacactctgcaagaggtgaagctgagactcatggatccccaggcctgcagccacttcagagactttgaccacaatcttcagctgtgtgtgggcaatcccaggaagacaaaatctgcatttaagggagactctgggggccctcttctgtgtgctggggtggcccagggcatcgtatcctatggacggtcggatgcaaagccccctgctgtcttcacccgaatctcccattaccggccctggatcaaccagatcctgcaggcaaattaatcctggatcctgagccagcctgaaagggaagctggaactggacctgagcagcaaagtgtgtgccactcattctggtctacccttggtccctcagccacaaccctaagcctccagaagtatcctacaggtcacagaactctcaataaacctcagtgaagacaca

SEQ ID NO: 119624 - DNA, 3147 bp, Homo sapiens
  Payload ID: 3453
  Gene Symbol: CTRC
  Gene Name: chymotrypsin C (caldecrin)
  ENST ID: ENST00000375943
  CDS Start-End: 24-233
cagccagtcctgagcacctaaccatgttgggcatcactgtcctcgctgcgctcttggcctgtgcaacacccggacctaccgtgtggccgtgggaaagaacaacctggaggtggaagacgaagaaggatccctgtttgtgggtgtggacaccatccacgtccacaagagatggaatgccctcctgttgcgcaatgatattgccctcatcaagcttgcagagcatgtggagctgagtgacaccatccaggtggcctgcctgccagagaaggactccctgctccccaaggactacccctgctatgtcaccggctggggccgcctctggaggggactccggtggcccactgaactgccagttggagaacggttcctgggaggtgtttggcatcgtcagctttggctcccggcggggctgcaacacccgcaagaagccggtagtctacacccgggtgtccgcctacatcgactggatcaacgagaaaatgcagctgtgatttgttgctgggagcggcggcagcgagtccctgcaacagcaataaacttccttctcctcgggccacctggatccttgatttgtgcagcttctgttgcttccctcctctctggtgctgcccctttccacactatggagccaaagagagaccccactcagccagtttcccccaccctgcattagacaggtggggaaacagaggccgggagagagggccaaggaaggagcctcctggggcattaatgggaggcagggggctggggtggagagcccagggagtcctgcgtgaagccggaggggatgggagtgaaggacgcatcagacaccttccccgctccatctcacaagctgcgaacaggtgagaccctgatgaaatcactcgcttctccgatcctacctccaccgaggggcctggcaggtcctcacagccccccagcagcaggtggaagacagggtctccccaaaagcagcgtcccccaggccagagagaccaggccacaggaggatggccaaagctcagggacaaccactcctggggaaggggctccctagcagggaccccccacccccaccccgcagcacagaccccatggctgctgttggcaggggctctctgctttgagaagtgtttagtgagccagcccctgtgtccagtcctgtgctgggcatgatgagggtacaggaagaggaagagaccccagcatcatcctcaggagacatacgtttgaagaaggcaatggtttccacacagaatcacagtggtcagagctggatatgctttcattgcattagacaagtggggaaactgaggcccagagagaggaaggagttgggatagctggcaatgcctgatccaggagaagagagttctcctgaggctgacaagaggccaagaggagccagagatgagatagacccagtgtccagggagggacatgccagtgggatcagaccctgatgacaggggcagccagagatgagagagatccaatgtccagggagggacatgccagggggatcagaccctgatgataggggcctctggcctggcctgctcctgggaatgtcctgttctgtgggggtgcccccagcccagcctctggacccctcgctggagagccctcggctgcagctacctcagactggcccaagagttgtcccttttctccaccagactttgtcccctgggagtggggaccatggtgtgactcccacacccccatgatgccaaggcaagtctcaggaaagacttgacttactcaacaagcagtgggagctacagggagcccagcaccacccagacccgggaatccaggatgggggtaccccagctgtgcaggagacagaccagtaaatagatcattaaattccctggtatacatttgaaaacagaaatacagaccagaagcatagaaacaggacacctgaagcagtgtcagttggcgggaggaatccaggatggcttcctggaggtgatgatgcccaagcttggtcttaaaatttgactagaaggtacccaagtacagaacgtagtccttcttaagtttgcttaatctaaacttcattcccacctatcctcttcttttttttttttttttttttgagacggagtcttgctctgatgcccaggctggagtgcagtggcacaatctcagctcactgcaacctccacctcccaggttcaagtgattcttctgcctcagcctcccaagtagctgggattacaggcacgcaccaccatgcacagctaattttttttttttttttttagacagagtctcgctctctcacctgggctgtagtgcagtggtgccatctcggctcactgcaagctccgcctcccaggttcacgccattctcctgcctcagcctcctgagtagctgggactacaggcgccagccaccatgcctggctaattttttttttttttgtatttttagcagagacggggtttcaccgtgttagccaggatggtctcgatctcctgatctcgtgatccacctgcctcggcctcccaaagtgctggcattacaggcgtgagccaccgtgcccggccccagctaatttttttgtatttttttagtagagatggggtttcaccatgtcgtccaggctggtctcaaactcctgacctcaggtgatctgcccgccttggcctcccaaagtactgggatcacaggtgtgagccaccacacccggtctcattcccagctatcttcttttgtgtatgtctttatattgggggttataaatgctaaatgcttgctgtcctcagatcccttgtagttagggagctaattaaaatgttaattaatattacaatgttatttaagcaatgttaaataatatctaacatttattgggcacttagtatgtgccaagcactatcctataggttttacattatctcaatccccagaaacaatcccatgaggtaggttactattaacatcatgcccattttacagatgagaaaactgaggccagacagggttagtgacttcccaatgtgtgaactagaaggtagtggagccggaatccagactttagtgatctgactccagggcctgtgctcttgtccaccatgctctgctgccctgcaatgtaaaacatcctccagaaaaaaaataaataaataaaaacttccctgatg

SEQ ID NO: 119625 - DNA, 898 bp, Homo sapiens
  Payload ID: 3453
  Gene Symbol: CTRC
  Gene Name: chymotrypsin C (caldecrin)
  Uniprot ID: Q99895
  ENST ID: ENST00000375949
  CDS Start-End: 27-833
ggtcagccagtcctgagcacctaaccatgttgggcatcactgtcctcgctgcgctcttggcctgtgcctccagctgtggggtgcccagcttcccgcccaacctatccgcccgagtggtgggaggagaggatgcccggccccacagctggccctggcagatctccctccagtacctcaagaacgacacgtggaggcatacgtgtggcgggactttgattgctagcaacttcgtcctcactgccgcccactgcatcagcaacacccggacctaccgtgtggccgtgggaaagaacaacctggaggtggaagacgaagaaggatccctgtttgtgggtgtggacaccatccacgtccacaagagatggaatgccctcctgttgcgcaatgatattgccctcatcaagcttgcagagcatgtggagctgagtgacaccatccaggtggcctgcctgccagagaaggactccctgctccccaaggactacccctgctatgtcaccggctggggccgcctctggaccaacggccccattgctgataagctgcagcagggcctgcagcccgtggtggatcacgccacgtgctccaggattgactggtggggcttcagggtgaagaaaaccatggtgtgcgctgggggcgatggcgtcatctcagcctgcaatggggactccggtggcccactgaactgccagttggagaacggttcctgggaggtgtttggcatcgtcagctttggctcccggcggggctgcaacacccgcaagaagccggtagtctacacccgggtgtccgcctacatcgactggatcaacgagaaaatgcagctgtgatttgttgctgggagcggcggcagcgagtccctgcaacagcaataaacttccttctcctcgggcca

SEQ ID NO: 119626 - DNA, 1721 bp, Homo sapiens
  Payload ID: 3454
  Gene Symbol: CTRL
  Gene Name: chymotrypsin-like
  Uniprot ID: P40313
  ENST ID: ENST00000574481
  CDS Start-End: 563-1357
cacgtgctggtgggagagtcaccatctctgagcagacctgtgactcctgttccaaatggacgaggaaccactgcgatgatgtgttaggactcccagcctgccagaacctcacagcccctggcccttcacagcaaagttgaccgcagtgagcattccatccaccagtcagaacaccctggacgctgagcggccttctctgaaagcctggtgcctttgttagccctgggtgactcctgtgatcccagccaccaggttgtcactatagacctaatttaaccatctgtcctcagtaccgagggctcaacatttggaatgggaggtggttctgggagccaattagaggccaggctttgggaggtggcagaggtgagtctcacacctgggctctgtctgataagtctaggtctcggtcaggggaccttggcctaaagggcctgtcttgcctggagcgtgggagggggctgagtctacacagctggcctggcctcaggcctggagctttagctcaaggacgagaagacccataaagccagacccagctcccaacctcacatctgccacgatgttgctgctcagcctgaccctaagcctggttctcctcggctcctcctggggctgcggcattcctgccatcaaaccggcactgagcttcagccagaggattgtcaacggggagaatgcagtgttgggctcctggccctggcaggtgtccctgcaggacagcagcggcttccacttctgcggtggttctctcatcagccagtcctgggtggtcactgctgcccactgcaatgtcagccctggccgccattttgttgtcctgggcgagtatgaccgatcatcaaacgcagagcccttgcaggttctgtccgtctctcgggccattacacaccctagctggaactctaccaccatgaacaatgacgtgacgctgctgaagctcgcctcgccagcccagtacacaacacgcatctcgccagtttgcctggcatcctcaaacgaggctctgactgaaggcctcacgtgtgtcaccaccggctggggtcgcctcagtggcgtgggcaatgtgacaccagcacatctgcagcaggtggctttgcccctggtcactgtgaatcagtgccggcagtactggggctcaagtatcactgactccatgatctgtgcaggtggcgcaggtgcctcctcgtgccagggtgactccggaggccctcttgtctgccagaagggaaacacatgggtgcttattggtattgtctcctggggcaccaaaaactgcaatgtgcgcgcacctgctgtgtatactcgagttagcaagttcagcacctggatcaaccaggtcatagcctacaactgagctcaccacaggccctccccagctcaacccattaaagacccaggccctgtcccatcatgcattcatgtctgtcttcctggctcaggagaaagaagaggctgttgagggtccgactccctacttggacttctggcacagaaggggctgagtgactccttgagtagcagtggctcttcctagagtagccatgccgaggccggggcccccacccctcctccagggcaaccccttggtcctacagcaagaagccagaactgttggaatgaatggcagccctccctggagaggcagcctgtttactgaatacagaggatacgtttacaaactgaatacgcataataaataactgcacattctccatcca

SEQ ID NO: 119627 - DNA, 580 bp, Homo sapiens
  Payload ID: 3454
  Gene Symbol: CTRL
  Gene Name: chymotrypsin-like
  ENST ID: ENST00000571605
  CDS Start-End: 11-580
atctgccacgatgttgctgctcagcctgaccctaagcctggttctcctcggctcctcctggggacagcagcggcttccacttctgcggtggttctctcatcagccagtcctgggtggtcactgctgcccactgcaatgtcaggttctgtccgtctctcgggtgagtgcctgggctgcagacacggaggaaaagtgggcagtgcaggccattacacaccctagctggaactctaccaccatgaacaatgacgtgacgctgctgaagctcgcctcgccagcccagtacacaacacgcatctcgccagtttgcctggcatcctcaaacgaggctctgactgaaggcctcacgtgtgtcaccaccggctggggtcgcctcagtggcgtgggcaatgtgacaccagcacatctgcagcaggtggctttgcccctggtcactgtgaatcagtgccggcagtactggggctcaagtatcactgactccatgatctgtgcaggtggcgcaggtgcctcctcgtgccagggtgactccggaggccctcttgtctgccagaagggaaacacatgggtgcttattggtatt

SEQ ID NO: 119628 - DNA, 582 bp, Homo sapiens
  Payload ID: 3454
  Gene Symbol: CTRL
  Gene Name: chymotrypsin-like
  ENST ID: ENST00000571044
  CDS Start-End: 11-582
atctgccacgatgttgctgctcagcctgaccctaagcctggttctcctcggctcctcctggggctgcggcattcctgccatcaaaccggcactgagcttcagccagaggattgtcaacggggagaatgcagtgttgggctcctggccctggcaggtgtccctgcaggacagcagcggcttccacttctgcggtggttctctcatcagccagtcctgggtggtcactgctgcccactgcaatgtcagccctggccgccattttgttgtcctgggcgagtatgaccgatcatcaaacgcagagcccttgcaggttctgtccgtctctcgggccattacacaccctagctggaactctaccaccatgaacaatgacgtgacgctgctgaagctcgcctcgccagcccagtacacaacacgcatctcgccagtttgcctggcatcctcaaacgaggccctcttgtctgccagaagggaaacacatgggtgcttattggtattgtctcctggggcaccaaaaactgcaatgtgcgcgcacctgctgtgtatactcgagttagcaagttcagcacctggatcaaccag

SEQ ID NO: 119629 - DNA, 952 bp, Homo sapiens
  Payload ID: 3455
  Gene Symbol: CELA1
  Gene Name: chymotrypsin-like elastase family, member 1
  Uniprot ID: Q9UNI1
  ENST ID: ENST00000293636
  CDS Start-End: 42-818
ttggtccaagcaagaaggcagtggtctactccatcggcaacatgctggtcctttatggacacagcacccaggaccttccggaaaccaatgcccgcgtagtcggagggactgaggccgggaggaattcctggccctctcagatttccctccagtaccggtctggaggttcccggtatcacacctgtggagggacccttatcagacagaactgggtgatgacagctgctcactgcgtggattaccagaagactttccgcgtggtggctggagaccataacctgagccagaatgatggcactgagcagtacgtgagtgtgcagaagatcgtggtgcatccatactggaacagcgataacgtggctgccggctatgacatcgccctgctgcgcctggcccagagcgttaccctcaatagctatgtccagctgggtgttctgccccaggagggagccatcctggctaacaacagtccctgctacatcacaggctggggcaagaccaagaccaatgggcagctggcccagaccctgcagcaggcttacctgccctctgtggactacgccatctgctccagctcctcctactggggctccactgtgaagaacaccatggtgtgtgctggtggagatggagttcgctctggatgccagggtgactctgggggccccctccattgcttggtgaatggcaagtattctgtccatggagtgaccagctttgtgtccagccggggctgtaatgtctccaggaagcctacagtcttcacccaggtctctgcttacatctcctggataaataatgtcatcgcctccaactgaacattttcctgagtccaacgaccttcccaaaatggttcttagatctgcagtaggacttgcgatcaaaaagtaaaacacattctgaaagactattgagccattgatagaaaagcaaataaaactagatatacatt

SEQ ID NO: 119630 - DNA, 919 bp, Homo sapiens
  Payload ID: 3456
  Gene Symbol: CELA2A
  Gene Name: chymotrypsin-like elastase family, member 2A
  Uniprot ID: P08217
  ENST ID: ENST00000359621
  CDS Start-End: 26-835
cttacagaactcccacggacacaccatgataaggacgctgctgctgtccactttggtggctggagccctcagttgtggggaccccacttacccaccttatgtgactagggtggttggcggtgaagaagcgaggcccaacagctggccctggcaggtctccctgcagtacagctccaatggcaagtggtaccacacctgcggagggtccctgatagccaacagctgggtcctgacggctgcccactgcatcagctcctccaggacctaccgcgtggggctgggccggcacaacctctacgttgcggagtccggctcgctggcagtcagtgtctctaagattgtggtgcacaaggactggaactccaaccaaatctccaaagggaacgacattgccctgctcaaactggctaaccccgtctccctcaccgacaagatccagctggcctgcctccctcctgccggcaccattctacccaacaactacccctgctacgtcacgggctggggaaggctgcagaccaacggggctgttcctgatgtcctgcagcagggccggttgctggttgtggactatgccacctgctccagctctgcctggtggggcagcagcgtgaaaaccagtatgatctgtgctgggggtgatggcgtgatctccagctgcaacggagactctggcgggccactgaactgtcaggcgtctgacggccggtggcaggtgcacggcatcgtcagcttcgggtctcgcctcggctgcaactactaccacaagccctccgtcttcacgcgggtctccaattacatcgactggatcaattcggtgattgcaaataactaaccaaaagaagtccctgggactgtttcagacttggaaaggtcacagaaggaaaataatataataaagtgacaactatgcaaatca

SEQ ID NO: 119631 - DNA, 923 bp, Homo sapiens
  Payload ID: 3457
  Gene Symbol: CELA2B
  Gene Name: chymotrypsin-like elastase family, member 2B
  Uniprot ID: P08218
  ENST ID: ENST00000375910
  CDS Start-End: 26-835
cttacagaactcccacggacacaccatgattaggaccctgctgctgtccactttggtggctggagccctcagttgtggggtctccacttacgcgcctgatatgtctaggatgcttggaggtgaagaagcgaggcccaacagctggccctggcaggtctccctgcagtacagctccaatggccagtggtaccacacctgcggagggtccctgatagccaacagctgggtcctgacggctgcccactgcatcagctcctccgggatctaccgcgtgatgctgggccagcataacctctacgttgcagagtccggctcgctggccgtcagtgtctctaagattgtggtgcacaaggactggaactccgaccaggtctccaaagggaacgacattgccctgctcaaactggctaaccccgtctccctcaccgacaagatccagctggcctgcctccctcctgccggcaccattctacccaacaactacccctgctacgtcacgggctggggaaggctgcagaccaacggggctctccctgatgacctgaagcagggccagttgctggttgtggactatgccacctgctccagctctggctggtggggcagcaccgtgaagacgaatatgatctgtgctgggggtgatggcgtgatatgcacctgcaacggagactccggtgggccgctgaactgtcaggcatctgacggccggtgggaggtgcatggcatcggcagcctcacgtcggtccttggttgcaactactactacaagccctccatcttcacgcgggtctccaactacaacgactggatcaattcggtgattgcaaataactaaccaaaagaagtccctgggactgtttcagacttggaaaggtcacagaaggaaaataatattatataaagtgacaactatgcaaatcaca

SEQ ID NO: 119632 - DNA, 377 bp, Homo sapiens
  Payload ID: 3457
  Gene Symbol: CELA2B
  Gene Name: chymotrypsin-like elastase family, member 2B
  ENST ID: ENST00000422901
  CDS Start-End: 1-377
tgtggggtctccacttacgcgcctgatatgtctaggatgcttggaggtgaagaagcgaggcccaacagctggccctggcaggtctccctgcagtacagctccaatggccagtggtaccacacctgcggagggtccctgatagccaacagctgggtcctgacggctgcccactgcatcagacaaattataaaggcccacaaggttctgcaacgttgttcacttatcctcttctttgtccgtgacctctgctcatcacagctggaactcaccggagtttctgccggctcctccgggatctaccgcgtgatgctgggccagcataacctctacgttgcagagtccggctcgctggccgtcagtgtctctaagattgtggt

SEQ ID NO: 119633 - DNA, 887 bp, Homo sapiens
  Payload ID: 3458
  Gene Symbol: CELA3A
  Gene Name: chymotrypsin-like elastase family, member 3A
  Uniprot ID: P09093
  ENST ID: ENST00000290122
  CDS Start-End: 20-832
tcctatcatcacaaaactcatgatgctccggctgctcagttccctcctccttgtggccgttgcctcaggctatggcccaccttcctctcactcttccagccgcgttgtccatggtgaggatgcggtcccctacagctggccctggcaggtttccctgcagtatgagaaaagtggaagcttctaccacacgtgtggcggtagcctcatcgcccccgattgggttgtgactgccggccactgcatctcgagggatctgacctaccaggtggtgttgggtgagtacaaccttgctgtgaaggagggccccgagcaggtgatccccatcaactctgaggagctgtttgtgcatccactctggaaccgctcgtgtgtggcctgtggcaatgacatcgccctcatcaagctctcacgcagcgcccagctgggagatgccgtccagctcgcctcactccctcccgctggtgacatccttcccaacaagacaccctgctacatcaccggctggggccgtctctataccaatgggccactcccagacaagctgcagcaggcccggctgcccgtggtggactataagcactgctccaggtggaactggtggggttccaccgtgaagaaaaccatggtgtgtgctggagggtacatccgctccggctgcaacggtgactctggaggacccctcaactgccccacagaggatggtggctggcaggtccacggtgtgaccagctttgtttctgcctttggctgcaacttcatctggaagcccacggtgttcactcgagtctccgccttcatcgactggattgaggagaccatagcaagccactagaaccaaggcccagctggcagtgctgatcgatcccacatcctgaataaagaataaa

SEQ ID NO: 119634 - DNA, 649 bp, Homo sapiens
  Payload ID: 3458
  Gene Symbol: CELA3A
  Gene Name: chymotrypsin-like elastase family, member 3A
  ENST ID: ENST00000374663
  CDS Start-End: 16-381
atcatcacaaaactcatgatgctccggctgctcagttccctcctccttgtggccgttgcctcaggctatggcccaccttcctctcactcttccagccgcgttgtccatggtgaggatgcggtcccctacagctggccctggcaggtttccctgcagtatgagaaaagtggaagcttctaccacacgtgtggcggtagcctcatcgcccccgattgggttgtgactgccggccactgcatctcgagggatctgacctaccaggtggtgttgggtgagtacaaccttgctgtgaaggagggccccgagcaggtgatccccatcaactctgaggagctgtttgtgcatccactctggaaccgctcgtgtgtggcctgtgggtgagtgaatgctccggtctggaacccaggggctcctctacttgtccctccatgacccacagccaagtctgagtaggctccaactctgagtagggacgtagggacatagggacatagggacaggggagctgagtccagcagcctgtgcccaggtcccacacactgaggattgaagccagcagagcctttaaggaccatcaccaccaaacctgtctccctacagaggggatggcagtgttcagggaggggcaggaactctgccaaggccactt

SEQ ID NO: 119635 - DNA, 357 bp, Homo sapiens
  Payload ID: 3458
  Gene Symbol: CELA3A
  Gene Name: chymotrypsin-like elastase family, member 3A
  ENST ID: ENST00000400271
  CDS Start-End: 1-228
tggtggggttccaccgtgaagaaaaccatggtgtgtgctggagggtacatccgctccggctgcaacggtgactctggaggacccctcaactgccccacagaggatggtggctggcaggtccacggtgtgaccagctttgtttctgcctttggctgcaacttcatctggaagcccacggtgttcactcgagtctccgccttcatcgactggattgaggagggaggatagagagacatgccagacaagaggctgcctggtgggggacagaccatagcaagccactagaaccaaggcccagctggcagtgctgatcgatcccacatcctgaataaagaataaagatctctcagaaaattc

SEQ ID NO: 119636 - DNA, 897 bp, Homo sapiens
  Payload ID: 3459
  Gene Symbol: CELA3B
  Gene Name: chymotrypsin-like elastase family, member 3B
  Uniprot ID: P08861
  ENST ID: ENST00000337107
  CDS Start-End: 20-832
tcctatcatcgcaaaactcatgatgctccggctgctcagttccctcctccttgtggccgttgcctcaggctatggcccaccttcctctcgcccttccagccgcgttgtcaatggtgaggatgcggtcccctacagctggccctggcaggtttccctgcagtatgagaaaagcggaagcttctaccacacctgtggcggtagcctcatcgcccccgactgggttgtgactgccggccactgcatctcgagctcccggacctaccaggtggtgttgggcgagtacgaccgtgctgtgaaggagggccccgagcaggtgatccccatcaactctggggacctctttgtgcatccactctggaaccgctcgtgtgtggcctgtggcaatgacatcgccctcatcaagctctcacgcagcgcccagctgggagacgccgtccagctcgcctcactccctccggctggtgacatccttcccaacgagacaccctgctacatcaccggctggggccgtctctataccaacgggccactcccagacaagctgcaggaggccctgctgccggtggtggactatgaacactgctccaggtggaactggtggggttcctccgtgaagaagaccatggtgtgtgctggaggggacatccgctccggctgcaatggtgactctggaggacccctcaactgccccacagaggatggtggctggcaggtccatggcgtgaccagctttgtttctgcctttggctgcaacacccgcaggaagcccacggtgttcactcgagtctccgccttcattgactggattgaggagaccatagcaagccactagaaccaaggcccagctggcagtgctgatcgatcccacatcctgaataaagaataaagatctctcag

SEQ ID NO: 119637 - DNA, 497 bp, Homo sapiens
  Payload ID: 3459
  Gene Symbol: CELA3B
  Gene Name: chymotrypsin-like elastase family, member 3B
  ENST ID: ENST00000374666
  CDS Start-End: 4-497
gagatgaggtcttgctatgttgcccaggctggtctcaaactcccgggctcaagcgatcctcccgcctcggcctctcaaagcactaggattacagcctcaggctatggcccaccttcctctcgcccttccagccgcgttgtcaatggtgaggatgcggtcccctacagctggccctggcaggtttccctgcagtatgagaaaagcggaagcttctaccacacctgtggcggtagcctcatcgcccccgactgggttgtgactgccggccactgcatctcgagctcccggacctaccaggtggtgttgggcgagtacgaccgtgctgtgaaggagggccccgagcaggtgatccccatcaactctggggacctctttgtgcatccactctggaaccgctcgtgtgtggcctgtggcaatgacatcgccctcatcaagctctcacgcagcgcccagctgggagacgccgtccagctcgcctcactccctccggctggtga

SEQ ID NO: 119638 - DNA, 996 bp, Homo sapiens
  Payload ID: 3459
  Gene Symbol: CELA3B
  Gene Name: chymotrypsin-like elastase family, member 3B
  ENST ID: ENST00000400277
  CDS Start-End: 1-543
caggtgatccccatcaactctggggacctctttgtgcatccactctggaaccgctcgtgtgtggcctgtggcaatgacatcgccctcatcaagctctcacgcagcgcccagctgggagacgccgtccagctcgcctcactccctccggctggtgacatccttcccaacgagacaccctgctacatcaccggctggggccgtctctataccaacgggccactcccagacaagctgcaggaggccctgctgccggtggtggactatgaacactgctccaggtggaactggtggggttcctccgtgaagaagaccatggtgtgtgctggaggggacatccgctccggctgcaatggtgactctggaggacccctcaactgccccacagaggatggtggctggcaggtccatggcgtgaccagctttgtttctgcctttggctgcaacacccgcaggaagcccacggtgttcactcgagtctccgccttcattgactggattgaggagaaactacagggcaacaaggcaccagagtcccggacttaggaccactgtgtgtgattcaccgtgaacactggcatattaaaggctctgagaagtcctgtaggaaaggacaatttgaactttgtttgagctcatattttccaatcccatctgacctttagttcttcactgagtgcccactgggttatattctgggagccgaggccacagcagtgaacaaagcacacaaaaccccccgccccatgggggctccgttctagtgggtccatttatcatcaaacatctattaatatctctagaatgtgcccatcaggacaccatccagatgctgctgcgcttttccaggccacacagaggggacaccctccaggtgcatcctgcatgaatatcaggctcaaccgtgctttcagggtaggaagcggagggcatttgaagagtcctttcccttccttcattcatttgttgtctccttgaataaatgctgttgaaaaccta

SEQ ID NO: 119639 - DNA, 858 bp, Homo sapiens
  Payload ID: 3460
  Gene Symbol: CTRB1
  Gene Name: chymotrypsinogen B1
  Uniprot ID: P17538
  ENST ID: ENST00000361017
  CDS Start-End: 9-800
gcagcggcatggcttccctctggctcctctcctgcttctcccttgtgggggccgcctttggctgcggggtccccgccatccaccctgtgctcagcggcctgtccaggatcgtgaatggggaggacgccgtccccggctcctggccctggcaggtgtccctgcaggacaaaaccggcttccacttctgcgggggctccctcatcagcgaggactgggtggtcaccgctgcccactgcggggtcaggacctccgacgtggtcgtggctggggagtttgaccagggctctgacgaggagaacatccaggtcctgaagatcgccaaggtcttcaagaaccccaagttcagcattctgaccgtgaacaatgacatcaccctgctgaagctggccacacctgcccgcttctcccagacagtgtccgccgtgtgcctgcccagcgccgacgacgacttccccgcggggacactgtgtgccaccacaggctggggcaagaccaagtacaacgccaacaagacccctgacaagctgcagcaggcagccctgcccctcctgtccaatgccgaatgcaagaagtcctggggcaggaggatcaccgacgtgatgatctgtgccggggccagtggcgtctcctcctgcatgggcgactctggcggccccctggtctgccaaaaggatggagcctggaccctggtgggcattgtgtcctggggcagcgacacctgctccacctccagccctggcgtgtacgcccgtgtcaccaagctcataccttgggtgcagaagatcctggctgccaactgagcccgcggctccctccgaccctgctccccacagagcctcagtaaacccatggaacaca

SEQ ID NO: 119640 - DNA, 581 bp, Homo sapiens
  Payload ID: 3460
  Gene Symbol: CTRB1
  Gene Name: chymotrypsinogen B1
  ENST ID: ENST00000495583
  CDS Start-End: 35-581
ctagagacttggggaccagggaggcggaggcggcatgtgccagggaggtcctgagctggcttcagtggactggggtagaaccgggagagctgcacgcaggcaggtgaggcccaggtgggtttggggcctcagcccttattcaccccactcccccccaggctgcggggtccccgccatccaccctgtgctcagcggcctgtccaggatcgtgaatggggaggacgccgtccccggctcctggccctggcaggtgtccctgcaggacaaaaccggcttccacttctgcgggggctccctcatcagcgaggactgggtggtcaccgctgcccactgcggggtcaggacctccgacgtggtcgtggctggggagtttgaccagggctctgacgaggagaacatccaggtcctgaagatcgccaaggtcttcaagaaccccaagttcagcattctgaccgtgaacaatgacatcaccctgctgaagctggccacacctgcccgcttctcccagacagtgtccgccgtgtgcctgcccagcgccgacgacgacttccccgcggggacactgtgtgccaccacaggct

SEQ ID NO: 119641 - DNA, 901 bp, Homo sapiens
  Payload ID: 3461
  Gene Symbol: CTRB2
  Gene Name: chymotrypsinogen B2
  Uniprot ID: Q6GPI1
  ENST ID: ENST00000303037
  CDS Start-End: 45-836
cggggaccggcagacaggcgtcctacacccctgccagcggcaccatggctttcctctggctcctctcctgctgggccctcctgggtaccaccttcggctgcggggtccccgccatccaccctgtgctcagcggcctgtccaggatcgtgaatggggaggacgccgtccccggctcctggccctggcaggtgtccctgcaggacaaaaccggcttccacttctgcgggggctccctcatcagcgaggactgggtggtcaccgctgcccactgcggggtcaggacctccgacgtggtcgtggctggggagtttgaccagggctctgacgaggagaacatccaggtcctgaagatcgccaaggtcttcaagaaccccaagttcagcattctgaccgtgaacaatgacatcaccctgctgaagctggccacacctgcccgcttctcccagacagtgtccgccgtgtgcctgcccagcgccgacgacgacttccccgcggggacactgtgtgccaccacaggctggggcaagaccaagtacaacgccaacaagacccctgacaagctgcagcaggcagccctgcccctcctgtccaatgccgaatgcaagaagtcctggggcaggaggatcaccgacgtgatgatctgtgccggggccagtggcgtctcctcctgcatgggtgactctggaggccccctggtctgccagaaggacggagcctggaccctggtgggcattgtgtcctggggcagccgcacctgctctaccaccacgcccgctgtgtacgcccgtgtcgccaagctcataccctgggtgcagaagatcctggccgccaactgagcccgcagctcctgccacccctgccttaagatttcccattaaatgcatctgtttagaagccctga

SEQ ID NO: 119642 - DNA, 565 bp, Homo sapiens
  Payload ID: 3461
  Gene Symbol: CTRB2
  Gene Name: chymotrypsinogen B2
  ENST ID: ENST00000562106
  CDS Start-End: 1-507
gagtttgaccagggctctgacgaggagaacatccaggtcctgaagatcgccaaggtcttcaagaaccccaagttcagcattctgaccgtgaacaatgacatcaccctgctgaagctggccacacctgcccgcttctcccagacagtgtccgccgtgtgcctgcccagcgccgacgacgacttccccgcggggacactgtgtgccaccacaggctggggcaagaccaagtacaacgccaacaagacccctgacaagctgcagcaggcagccctgcccctcctgtccaatgccgaatgcaagaagtcctggggcaggaggatcaccgacgtgatgatctgtgccgggggtgactctggaggccccctggtctgccagaaggacggagcctggaccctggtgggcattgtgtcctggggcagccgcacctgctctaccaccacgcccgctgtgtacgcccgtgtcgccaagctcataccctgggtgcagaagatcctggccgccaactgagcccgcagctcctgccacccctgccttaagatttcccattaaatgcatctgtttagaa

SEQ ID NO: 119643 - DNA, 626 bp, Homo sapiens
  Payload ID: 3461
  Gene Symbol: CTRB2
  Gene Name: chymotrypsinogen B2
  ENST ID: ENST00000562387
  CDS Start-End: 1-414
gtggctggggagtttgaccagggctctgacgaggagaacatccaggtcctgaagatcgccaaggtcttcaagaaccccaagttcagcattctgaccgtgaacaatgacatcaccctgctgaagctggccacacctgcccgcttctcccagacagtgtccgccgtgtgcctgcccagcgccgacgacgacttccccgcggggacactgtgtgccaccacaggctggggcaagaccaagtacaacgccaacaagacccctgacaagctgcagcaggcagccctgcccctcctgtccaatgccgaatgcaagaagtcctggggcaggaggatcaccgacgtgatgatctgtgccggggccagtggcgtctcctcctgcatggtgaggctggccctgcccaggccctggccagggtgactctggaggccccctggtctgccagaaggacggagcctggaccctggtgggcattgtgtcctggggcagccgcacctgctctaccaccacgcccgctgtgtacgcccgtgtcgccaagctcataccctgggtgcagaagatcctggccgccaactgagcccgcagctcctgccacccctgccttaagatttcccattaaatgcatctgttta

SEQ ID NO: 119644 - DNA, 560 bp, Homo sapiens
  Payload ID: 3461
  Gene Symbol: CTRB2
  Gene Name: chymotrypsinogen B2
  ENST ID: ENST00000567767
  CDS Start-End: 1-345
gacaaaaccggcttccacttctgcgggggctccctcatcagcgaggactgggtggtcaccgctgcccactgcggggtcaggacctccgacgtggtcgtggctggggagtttgaccagggctctgacgaggagaacatccaggtcctgaagatcgccaaggtcttcaagaaccccaagttcagcattctgaccgtgaacaatgacatcaccctgctgaagctggccacacctgcccgcttctcccagacagtgtccgccgtgtgcctgcccagcgccgacgacgacttccccgcggggacactgtgtgccaccacaggctggggcaagaccaagtacaacgggtgactctggaggccccctggtctgccagaaggacggagcctggaccctggtgggcattgtgtcctggggcagccgcacctgctctaccaccacgcccgctgtgtacgcccgtgtcgccaagctcataccctgggtgcagaagatcctggccgccaactgagcccgcagctcctgccacccctgccttaagatttcccattaaatgcatctgtttagaa

SEQ ID NO: 119645 - DNA, 9766 bp, Homo sapiens
  Payload ID: 3462
  Gene Symbol: CFAP54
  Gene Name: cilia and flagella associated 54
  Uniprot ID: Q96N23
  ENST ID: ENST00000524981
  CDS Start-End: 24-9314
caggcgggccggggcgcgtcaatatggcggcgcagggctccccctcgagctctccgtcagacgactctaccacctcggggtctctgccagaactgccgccgacctccaccgcgacttcgaggtcgcccccagagtcgaaggggagctcccggagctcgctgcttcagtggacctgccccgaggactcattgcccctagccgtgttttatgggccgctggacgcgaaaaacccgctcctggcctcttgtgagaaggagatccaggagttgttaggctttatgaggaaaaagaaggctttagccaccacggaggaagagaagcacgaattccgccggcgttgtgccacttctttgtttaatatctggactaaatacgcccccaggctgccagcagactattacaacgaaaagcttctgaaggttggagatagcctttgtcaaatgaaagaatacaaactggcccttttacaatgctatggaagatatcttcagcagttcaataccaattttgatgagaataaagtggatgtaactcaattcaaagctacctttttcccaaaaggctttaaagataaaactgctggacttacatttcatgctttgagtggcaaaaatatgtgcaactaccagctggtctgcgacagtgatgaaaacctgaagaataaagaatctgtggtccagtgtctgcatatcttgtcctccttaaggctcatcatgcaagtggctctgccacaagagcatctttgctggattatcttcaatggtaccatttatatttacaccatttgcagaaaactgatggtcataggtcagtcttccaaggccttagagtatctcctgtgggccagcatgtgtatggagtccttggtcccgctcctgtcactcaggtacttgacatggcgcgctactctctacacagctgtttgccagtgctgctatgactgccatgccgggattcacggagaggcatttgctcggcgtgctttggctaaaattgatgagttaaggcaactggaattaatgagttcctcaaaatcccaggaagaatcgcgaagatattttcgagaggccacaatgaagatggcagtgatgatcttcaaaagaggagtctttgaatctagaagaaaaaacaaagctgtctttagacctaagataagaattaacctaagggaagtacaaactttatcatggccacgaactgtcacagagcggctactggatgagatgtttgatagcactgcatcccagtttctggctgtcttggaagctctttctgattcaaataggcgaatactgcaaactggacccattgttacagatgaagtggagattcatgatgttgtctcagaattgtttatggcaggaaaagaacttttgataatgtcaaatattggtgcagatggaatgcttgattttccaaaaacatctcttctggaacttatgataggaagaaaagatgttatttctgtggatgctgctgtgaaatttataaaattagcttttacctatgaggagtggagtttatttgaatcttctgctgtacatcttatttattttctccagaggcaggatgatccagagtcaaagaaagcagagaaggatttaactcttctgattgcaatggaaccactaatcaacgtgaagagaaacaaaggtttgatctttcctttggaaaactataaagaaggacagtcaactcaaatttatttaaaaaaaattgctgttcatgatacttgtttgaagacttgtggatattcagaggatattttccatttggcagcaaccttgtatgtctgtgtctgcactgctccccaggatgttcaacctgataaagaaattgttgtggacacgataatgttcctatggcagaaatgcaaattaggaattcagcggctcaatatatccagaaatgactatgcaaaattcacccagaaaatcagtactaacaaatggatttatcttctgtggcagataaatgaagtaattcactgctataaaatggaagacattgacattgtggtagtggcagaagtcacattacggttaagtgaaatattggaatctttaggaagcccaggaagaaaatttaaacaatctctagatgtacctttaagagaagggactaacaaattccctggagctccaaaagggatcacagaaattcttccaatattacagaaaaatcctgtggaacagttactttttgcttataaacttcttgacagagcaatcggtggaataaatttgaattgcatgttaacctctttgccaaatggatcatcagtaattgaccactgctatgccaagcgtacccaccatatagatggagatacttacaaaccacttgcctcaaatagtttcatgatggatttgcatcttgaactaattcaagctcagcatcgaatagctgttgtgcttctggacaaattgcaagttttgcagactccaactgttagcaaagatatttctaccaagggtccggaaaagttaaaacaatctggaagcactgattgttttacagaattaaatataatgaataaaataaagaagaatacattatccaaagcaatttacttaatgcagaaagctcttttaatattcgagaaagatgcaacttctacatcttcatgggaacttttgatggaagcatattccttaattcagaggattgaagctgaacaaaatgccctatattcctatcagaaatatttggaaagttcaaaaagaaagaaaagcagagtcccccctccacctatcctgctgtctcgaactcattgttctgtgacactcaaacctgctccatttacttcagaggttaaggtctcctggtactgcattttgggttgcaaagcagaaggaagttatggaaaagtacggctaaacaataatcatctcccaaattcaggagaagcgataccagctgacggtaaaagtgtttttgaagtgaaaggtttagaaaccaatgaaaagtatgtatttgcagttgctgcctattctaacaacggaaagcttgtcggtggtgctattggggagacaactaaaccaattctggtttatccccctctttctactattactgctcggatgttcctgacacaggttgcctatcaagttggtaactatgaattggctaagaaagttttctcaccagtttgggattattttgttgcttcgccacttcaggatgaacaatctgttatttgtttaagcaatataattactattacacaaagaagattacattcagatattttggcagagacttcttcaatcctcttgtacctttttcttagaaatatttttgtaacaagtgacatcaaaattaaagaagaaaatcttttctgtgataatattaaaggcaatgagattttcccatctcaacaaattgccagactgattgaatgtgagagagtattagtggcattggaacttagcaacttcctaaatgattccagctatgcccttcaagctgtgactcaatgttatggacttcttgctcccataatttatcacaatattgttttggtacctgttgtacagatcctgataaagtgtatagtggttttgcaaggactaccaagtattgtctgctcgaagaaacatactgcgagctttgaaagtatacaacacatgatagcttgttgtattttctacataacaaagattcttcgttcatggagggaatatgacctggcagtaatgattataaattatgggaaaaaaatgttggacatcacaccaggatgcaagtctctgtttgatggtagtaatgaacaagaagaaatgccagaggaggattcttctaagaagtctttaaagactaagaagccacagcagatactactgcctgaaaagataaatgaacagctggccttgttggagacacacctactcaaactgacaaagcaatatgttacatctgaactctcaggaggagaggaccctatatttctttatcctgtagttttgaattggtcggtcaaaggtgccgtgaaagaagttatgaaatttaagcaaaaaccaagatttctggaattctttacacaagttatgctaaaatgcatgaatgaggaaaaatttcatcttatggtagaggtaacaactcctgtccatgacttcttgaaaaggagaaatgagtctctacttggactaataaaagtgaaatataaggatagtgctttgaataaaaaagcaaacaaatctttaaagttcaaagctgcagtaatggaaattggaagaagtgcagaaatgcaacaaagaataagaagtaaaaaaaaggaaactctaagagatttcatttttaaaaatccggctatttctgaaatggtggcacatgaaagaaataggagaaccagtgttaggaaagcagcacaacgatacctgatggattacttgaatcctctaatattaagttatgttaaaagaaagaggttccatcgtctatcacttgaagagatgccctggagagctcagatgaacctgtatctagcaggtgcacactttaacctggttttacaaaagctatgggagtgtacgaagatgaaatttggcacatcacatatgatggtcagtttccgatcatgtgatcctaacatgttttcactgtataattcaggaacagtattaccaacaagaaaattgactgtagaaaattataaagcaatgcttgatttccttcttacagccaaaaaaagaaaggccaacttaccatcagatgctgaagaattttctacatttattaattccataatgagtgatgaaaatatgtccaagacacaaacagtttatgactcagactctcaatcaggttctagtgctaaagaaaaggaccgaggagcaaatttgtgtgtaatggatcattttatgaaaatctttttatactgcaggagagcaatggttcttgctcatcgtggtggctattggactctgcttcagaactgctgtcgggccttatggaactttactcaggaactacaaatacttcttaaacaggcagtggatcttgataaaacatttcctattagccaagatggtttcctctgcacctctgttttaccattctatttgggagcagaattacttattgacatgttaatacaactacaaaataccagttctattaagcctattgaagacaaaggagaattcagtgttccaagctgttatgggaatattaaaaatgacaacggtggttctagtcttacctttgagcatcctttggatgatgtaaatgtggttgatttgaaatggatccacgactttgtattaaaatctctggaagttttatatcaagtggaaaaatgggaaacactagtatctcttgccattcagttcaatacagtttcacatgagaggtatacagaacaagtgacaccacttctggtgtatgcacagcgccagcttctgctgagaatacagaagttcaagggcccagatattacccaacaaccttgtgcaaggtatgaggctgaatatggagagaagataacttgccgaaatttcattgggaagcagcttaagattaattcttcaaccattgaagcaacaagcaactgcacagatttgctaaaaatgcttatctcttcagaatacagccgagccaaagcgcttgtctgcgtgcccgtggacgtgacagacaccttgaggtgttttagagagacactggaaaaatccaaataccataacagatcaatccgacacagcagaaagttgctttcattatttcttgcacagacacaagatgttctccaagccagcaatcaaagaagtcttaaagttcaggcgttgcattcacttggaagtcttctcatcttcgcagaaaagaaaagggctgcttttaagtgttggtgtcaagctcttgatgacatattcagaaaaccagacgtgctacacacgtggaaagaatttggcccctcactcaccaatgtcaccaacagtcattcacctccgggtttcaaagactacagtgaggagtttctgtcaagagttggcatctgggggtgtttgcaaggagcagtcatatcagcaaagatagcacaatttattaagtcattgaatgttgaaaagaaaactgactgttgcattttgtctgcgttactctttcagggtttgcttagaacaacacttccacatcccaaagctgaacgttgctatgctcaatatgaaatcactcagcttctcccaggcattgaactcttctcagatagatacagggctgacatttgctctgtaattgcaagtctgtattacattatacgtgaactgcactttgttaggcaaaacctaatagttctgcctctccttgcattgtatcaatattttgtttctggaatttgtcaagacataacaagaaatctagaagcaagaatcctcaagatagaagtccttatagatttgagattcttttctgaagccttttatgagatatcccaaattttctatggaaaaaacatgccttgtccaatacctgcaggctataaagccactggaaaaatgaagatctttcaatcatttgactcaggaaaacttcttaccagtaaagaaaatatacaggcaattgatgaattaagaaataaaggcttgcctgcagttctggttacaattggccaaccacatctcttaaataagtttaattttgttaaagcatactttttcctaagtgtggctgcgacaataaattgtgtcccagaaaataaatttaagacagtaattaccaacaagagcaaaccaaacctaccaaacttggaagagatatattcaaaggatgatggaagttcattttataatcttacaaaacttaaagatgagatcactcttagcatgctaaagtcgatgttactgatggaagctgaggacaggctaaacttccttctgtccgaggtggaacagaagaccctgtctcagtgctccgctggcgagctggagattgtggtggaggcccggcttcagctggctgcagttgctctgcagaggcaccgggcggcatacagtgctgcaatagtattttctacacttacacttctccaggattcaaaactttttgaaaagaaggtagtacaggatgacacagagaatcctgtctctccaggaacttctgtcactgaaaataaagatgacagtgagtttttagatcctatttccctaaatgcccgagaatatttcaacattcatctgtggttgaggtgccgcttagcattggtgactgcatttgttgcacagattcatggcattggaattgtgaaagaggatgatatgacagattgcctgagcctcatcaatgaagtgtgtatggaggcaaaaagcgcaggggacacggaactgcaggctgaattcttgacgcaagctgtaattcttggcctacaagaaaagcatttaaaggcagacatcatgacaaaccttcaggatataatacatttgctggaaggaaatgaatttatttctcctcaatcacggctaaccctggcaagaagcctagttttgctggatgacttaaccaaagctgagaaattcaaggaatctccctcttcaaaaacaggaaaattaaatttgttaactcgggctcatagcattctaactgaacagatgctagcttttggagaaacaattgaatttcgttcatcaaacactaaatatgcaaatccattacagcctttgaaaaatatctatcttccccatgtcatgttattggccaaaataaaaatgagaattggacatacagtggccaagcaagtatattacaagaataaaaggaaggacccctcgaagtggttacctgctcttcatctgtttgatgtggcactgaagctctgtagaacaacagcagtggaggaacatgaggtggaagctgaaatcctttttcagaaaggcaaaatagaacgtcaaatactaatggaagagaaatctccaagttttcaacttgagagtttatatgaagctatacaactaagcctgaaaaatgatcaaaactcaggattgataagagactcctacctagaaatggctctattgtattttcatctgaagaagccaaagataaaaatttcaggatcaccattaacacttaagcctcctctcagaagaagtagttctgttaaagaaacatcagcaaataaatttgaaatgtacagttcattagcctggattgcaataagagctgctgcacaggtcagtgaagctgtgctggcaattaacttacttattggaaagaagaatactagaatgcataaagttaaccaagtggcattaccaaatatcccagaatttgctgctctggatcttttgtcttcgtatacagattatttgcttgacaactaccaagtcctcttccagacttcctgtacatttttgtaccaaaatgatgatgtgtgtgacagcgcagatggtagaaaaaagactcagaccaaagtggatattacatggatccttctactgcgctactatattcaccttcagaggattaataatctgagcaaactgctagcatctgcaacaccagtatctggaatttctttgccagatgatacacttctcacatccctttacaactctgagttgattttgcgccagaaagaagtgcattttttccttaaaaaattcttacagctgtattcttcttcttgtattgatgaatttccaaaagaacttctttgtcaactggaaaatccccctctttcagaaaaagacttacgtgaatcatctgccaagttgtatcgcgatagttctgtacaatccattttatcttttaagcctgtttcaggctcatcttgtgtggacataacgccaatagaaatggtaacgcaagcttcaaacaaagaactttgctttcaatggtacattcctcccctggatagacctcccaaggagacagaacctatggttttattgttgtatgcatataatttgaagcctctgaagatttcagatgttagacattccacttataacagtacatgtgttggctctttatggattccactgaatagggttattgcaattcatgagaaattatctaatcttgctcaaatagctgaactatcattgccagcagctcctgaaattacctcaaatgaaaacatatatgaagtagaagtggaagaggaatcagttgataatgaaatggaagacatgattattcaatgttgctctgaaatagcatctctgtttttgaatgataaagagccaacaccactatctgaggtcccatttgatatctcactgccgtctatattcaatcttgagagactttttgatctggctaatggttgcattttatcaggaggaagccttttcaactggatagtgtcaattattccctgaatatcctatacacgggatgataaaactgagaaataaatcaagagtatgacaacagactgaggaatttttcagcaatatctgtcagcctttggaaatttggtgagaagaagtagtcatgattcaatgtcttgcttgcacagaagcctctagttcaaacttggatcttgccccatctgatttcttatgatatatacaaatactctagatattgctttgagatttcgctgttgatcaactggcctgctgcagcttcataggtgtttcagctcccagtagggcagtttaactcctatcttctctgtgagttccaggtctgtatatctcctcagctcgctctcatttgtccagcttatctatttctttatcaagttgctttggcttccccactctctcctgcgttttgaaaagaattaattctcaagtagattaaaactacattctggtaaaaatga

SEQ ID NO: 119646 - DNA, 2756 bp, Homo sapiens
  Payload ID: 3462
  Gene Symbol: CFAP54
  Gene Name: cilia and flagella associated 54
  ENST ID: ENST00000550977
  CDS Start-End: 1-796
gccagaggaggattcttctaagaagtctttaaagactaagaagccacagcagatactactgcctgaaaagataaatgaacagctggccttgttggagacacacctactcaaactgacaaagcaatatgttacatctgaactctcaggaggagaggaccctatatttctttatcctgtagttttgaattggtcggtcaaaggtgccgtgaaagaagttatgaaatttaagcaaaaaccaagatttctggaattctttacacaagttatgctaaaatgcatgaatgaggaaaaatttcatcttatggtagaggtaacaactcctgtccatgacttcttgaaaaggagaaatgagtctctacttggactaataaaagtgaaatataaggatagtgctttgaataaaaaagcaaacaaatctttaaagttcaaagctgcagtaatggaaattggaagaagtgcagaaatgcaacaaagaataagaagtaaaaaaaaggaaactctaagagatttcatttttaaaaatccggctatttctgaaatggtggcacatgaaagaaataggagaaccagtgttaggaaagcagcacaacgatacctgatggattacttgaatcctctaatattaagttatgttaaaagaaagaggttccatcgtctatcacttgaagagatgccctggagagctcagatgaacctgtatctagcaggtgcacactttaacctggttttacaaaagctatgggagtgtacgaagatgaaatttggcacatcacatatgatggtcagacatttttaagcacttactgagtgtctttggctaagtgctgtgagagataaaaatagaagatacatacataatatggaatactgtgtagctattaaaaagatacaaaatcaatgagcaaaaagcacaagcattcttatacaccaataacagacaaacaaagagccaaatcatgagtgaactcccattcacaattgcttcaaagagaataaaatacccaggaatccaacttacaagggatgtgaaggacctcttcaaggagaactacaaaccactgctcaatgaaataaaagaggatacaaaccagtggaagaacattccatgcttagggataggaagaatcaatatcgtgaaaatggccatactgcctaggtaatttatagattcaatgccatccccatcaagctaccaatgactttcttcacagaattggaaaaaaactactttaaagttcatatggaaccaaaaaagagcctgcatcgccaagtcaatcctaagccaaaagaacaaagctggaggcatcacgctacctgacttcaaactatactacaaggctacagtaaccgaaacagcatggtactggtaccaaaacagagatatagacaaatggaacagaacagagccctcagaaataatgtcacatatctacaactatctgatctttgacaaacctgacaaaaacaaaaaatggggaaaggattccctatttaataaatggtgctgggaaaacttgctagccatatttagaaagttgaaactggatcccttccttacaccttatacaaaaattaattcaagatggattaaagacttaaattttagacctaaaaccataaaaaccctagaagaaaacctaggcaataccattcaggacataggcatgggcaaggacttcatgtctaaaacaccaaaagcaatggcaagaaaagccaaaattgacaaatgggatctaattaaactaaagagcttctgcacagcaaaaagaaactaccatcagagtgaacaggcaacctacagaatgggagaaaatttttgcaatctactcatctgacaaagggctaatatccagaatctacaatgaactcaaacaaatttacaagaaaaaaacaaccccatcaacaagtgggtgaaggatatgaacagacatttcacaaaagaatacatttatgcagccaaaagacacatgaaaaaatgctcatcatcactggccatcagaaaaatgcaaatcaaaaccacaatgagataccatctcacaccagttagaatggcgatcattaaaaagtcaggaaacaagaggtgctggagaggatgtggagaaataggaacacttttacacggttggtgggactgtatgtaaactagttcaacctttgtggaagtcagtgtggcgattcctcagggatctagaactagaaataccatttgacccagccatcccattactgggtatatacccaaaggattataaatcatgctgctataaagacacatgcacaaatatgtttatcacagcactattcacaatagcaaagacttggaaccaagccaagtgtccaacaatgatagactggattaagaaaatgtggcacgtatacaccatggaatactatgcagccataaaaaatgatgagttcatgtcctttgtagggacatggatgaagctggaaactatcattctcagcaaactatcgcaaggacgaaaaatcaaacaccgcatgttctcactcataggtgggaattgaacaatgagaacacatggacacaggaaggggaacatcacacaccggggcctgttatggggtggtgggagtggggaggtatagcattaggagatatacctaatgttaaatgacgagttaatgggtgcagcacaccaacatggcacatgtatacgtatgtaacaaacctgcacattgtgcacatgtaccctaaaacttaaagtataataataaaaaaagaataatgaatataa

SEQ ID NO: 119647 - DNA, 1967 bp, Homo sapiens
  Payload ID: 3462
  Gene Symbol: CFAP54
  Gene Name: cilia and flagella associated 54
  ENST ID: ENST00000553778
  CDS Start-End: 36-1967
gtacacatactccaggcgggccggggcgcgtcaatatggcggcgcagggctccccctcgagctctccgtcagacgactctaccacctcggggtctctgccagaactgccgccgacctccaccgcgacttcgaggtcgcccccagagtcgaaggggagctcccggagctcgctgcttcagtggacctgccccgaggactcattgcccctagccgtgttttatgggccgctggacgcgaaaaacccgctcctggcctcttgtgagaaggagatccaggagttgttaggctttatgaggaaaaagaaggctttagccaccacggaggaagagaagcacgaattccgccggcgttgtgccacttctttgtttaatatctggactaaatacgcccccaggctgccagcagactattacaacgaaaagcttctgaaggttggagatagcctttgtcaaatgaaatttcatgctttgagtggcaaaaatatgtgcaactaccagctggtctgcgacagtgatgaaaacctgaagaataaagaatctgtggtccagtgtctgcatatcttgtcctccttaaggctcatcatgcaagtggctctgccacaagagcatctttgctggattatcttcaatggtaccatttatatttacaccatttgcagaaaactgatggtcataggtcagtcttccaaggccttagagtatctcctgtgggccagcatgtgtatggagtccttggtcccgctcctgtcactcaggtacttgacatggcgcgctactctctacacagctgtttgccagtgctgctatgactgccatgccgggattcacggagaggcatttgctcggcgtgctttggctaaaattgatgagttaaggcaactggaattaatgagttcctcaaaatcccaggaagaatcgcgaagatattttcgagaggccacaatgaagatggcagtgatgatcttcaaaagaggagtctttgaatctagaagaaaaaacaaagctgtctttagacctaagataagaattaacctaagggaagtacaaactttatcatggccacgaactgtcacagagcggctactggatgagatgtttgatagcactgcatcccagtttctggctgtcttggaagctctttctgattcaaataggcgaatactgcaaactggacccattgttacagatgaagtggagattcatgatgttgtctcagaattgtttatggcaggaaaagaacttttgataatgtcaaatattggtgcagatggaatgcttgattttccaaaaacatctcttctggaacttatgataggaagaaaagatgttatttctgtggatgctgctgtgaaatttataaaattagcttttacctatgaggagtggagtttatttgaatcttctgctgtacatcttatttattttctccagaggcaggatgatccagagtcaaagaaagcagagaaggatttaactcttctgattgcaatggaaccactaatcaacgtgaagagaaacaaaggtttgatctttcctttggaaaactataaagaaggacagtcaactcaaatttatttaaaaaaaattgctgttcatgatacttgtttgaagacttgtggatattcagaggatattttccatttggcagcaaccttgtatgtctgtgtctgcactgctccccaggatgttcaacctgataaagaaattgttgtggacacgataatgttcctatggcagaaatgcaaattaggaattcagcggctcaatatatccagaaatgactatgcaaaattcacccagaaaatcagtactaacaaagtattcctttcgcattccctttcacgtgttttttttgctattgcttattcaagttgccacacacatttcaaatctaaatttttcctatttttcacctggttaatgactttcatttgcatatatacatatataaagaagatattctttcta

SEQ ID NO: 119648 - DNA, 2086 bp, Homo sapiens
  Payload ID: 3463
  Gene Symbol: CFAP100
  Gene Name: cilia and flagella associated protein 100
  Uniprot ID: Q494V2
  ENST ID: ENST00000352312
  CDS Start-End: 100-1935
agcgcggaggcttcggagcgagccggggcagtcggggtcggtgaggatctcctttagaagaggagaagccttgcatcaacctcttgggcctcagccaagatgtctgagataccgtccactatagtctccaagaacatgaccaatgacaagaacagcctggaatccatgaacatcagctcttcttcaagcactgaagagaacccaaagaaacaggcaagaaaaaacgaagaacatggtcctgacccttcagcgaaccctttccacttatctggggatgtggatttcttcttgctcagagatcaggagcggaataaggctctctccgaacggcagcagcagaagacgatgcgggtgcaccagaagatgacctactcctcgaaagtgtcggctaagcacaccagcctgcggcggcagctgcagctggaggacaagcaggaggacctggaggcgcgcgccgaggccgagcatcagcgcgccttccgcgactacacgacctggaagctcaccttgaccaaagaaaagaatgtggagcctgagaacatgagtggctacattaagcagaagcggcaaatgttcctcctccagtatgccctggatgtcaagcggagagagatccagcggctggagacgctggcgaccaaagaggaggccaggctggagcgggccgagaaatccctggagaaggacgccgccttgttcgacgagttcgtcagggagaatgactgcagctccgtgcaggccatgagagcggctgagaaggagaccaaagccaagatagagaagatccttgagatccgggacctcaccacccagattgttaatatcaaaagtgagatctccagatttgaagacactctgaagcattacaaggtctataaggatttcctatacaagctgtcgcccaaggagtggcttgaagaacaggaaaagaaacactcgtttctcaaaaaggccaaggaggtctccgaggcttccaaagagagcagtgttaactccacaccaggggacaaaggaccagggatcaagggcaaggcgagctccatgtgggccaaagagggtcagggtacaaagaagccctggaggtttctgcagacgatgcggctggggcggagcccgtcttacctgagcagcccccagcaaggcagccagcccagcgagtccagcggtggcgactccagagggtcgaactctcccatcccccccacgcaggaggacaccgacagcgatggggaggaaccacagctgtacttcacggagccccagcagctcctggatgtcttccgagagctggaggagcagaacctgtcgctgatccagaacagccaggagacggagaagaccctggaggagctgagccacaccctgaaacacacccagatccgcatggacagggaggtcaaccagctgaagcagtgggtcaccacaatgatgatgtccatcaccaaggaggaggacacagcagctgagctggagctcaaagcccgagtcttccacttcggcgagtacaagggcgatcagcaggataagctgctagagagcctgaactgcaaggtgctggatgtgtaccggcactgcaccggcacccagcaggaggccaacctgggcaccgtgcagatgctgaccatcattgagcaccagctggatgagctgctagagaacctggagcacgtgccccaggtcaagatcgagcaggccgagagggcaaaggagaaggagcggcgcatcagacttcgagaagagaagctccagatgcaaaagatcctacaggaggagcatctgcagcgggcccgggcgcgcgcccaggctgagatcaagaagaagagaggcaggacactggtatgccgctcacgacccccagcccacaggatcaaacaacagtctgagcacacactgatggacaaggaggaggaggagctgctatttttctttacttaatcttcgcagaccatagctgttctggctgaaggcttagcaaagatgttggcagaggaagcagagactgggctgggtctcgagtggcccaactgagtcctctctgtctcctgtgtgctcccttcctcacctgaataaattcatgtctctctgg

SEQ ID NO: 119649 - DNA, 1994 bp, Homo sapiens
  Payload ID: 3463
  Gene Symbol: CFAP100
  Gene Name: cilia and flagella associated protein 100
  Uniprot ID: Q494V2
  ENST ID: ENST00000505024
  CDS Start-End: 30-1868
ttgcatcaacctcttgggcctcagccaagatgtctgagataccgtccactatagtctccaagaacatgaccaatgacaagaacagcctggaatccatgaacatcagctcttcttcaagcactgaagagaacccaaagaaacaggcaagaaaaaacgaagaacatggtcctgacccttcagcgaaccctttccacttatctggggatgtggatttcttcttgctcagagatcaggagcggaataaggctctctccgaacggcagcagcagaagacgatgcgggtgcaccagaagatgacctactcctcgaaagtgtcggctaagcacaccagcctgcggcggcagctgcagctggaggacaagcaggaggacctggaggcgcgcgccgaggccgagcatcagcgcgccttccgcgactacacgacctggaagctcaccttgaccaaagcagaaaagaatgtggagcctgagaacatgagtggctacattaagcagaagcggcaaatgttcctcctccagtatgccctggatgtcaagcggagagagatccagcggctggagacgctggcgaccaaagaggaggccaggctggagcgggccgagaaatccctggagaaggacgccgccttgttcgacgagttcgtcagggagaatgactgcagctccgtgcaggccatgagagcggctgagaaggagaccaaagccaagatagagaagatccttgagatccgggacctcaccacccagattgttaatatcaaaagtgagatctccagatttgaagacactctgaagcattacaaggtctataaggatttcctatacaagctgtcgcccaaggagtggcttgaagaacaggaaaagaaacactcgtttctcaaaaaggccaaggaggtctccgaggcttccaaagagagcagtgttaactccacaccaggggacaaaggaccagggatcaagggcaaggcgagctccatgtgggccaaagagggtcagggtacaaagaagccctggaggtttctgcagacgatgcggctggggcggagcccgtcttacctgagcagcccccagcaaggcagccagcccagcgagtccagcggtggcgactccagagggtcgaactctcccatcccccccacgcaggaggacaccgacagcgatggggaggaaccacagctgtacttcacggagccccagcagctcctggatgtcttccgagagctggaggagcagaacctgtcgctgatccagaacagccaggagacggagaagaccctggaggagctgagccacaccctgaaacacacccagatccgcatggacagggaggtcaaccagctgaagcagtgggtcaccacaatgatgatgtccatcaccaaggaggaggacacagcagctgagctggagctcaaagcccgagtcttccacttcggcgagtacaagggcgatcagcaggataagctgctagagagcctgaactgcaaggtgctggatgtgtaccggcactgcaccggcacccagcaggaggccaacctgggcaccgtgcagatgctgaccatcattgagcaccagctggatgagctgctagagaacctggagcacgtgccccaggtcaagatcgagcaggccgagagggcaaaggagaaggagcggcgcatcagacttcgagaagagaagctccagatgcaaaagatcctacaggaggagcatctgcagcgggcccgggcgcgcgcccaggctgagatcaagaagaagagaggcaggacactggtatgccgctcacgacccccagcccacaggatcaaacaacagtctgagcacacactgatggacaaggaggaggaggagctgctatttttctttacttaatcttcgcagaccatagctgttctggctgaaggcttagcaaagatgttggcagaggaagcagagactgggctgggtctcgagtggcccaactgagtcctctctgtctcctgtgtgctcccttcctca

SEQ ID NO: 119650 - DNA, 481 bp, Homo sapiens
  Payload ID: 3463
  Gene Symbol: CFAP100
  Gene Name: cilia and flagella associated protein 100
  ENST ID: ENST00000510833
  CDS Start-End: 93-446
tcattcaatggatgaagttaagaagtgccaagggtgaggatctcctttagaagaggagaagccttgcatcaacctcttgggcctcagccaagatgtctgagataccgtccactatagtctccaagaacatgaccaatgacaagaacagcctggaatccatgaacatcagctcttcttcaagcactgaagagaacccaaagaaacaggcaagaaaaaacgaagaacatggtcctgacccttcagcgaaccctttccacttatctggggatgtggatttcttcttgctcagagatcaggagcggaataaggctctctccgtgagtatccaggacagacgccagcacctccgggagcttccctgctcccactgcttcctggagtggccacattgcccttctcagaggagcactttcctcaggtccttctcattccagaatagtcaatagctcaccacttactataaaatcagctggaaacctta

SEQ ID NO: 119651 - DNA, 774 bp, Homo sapiens
  Payload ID: 3464
  Gene Symbol: CFAP126
  Gene Name: cilia and flagella associated protein 126
  Uniprot ID: Q5VTH2
  ENST ID: ENST00000367974
  CDS Start-End: 7-540
aagatcatggccactaactacagtgccaaccagtatgaaaaggctttctcatccaagtatctgcagaactggtctcccactaagccaacaaaagagagcatctcttctcatgaaggctacactcaaattattgccaacgatcgtggtcatctactgccttctgtgccccgttccaaggcaaatccttggggttccttcatgggcacctggcaaatgcctctgaagataccccctgctcgggtgaccctgacctcccgtacaactgctggtgctgcctccctcaccaaatggatacagaaaaatcctgatttactcaaggcctccaatgggctgtgtcctgaaatcttaggcaagccccatgatccagacagtcagaagaaactcagaaagaagtctatcacaaagactgtacaacaagcacgaagtccaaccataattccaagctccccagctgccaacctcaattccccagatgaactccaaagctcacacccctctgcaggtcatactccaggtccccaaagaccagccaaatcctaagagcccacctggaagtccacgtatgctagaactctgggcagggcctaatctagctgaggtccagaaatacaaacctggaacttcatatggaccaagtggccacacactgaaaaacccgtatagcgactcagtgaaataaacaagagcccccagtcagaactgtgaaacagggaaattttggggtgggagtaaaagcaaatttggaaaataaacttttttttgttgaatctttta

SEQ ID NO: 119652 - DNA, 1721 bp, Homo sapiens
  Payload ID: 3465
  Gene Symbol: CFAP157
  Gene Name: cilia and flagella associated protein 157
  Uniprot ID: Q5JU67
  ENST ID: ENST00000373295
  CDS Start-End: 41-1603
ggcctcttcctggggcctggagccctggttgccatcagccatggctcccaaaaagagtgtgagcaaggcaggcaaggagcttgaagtcaagaagaaagggggcaagaaggagccggtggtggccgtggagccgcctctggccaaggagatgaaggagttctaccacatccagatccgagacctggaggaccggctagcccggtaccagcggaagtgggatgagctggctgtgcaggagaagatgttccgccaggagtttgagcagctggccaataacaagaaggagattgtggccttcctcaagcgcacgctcaaccagcaggtggatgagatcacagacctcaacgagcagctccagaacttgcagctagccaaagagatggagaaggatgccttcgaggcgcagctggcccaggtgcgccacgagttccaggagaccaaggaccagctcaccacggagaacatcatccttggggggaagctggcagccctggaggagttccggctgcagaaagaggaggtcacggacaagttcacattgctggaggagcaggtgcggaagcaggagaatgagttcagggactatgcatacaacctggagaagaagtcggtgctggacaaggacagactgaggaaagagatcatccagcgcgtgaacctcgtggccaatgagttccacaaggtgaccacgaaccggatgtgggagacaaccaagcgggccatcaaagagaacaacggcattaccctgcagatggccagggtctcccagcaaggcatgaagctgctgcaggagaatgagcagctcaagggaagacagaacaatctgtgcaaacagctggagctgctggagaacacccagaaggtcatggccaggcacaaaagaggccaccagaagatcatcctcatgctgactaagaagtgccaggagcagcagcaggacaccaaggaggccgaggagctgcgcctcctgctgagccagttggagcagagatccctgcagctgcaggtggataaccaggcactgaagagccagagagaccagctgagcctgcagctggagcagcagcaggtggatttgcagcggctacagcaggaactggctaatgagcagaaggttcgggccagcctggaggcggctctggtccaggccacctccttcctacagaacattctgcagatgcaccgcgatgaagaggacagtgacgttgacgtgacgttccagccatggcacaaggagatgctgcagcaactgctggtcatgctcagctccactgtggccacgagacctcagaaggctgcgtgtccccaccaggagtcacagtcccatggcccacccaaggagagccggcccagcatccagctgcccaggactgggtctctgctgccgcagctctctgacatcaccccctaccagccgggggatctaggcctggtacctcgccaggtccacatcccacccaacccccaggacctcaggctgctgtcatatatcacccgtgtggggaccttccgggcacacagcagccctgagatgcgtgcccctggttctctaaaaaggcttgaaaagtttagtcttcctgaagttcccctacgtcccaagtaggacacagagagaagaacctactccagaaatggactggtccagtcacagtcacccccactttaatccgcaggcagcctggaacagtctagaggagatttgtataaaaagtagataccaa

SEQ ID NO: 119653 - DNA, 1796 bp, Homo sapiens
  Payload ID: 3465
  Gene Symbol: CFAP157
  Gene Name: cilia and flagella associated protein 157
  Uniprot ID: Q5JU67
  ENST ID: ENST00000614677
  CDS Start-End: 14-1291
gttgccatcagccatggctcccaaaaagagtgtgagcaaggcaggcaaggagcttgaagtcaagaagaaagggggcaagaaggagccggtggtggccgtggagccgcctctggccaaggagatgaaggagttctaccacatccagatccgagacctggaggaccggctagcccggtaccagcggaagtgggatgagctggctgtgcaggagaagatgttccgccaggagtttgagcagctggccaataacaagaaggagattgtggccttcctcaagcgcacgctcaaccagcaggtggatgagatcacagacctcaacgagcagctccagaacttgcagctagccaaagagatggagaaggatgccttcgaggcgcagctggcccaggtgcgccacgagttccaggagaccaaggaccagctcaccacggagaacatcatccttggggggaagctggcagccctggaggagttccggctgcagaaagaggaggtcacggacaagttcacattgctggaggagcaggtgcggaagcaggagaatgagttcagggactatgcatacaacctggagaagaagtcggtgctggacaaggacagactgaggaaagagatcatccagcgcgtgaacctcgtggccaatgagttccacaaggtgaccacgaaccggatgtgggagacaaccaagcgggccatcaaagagaacaacggcattaccctgcagatggccagggtctcccagcaaggcatgaagctgctgcaggagaatgagcagctcaagggaagacagaacaatctgtgcaaacagctggagctgctggagaacacccagaaggtcatggccaggcacaaaagaggccaccagaagatcatcctcatgctgactaagaagtgccaggagcagcagcaggacaccaaggaggccgaggagctgcgcctcctgctgagccagttggagcagagatccctgcagctgcaggtggataaccaggcactgaagagccagagagaccagctgagcctgcagctggagcagcagcaggtggatttgcagcggctacagcaggaactggctaatgagcagaaggttcgggccagcctggaggcggctctggtccaggccacctccttcctacagaacattctgcagacagggaaaacttcgtggaaatgggcactgaggttggaatttcctggacgagggtgggtactggggccactgtgggcctgctgccaccccaccctcaccaacagatgcaccgcgatgaagaggacagtgacgttgacgtgacgttccagccatggcacaaggagatgctgcagcaactgctggtcatgctcagctccactgtggccacgagacctcagaaggctgcgtgtccccaccaggagtcacagtcccatggcccacccaaggagagccggcccagcatccagctgcccaggactgggtctctgctgccgcagctctctgacatcaccccctaccagccgggggatctaggcctggtacctcgccaggtccacatcccacccaacccccaggacctcaggctgctgtcatatatcacccgtgtggggaccttccgggcacacagcagccctgagatgcgtgcccctggttctctaaaaaggcttgaaaagtttagtcttcctgaagttcccctacgtcccaagtaggacacagagagaagaacctactccagaaatggactggtccagtcacagtcacccccactttaatccgcaggcagcctggaacagtctagaggagatttgtataaaaagtagatacc

SEQ ID NO: 119654 - DNA, 409 bp, Homo sapiens
  Payload ID: 3465
  Gene Symbol: CFAP157
  Gene Name: cilia and flagella associated protein 157
  ENST ID: ENST00000461104
  CDS Start-End: 1-409
tgacgtgacgttccagccatggcacaaggagatgctgcagcaactgctggtcatgctcagctccactgtggccacgagacctcagaaggctgcgtgtccccaccaggagtcacagtcccatggcccacccaaggagagccggcccagcatccagctgcccaggactgggtctctgctgccgcagctctctgacatcaccccctaccagccgggggatctaggcctggtacctcgccaggtccacatcccacccaacccccaggacctcaggctgctgtcatatatcacccgtgtggggaccttccgggcacacagcagccctgagcgtcccgtgggccccaacgcagaggagcggaaacgcagagcaacgctgcagtggggaaggggcgcgaagaaggggcccagaaac

SEQ ID NO: 119655 - DNA, 1631 bp, Homo sapiens
  Payload ID: 3466
  Gene Symbol: CFAP161
  Gene Name: cilia and flagella associated protein 161
  Uniprot ID: Q6P656
  ENST ID: ENST00000286732
  CDS Start-End: 84-989
gcctggggccgggtcgtcatggcgacgcgccacgctaacgcatggtgtcggagggaggcccacttgctgaacagcagggagcgatggcgcagaacgtgtatggtccgggagtccggataggcaactggaatgaggatgtctacctggaggaggagctcatgaaagacttcttagagaagagagacaaggggaaacttctcatacagagaagtagaagactaaaacagaatctcttgagaccgatgcaactttccgtaactgaagatggctatattcattacggtgacaaagtgatgcttgtgaatcctgatgatcctgacacagaagctgatgtgtttctgcgtggggacctgagcctgtgtatgactccagatgaaattcagtcccatctgaaagacgaattagaggtaccctgtggcctgagcgcagttcaagccaagaccccaattggcagaaacacttttatcattttgagtgtacacagagatgccactggtcaagtccttagatatgggcaggacttttgcctggggataacaggaggatttgacaacaaaatgttgtatttgtcaagtgaccacaggaccctcctgaaatcgtctaagaggtcttggctccaggaagtgtacctaacagatgaggtctcccatgtgaactgctggcaggctgccttccctgacccccagttacgcctggaatatgaaggcttccccgtcccggcaaatgctaaaattctcatcaatcactgtcacacaaatcggggactggcagcccaccggcatcttttcttaagcacctattttggaaaggaggctgaggttgtagctcacacatacctggattcacatagagttgagaaaccaaggaaccactggatgttggttactgggaatcccagggatgcctcgtcctccatgttggatctgcccaaaccacccacagaggacactcgagccatggagcaggccatgggccttgacacgcagtaacacgccaggcacgtgcatgttttccctggtcccgctctcatcaaatgtagctttaaaagaaattaacaaccttggtcatgcctcaagctatttttgaatcagatgtgggactctctgggcactatattaaaataaagattacattaagattattgaatttgtggtgggagtctagggctgaagaaaaacagctctggagaataattagtatttgaaagtgacaaacaatagccttttgttgataaacaaattctgaagaactcagcttcctctacttatatccttcattgtctacaaggacagtgcgttactttttaaagttatgtctatgtaataaagctgttggacctatactgaatttttggtaccacagtttccctcttgaatgtactaaaacacaaaaaactgacagctctgagctgtggccttaccttggaattaaacatttccacctttgtaaaacatcctatttttgtttctacctttggctttccaggtcaggacctctacctgatcagtaacctattattttgtaatgatttttaagctgcagaatctctaccttgtctttgaaactggcacattagttgtggcacccatgtgattagatagttcctgacaaaataaatgtatgtccttcca

SEQ ID NO: 119656 - DNA, 574 bp, Homo sapiens
  Payload ID: 3466
  Gene Symbol: CFAP161
  Gene Name: cilia and flagella associated protein 161
  ENST ID: ENST00000560091
  CDS Start-End: 241-574
gcattttcacctgggactgttccctgggctgccttgtggtttgcatcaactggaagaggctttaaggagaccatctctgagtttccagtgtgggcacaggtgggcttatctaaatcagatcccaaatagtatttaaaaagcctctaccaaaagaagaggaggggctcaacctgagagaaaactcaccagggcagaaaagatgacagccatggaagcagagctcaaaggactgaagagctcatgaaagacttcttagagaagagagacaaggggaaacttctcatacagagaagtagaagactaaaacagaatctcttgagaccgatgcaactttccgtaactgaagatggctatattcattacggtgacaaagtgatgcttgtgaatcctgatgatcctgacacagaagctgatgtgtttctgcgtggggacctgagcctgtgtatgactccagatgaaattcagtcccatctgaaagacgaattagaggtaccctgtggcctgagcgcagttcaagccaagaccccaattggcagaaacacttttatcattttgagtgtacacagagatgcca

SEQ ID NO: 119657 - DNA, 572 bp, Homo sapiens
  Payload ID: 3466
  Gene Symbol: CFAP161
  Gene Name: cilia and flagella associated protein 161
  ENST ID: ENST00000561216
  CDS Start-End: 256-572
attcatgtgtcaatgaagaattcctgccagacttccagtactgtcctcgaccatgggcagaatcccagctgcccctcccagaacactccatgccactggaactcaggagcgcaggtgggcttatctaaatcagatcccaaatagtatttaaaaagcctctaccaaaagaagaggaggggctcaacctgagagaaaactcaccagggcagaaaagatgacagccatggaagcagagctcaaaggactgaagagctcatgaaagacttcttagagaagagagacaaggggaaacttctcatacagagaagtagaagactaaaacagaatctcttgagaccgatgcaactttccgtaactgaagatggctatattcattacggtgacaaagtgatgcttgtgaatcctgatgatcctgacacagaagctgatgtgtttctgcgtggggacctgagcctgtgtatgactccagatgaaattcagtcccatctgaaagacgaattagaggtaccctgtggcctgagcgcagttcaagccaagaccccaattggcagaaacacttttatcattttgag

SEQ ID NO: 119658 - DNA, 1354 bp, Homo sapiens
  Payload ID: 3467
  Gene Symbol: CFAP20
  Gene Name: cilia and flagella associated protein 20
  Uniprot ID: Q9Y6A4
  ENST ID: ENST00000262498
  CDS Start-End: 336-917
gcgctcccggggggcgggctcagatgggcggagggattcattttaagcaacgggcggccctccgcctccattgaaggcggggaaataccgcggcgcggacggtagttgctgtggtttccgttctgagctcgcagcttaggagctgaagatcgcggacttagcgttgccgcgtccgagtccggccatcagtggctgcagatccggaggccaggagctcaaccacccttcttcggaacagggccggcctgctgctgtgccctcgacgctcggtgcctgtatctactccggggcctaggtcggctccgggggcggcttaggagaaggccgccggcgagatgttcaaaaacacgttccagagcggcttcctctccatcctctacagcatcggcagcaagcctctgcaaatctgggacaaaaaggtacggaatggccacatcaaaagaatcactgataatgacatccagtccctggtgctagagattgaagggacaaatgtaagcaccacatatatcacatgccctgcagaccccaagaagacgctgggaattaaacttcctttccttgtcatgattatcaaaaacctgaagaagtattttaccttcgaagtgcaggtactagatgacaagaatgtgcgtcgtcgctttcgggcaagtaactaccagagcaccacccgggtcaaacccttcatctgcaccatgcccatgcggctggatgacggctggaaccagattcagttcaacttgctagacttcacacggcgagcatacggcaccaattacatcgagaccctcagagtgcagatccatgcaaattgtcgcatccgacgggtttacttctcagacagactctactcagaagatgagctgccggcagagttcaaactgtatctcccagttcagaacaaggcaaagcaataactggaattgtgactcgagggatagacccctggatgtgactcttctttttaaaaggaaactatgtggaggacgatgcaaaaacatatttatcttagtttgctctgctgtagttctgttatttatacttggtgttgcttgtcatggacaccggtgaacatgccgtaactctgtgactgcattgtaagtgcagtgggggtaagcagtcctgtgagtggcgcatgaacgctggagcttattccgccgcctgccccagtgtggggggagatacctttaccatgaacttacagaattaaagatggcccataaggaattccagaccaatatttcttcctgcggtttattctatgttttatatattatctaaatatatgtatatgctgtgtcatactcataatctggaaatgaataaagtgatatattcctggtttgtaaatttg

SEQ ID NO: 119659 - DNA, 572 bp, Homo sapiens
  Payload ID: 3467
  Gene Symbol: CFAP20
  Gene Name: cilia and flagella associated protein 20
  ENST ID: ENST00000565880
  CDS Start-End: 247-572
gcggcgcggacggtagttgctgtggtttccgttctgagctcgcagcttaggagctgaagatcgcggacttagcgttgccgcgtccgagtccggccatcagtggctgcagatccggaggccaggagctcaaccacccttcttcggaacagggccggcctgctgctgtgccctcgacgctcggtgcctgtatctactccggggcctaggtcggctccgggggcggcttaggagaaggccgccggcgagatgttcaaaaacacgttccagagcggcttcctctccatcctctacagcatcggcagcaagcctctgcaaatctgggacaaaaaggtacggaatggccacatcaaaagaatcactgataatgacatccagtccctggtgctagagattgaagggacaaatgtaagcaccacatatatcacatgccctgcagaccccaagaagacgctgggaattaaacttcctttccttgtcatgattatcaaaaacctgaagaagtattttaccttcgaagtgcagatgacaagaatgtgcgtcgtcgctttcgggcaagtaactaccagagcacc

SEQ ID NO: 119660 - DNA, 2196 bp, Homo sapiens
  Payload ID: 3468
  Gene Symbol: CFAP206
  Gene Name: cilia and flagella associated protein 206
  Uniprot ID: Q8IYR0
  ENST ID: ENST00000369562
  CDS Start-End: 113-1981
atggttacgcggcggtggctgcgagcgcccaactgctccgaccgtcgcggtgagggccccaggacagaagcagacagacacggctcctgctgtcgattccgatccagccagaatgcctccaactcaggccgaaagtgttataaggagtattatacgagaaataggacaagaatgtgcagcccatggagagattgtttctgaaactctgattgcttttatggtgaaagctgttgtcctggatccaagtaatggctttaacatggatagaaccctcatgaaaagtgatgtgcagaatcttgttaagctttgtatgactcggctattggatactaaaaatccatccctggacactattaagatgcaagtctacttcgatatgaattatacgaatcgagtggaatttctcgaagaacatcaccgggtcctagagtctagattaggctctgttacccgagaaattacagataacagagcatgtgctaaagaagaattggaaagcctctaccggaagattatcagctatgtgttactccgctctggccttggatcccctacagacatcaagactgtcagagaggtaacagctgctctacagagtgtttttcctcaggcagagcttgggacatttctaactctttctaagaaggacaaagaacgccagctgaaagaactcaccatgattgttactggaattcgtttatttaacagagactgtggaaaaggaggagaaggcattgatgatttgccagctgttctccatgtagcaatcccagccaccatgcagcatattgattaccagcttgagactgcccggagccaggtataccgctacacagccatccttgagaaggcagccaacgacccactcatgagggctgaacttcagccatatatgttaaaagaagcgctatataatatacgacaatatgaggtcttccttcagatcattttgtcagatataattactggtgctcaagaagtggaaatgatgacaaaacagttaggagcccatctggaacaactaaaaatgaccataaaatcaaagatagcggtcccaacatcacaagtctttcctatcttcattgcactttctactctgtggaccagcttgcaagacgaaactattgtggttggtgtcctcagtaatttattcactcacattcagccattcttgggtgctcacgaactatactttcctgagagagtgatgcaatgtcatcttaatggagcgactgtgaaaactgatgtgtgtagaatgaaagaacacatggaagatagagtaaatgtggcagatttcagaaaactagaatggcttttcccagaaacaacagcaaattttgataaactgttaattcaatatcggggattttgtgcttacacgtttgctgcaacagatggtcttctccttccaggaaatccagcaattggaattttaaaatataaagaaaaatattacacattcaatagtaaagatgctgcatattcatttgcagaaaatcctgaacattatattgacatagttagagaaaaggccaaaaaaaatacagagttaattcaactattggaacttcatcaacagtttgaaacatttattccatattctcagatgagagatgctgacaaacattatataaaaccaattacaaaatgtgaaagtagcacacagacgaatacacacatactgccaccaacgattgtgagatcatatgagtggaatgaatgggaattaagaagaaaagctataaaattggctaatttgcgccagaaagttactcactcagtacaaactgatcttagtcacttgagaagagaaaattgttcccaagtgtaccctccaaaggacactagcacccagtccatgagggaagacagcactggggtgcccaggcctcagatttacttggctggtcttcgtggaggaaagagcgaaatcaccgatgaggtcaaggtgaacttaactagagatgtggatgaaacctaattacagacaacgttttaaaatagatgctactcaattatgaacaatagcaagtacttaaaggtatattaacatctatacaaattaattttgtaggggtggcacattcattggttgtgtgactgtttattgggttcccatattttatcaaactgttttctgtaacacatttttcattctgttgaaattgaaaaataaaactgtccatttatctttta

SEQ ID NO: 119661 - DNA, 1050 bp, Homo sapiens
  Payload ID: 3468
  Gene Symbol: CFAP206
  Gene Name: cilia and flagella associated protein 206
  ENST ID: ENST00000480123
  CDS Start-End: 296-1050
ggagcgcgcacacagatccggagcgcgcacacagatccggagcgcgcacacagatccggagcgcgcacacagatccggagcgcgcacacagatccggagcgcgcacacagatccggagcgcgacggactctcccactgactggcacttgcgcatgcgctgcctgtgatcttggagtactgattataagctgttttaagcgattcccttaagccgcgcactgttgtaaccactaaaaacaggactaatttagtcctcacacctctggaaagaagtgaagcaagtgcccaagccagaatgcctccaactcaggccgaaagtgttataaggagtattatacgagaaataggacaagaatgtgcagcccatggagagattgtttctgaaactctgattgcttttatggtgaaagctgttgtcctggatccaagtaatggctttaacatggatagaaccctcatgaaaagtgatgtgcagaatcttgttaagctttgtatgactcggctattggatactaaaaatccatccctggacactattaagatgcaagtctacttcgatatgaattatacgaatcgagtggaatttctcgaagaacatcaccgggtcctagagtctagattaggctctgttacccgagaaattacagataacagagcatgtgctaaagaagaattggaaagcctctaccggaagattatcagctatgtgttactccgctctggccttggatcccctacagacatcaagactgtcagagaggtaacagctgctctacagagtgtttttcctcaggcagagcttgggacatttctaactctttctaagaaggacaaagaacgccagctgaaagaactcaccatgattgttactggaattcgtttatttaacagagactgtggaaaaggaggagaaggcattgatgatttgccagctgttctccatgtagcaatcccagccaccatgcagcatattgattaccagcttgagactgcccggagccaggtataccgctacacagccatccttgagaaggcagccaacgacccact

SEQ ID NO: 119662 - DNA, 2267 bp, Homo sapiens
  Payload ID: 3468
  Gene Symbol: CFAP206
  Gene Name: cilia and flagella associated protein 206
  ENST ID: ENST00000489338
  CDS Start-End: 66-353
gtcgcggtgagggccccaggacagaagcagacagacacggctcctgctgtcgattccgatccagaatgcctccaactcaggccgaaagtgttataaggagtattatacgagaaataggacaagaatgtgcagcccatggagagattgtttctgaaactctgattgcttttatggtgaaagctgttgtcctggatccaagtaatggctttaacatggatagaaccctcatgaaaagtgatgtgcagaatcttgttaagctttgtatgactcggctattggatactaaaaatccatccctggacactattaagatgcaagtctacttcgatatgaattatacgaatcgagcttaagaaattacttgttttcctgaagtagaattgccatatccaatccagtttttctctagttcttacgtaagaagaattctaaaaattaaatatatagaacattgttatttggcaattttagtggaatttctcgaagaacatcaccgggtcctagagtctagattaggctctgttacccgagaaattacagataacagagcatgtgctaaagaagaattggaaagcctctaccggaagattatcagctatgtgttactccgctctggccttggatcccctacagacatcaagactgtcagagaggtaacagctgctctacagagtgtttttcctcaggcagagcttgggacatttctaactctttctaagaaggacaaagaacgccagctgaaagaactcaccatgattgttactggaattcgtttatttaacagagactgtggaaaaggaggagaaggcattgatgatttgccagctgttctccatgtagcaatcccagccaccatgcagcatattgattaccagcttgagactgcccggagccaggtataccgctacacagccatccttgagaaggcagccaacgacccactcatgagggctgaacttcagccatatatgttaaaagaagcgctatataatatacgacaatatgaggtcttccttcagatcattttgtcagatataattactggtgctcaagaagtggaaatgatgacaaaacagttaggagcccatctggaacaactaaaaatgaccataaaatcaaagatagcggtcccaacatcacaagtctttcctatcttcattgcactttctactctgtggaccagcttgcaagacgaaactattgtggttggtgtcctcagtaatttattcactcacattcagccattcttgggtgctcacgaactatactttcctgagagagtgatgcaatgtcatcttaatggagcgactgtgaaaactgatgtgtgtagaatgaaagaacacatggaagatagagtaaatgtggcagatttcagaaaactagaatggcttttcccagaaacaacagcaaattttgataaactgttaattcaatatcggggattttgtgcttacacgtttgctgcaacagatggtcttctccttccaggaaatccagcaattggaattttaaaatataaagaaaaatattacacattcaatagtaaagatgctgcatattcatttgcagaaaatcctgaacattatattgacatagttagagaaaaggccaaaaaaaatacagagttaattcaactattggaacttcatcaacagtttgaaacatttattccatattctcagatgagagatgctgacaaacattatataaaaccaattacaaaatgtgaaagtagcacacagacgaatacacacatactgccaccaacgattgtgagatcatatgagtggaatgaatgggaattaagaagaaaagctataaaattggctaatttgcgccagaaagttactcactcagtacaaactgatcttagtcacttgagaagagaaaattgttcccaagtgtaccctccaaaggacactagcacccagtccatgagggaagacagcactggggtgcccaggcctcagatttacttggctggtcttcgtggaggaaagagcgaaatcaccgatgaggtcaaggtgaacttaactagagatgtggatgaaacctaattacagacaacgttttaaaatagatgctactcaattatgaacaatagcaagtacttaaaggtatattaacatctatacaaattaattttgtaggggtggcacattcattggttgtgtgactgtttattgggttcccatattttatcaaactgttttctgtaacacatttttcattctgttgaaattgaaaaataaaactgtccatttatc

SEQ ID NO: 119663 - DNA, 2985 bp, Homo sapiens
  Payload ID: 3469
  Gene Symbol: CFAP221
  Gene Name: cilia and flagella associated protein 221
  ENST ID: ENST00000295220
  CDS Start-End: 127-936
gtccgcgtcgtcatggcgacgctccgagcgggcgccggcgctggcgccggccgaatccggcccgggaaccacctccagggacatgacctttggctctaaaaagaagactccatttttcatgataaaatggcagtggtgaaaacccccagcagaggactaaagaatgctaaagaaccctttaataatgcatcaccccatctcttgaagaacctagtggaggagccgaaaaaaagaaaagaagtacctaatcacctcctagaatcaaaggtttatgcaaaacttgtgaataataaggtcatacaggcaagacctggcataatacattttggaggctatcaagtagaaaaacaacaccaacagattctgcatctggtcaatgtttccaatgaagacacacgtgttcatattttacccccgcaaaccaaatactttgagatcaattatgtaagaaaggaacaccacctggtccctggcttgtccctcacggtcaccgttacattttctccagatgagtggcgatactattatgactgcatccgtgttcactgtaagggagatgacactttgcttgttcctattcatgcctatccagtcatgaactcactagactttccttcatttataaatctgtcaaatgttctacttggtgaaagcaaaacttatgttattcctttgcagtgcagctgccctgtagattttgagttttatatcaccttgattcagtctcatcaagcctttgctattgagccaacatcaggaataattccggctaatgggaagatgactgtgactattaagtttacaccctttcagtatgggactgcacaaataaaaatgcagttatggatttcgcagttcaactctcaaccatacgaatgtgtcttcaccggaacatgctatcccaacatggccttacccagcctaagtcaactgtaggatattagtgtggcctgctgaacccaaatcctgcaaataaccatcattgaaatcactcgggcaacaaacaagtagaactgaacacaaattttaaaactgctgatttttctggtggcaaataagcagattagaagagtttgaaaggttgaataccctttctaagaaagtaaacgttcctccagaaaaagcaatgatgcatataaattttcaccgaccgccagcgaagccgaagcctcagaaggtgaaggaaattgagtaccagaacctcagatttccagtagatttatcgaatccatttgctgtggcaactgttttaaaccaagaaccaggaaaattgaagattaaagaattaagagaagttttggaccagggcactgaaatttcaaaaacgagacagatgaaggaggcactctttgaacagaaagtcagacaggacattcacgaagagatggaaaatcatcttaagtggcaggtgcaccttggtaaagatcctatgtcttttaaacttaaaaaagagcttactgaagagtggcaaaaagcatgtgccaaatataagctagacagaggagatcctattttggatgaggaatttcagcgacttaaaacagaagttagccataaacgggttgttcgcaatcaagaagagaaaatcaaggaatttcatcctacttttgatccactcattaataacacttggctcagcaggtccagggcacaaaaacggtttcaacaagtagcacgcaaggtcatgattcagggacgattattcaatatgctgagtgctgttcgtgaaatggacaaagagagtatactgagaaagattggccaagcaaaacaatcgatagcacaagaggcgaatttcttcaaattcttcctgaggcggatcagtcaggatgattataccagccggttctctgtgtcgcccaaggaggtgctgcccttcgctttcccagactgcagcccaccccaggactccaacgagttggctcctgatggccttggactggtcccaattaagtcttcagaagttcaaatcaagcagagttattccttcttcaatctgcaggttcctcaactgtacaaaattaagagatatcagccattctctgtccacaagtcttcaacaagttacagacctcaaaagcttgcccgagccctaaagcaaggagctgaggatgaagtcaccaccatcacagcccttccgaaacaggactccacaactcagctctctggcaaaacatcagtcttgagcatgaaaccacctgaggccttagccatgtctctagattatgatcctctgtatgtttttaatcccaacccaggattatttgctgtaatgcatcctctgacctatgcagaaacgttgatagattaccatctatgctctcaccccaagtacaaattcaccaaagagtcccgccacgggtccagcattcctgtcacccaaaagcagtttctccatcacacggacattattcccggaataatgcactggaaaagcttccagtccctggttctctcctccctgccggacccctccaagatggagaccacaaagagctgcgattccttcaattcatttatgcttccgatagacgtccctgccatccttgatgccttaccagaagaggacagactagaaacagtagaacgtgagctctgtgagcagaatgtagaagttatgttgactccagaaatgatcaaagtggaattccctatgttgaactacaaggacatcaggaaggagaaagaagtgaaagatcaagcacaaccagcagagaaggccggagagaagctgctcgaggagatgaggaacctgcggggcaaagcactcaacacatacctgattctagaatgaaagtcaccagtaggtcagtcccttccatttgctttccgtgggccactgtggccccttgcgtccatttacatgccagccatctctgcaattaaagtttctggataaaaaaatgaaatgtagaggatgtatatatcttttaagtgataattataaatcttatatttaaaaataaaatggagttaggatgatga

SEQ ID NO: 119664 - DNA, 2167 bp, Homo sapiens
  Payload ID: 3469
  Gene Symbol: CFAP221
  Gene Name: cilia and flagella associated protein 221
  ENST ID: ENST00000413057
  CDS Start-End: 110-271
gacgctccgagcgggcgccggcgctggcgccggccgaatccggcccgggaaccacctccagggacatgacctttggctctaaaaagaagactccatttttcatgataaaatggcagtggtgaaaacccccagcagaggactaaagaatgctaaagaaccctttaataatgcatcaccccatctcttgaagaacctagtggaggagccgaaaaaaagaaaagaagtacctaatcacctcctagaatcaacatctggtcaatgtttccaatgaagacacacgtgttcatattttacccccgcaaaccaaatactttgagatcaattatgtaagaaaggaacaccacctggtccctggcttgtccctcacggtcaccgttacattttctccagatgagtggcgatactattatgactgcatccgtgttcactgtaagggagatgacactttgcttgttcctattcatgcctatccagtcatgaactcactagactttccttcatttataaatctgtcaaatgttctacttggtgaaagcaaaacttatgttattcctttgcagtgcagctgccctgtagattttgagttttatatcaccttgattcagtctcatcaagcctttgctattgagccaacatcaggaataattccggctaatgggaagatgactgtgactattaagtttacaccctttcagtatgggactgcacaaataaaaatgcagttatggatttcgcagttcaactctcaaccatacgaatgtgtcttcaccggaacatgctatcccaacatggccttaccattagaagagtttgaaaggttgaataccctttctaagaaagtaaacgttcctccagaaaaagcaatgatgcatataaattttcaccgaccgccagcgaagccgaagcctcagaaggtgaaggaaattgagtaccagaacctcagatttccagtagatttatcgaatccatttgctgtggcaactgttttaaaccaagaaccaggaaaattgaagattaaagaattaagagaagttttggaccagggcactgaaatttcaaaaacgagacagatgaaggaggcactctttgaacagaaagtcagacaggacattcacgaagagatggaaaatcatcttaagtggcaggtgcaccttggtaaagatcctatgtcttttaaacttaaaaaagagcttactgaagagtggcaaaaagcatgtgccaaatataagctagacagaggagatcctattttggatgaggaatttcagcgacttaaaacagaagttagccataaacgggttgttcgcaatcaagaagagaaaatcaaggaatttcatcctacttttgatccactcattaataacacttggctcagcaggtccagggcacaaaaacggtttcaacaagtagcacgcaaggtcatgattcagggacgattattcaatatgctgagtgctgttcgtgaaatggacaaagagagtatactgagaaagattggccaagcaaaacaatcgatagcacaagaggcgaatttcttcaaattcttcctgaggcggatcagtcaggatgattataccagccggttctctgtgtcgcccaaggaggtgctgcccttcgctttcccagactgcagcccaccccaggactccaacgagttggctcctgatggccttggactggtcccaattaagtcttcagaagttcaaatcaagcagagttattccttcttcaatctgcaggttcctcaactgtacaaaattaagagatatcagccattctctgtccacaagtcttcaacaagttacagacctcaaaagcttgcccgagccctaaagcaaggagctgaggatgaagtcaccaccatcacagcccttccgaaacaggactccacaactcagctctctggcaaaacatcagtcttgagcatgaaaccacctgaggccttagccatgtctctagattatgatcctctgtatgtttttgtaagtgacaactggcagaagccttgttttctgtgttcctttatttcagcaattactctataggaaacagagcactcattgggaatattttttctctttggaatttcaagtgttaaacaatatctgacctttaatattgtttgccaacctttattttttggagaatatcagtgattccgtctttt

SEQ ID NO: 119665 - DNA, 2801 bp, Homo sapiens
  Payload ID: 3469
  Gene Symbol: CFAP221
  Gene Name: cilia and flagella associated protein 221
  Uniprot ID: Q4G0U5
  ENST ID: ENST00000413369
  CDS Start-End: 88-2610
gctggcgccggccgaatccggcccgggaaccacctccagggacatgacctttggctctaaaaagaagactccatttttcatgataaaatggcagtggtgaaaacccccagcagaggactaaagaatgctaaagaaccctttaataatgcatcaccccatctcttgaagaacctagtggaggagccgaaaaaaagaaaagaagtacctaatcacctcctagaatcaaaggtttatgcaaaacttgtgaataataaggtcatacaggcaagacctggcataatacattttggaggctatcaagtagaaaaacaacaccaacagattctgcatctggtcaatgtttccaatgaagacacacgtgttcatattttacccccgcaaaccaaatactttgagatcaattatgtaagaaaggaacaccacctggtccctggcttgtccctcacggtcaccgttacattttctccagatgagtggcgatactattatgactgcatccgtgttcactgtaagggagatgacactttgcttgttcctattcatgcctatccagtcatgaactcactagactttccttcatttataaatctgtcaaatgttctacttggtgaaagcaaaacttatgttattcctttgcagtgcagctgccctgtagattttgagttttatatcaccttgattcagtctcatcaagcctttgctattgagccaacatcaggaataattccggctaatgggaagatgactgtgactattaagtttacaccctttcagtatgggactgcacaaataaaaatgcagttatggatttcgcagttcaactctcaaccatacgaatgtgtcttcaccggaacatgctatcccaacatggccttaccattagaagagtttgaaaggttgaataccctttctaagaaagtaaacgttcctccagaaaaagcaatgatgcatataaattttcaccgaccgccagcgaagccgaagcctcagaaggtgaaggaaattgagtaccagaacctcagatttccagtagatttatcgaatccatttgctgtggcaactgttttaaaccaagaaccaggaaaattgaagattaaagaattaagagaagttttggaccagggcactgaaatttcaaaaacgagacagatgaaggaggcactctttgaacagaaagtcagacaggacattcacgaagagatggaaaatcatcttaagtggcaggtgcaccttggtaaagatcctatgtcttttaaacttaaaaaagagcttactgaagagtggcaaaaagcatgtgccaaatataagctagacagaggagatcctattttggatgaggaatttcagcgacttaaaacagaagttagccataaacgggttgttcgcaatcaagaagagaaaatcaaggaatttcatcctacttttgatccactcattaataacacttggctcagcaggtccagggcacaaaaacggtttcaacaagtagcacgcaaggtcatgattcagggacgattattcaatatgctgagtgctgttcgtgaaatggacaaagagagtatactgagaaagattggccaagcaaaacaatcgatagcacaagaggcgaatttcttcaaattcttcctgaggcggatcagtcaggatgattataccagccggttctctgtgtcgcccaaggaggtgctgcccttcgctttcccagactgcagcccaccccaggactccaacgagttggctcctgatggccttggactggtcccaattaagtcttcagaagttcaaatcaagcagagttattccttcttcaatctgcaggttcctcaactgtacaaaattaagagatatcagccattctctgtccacaagtcttcaacaagttacagacctcaaaagcttgcccgagccctaaagcaaggagctgaggatgaagtcaccaccatcacagcccttccgaaacaggactccacaactcagctctctggcaaaacatcagtcttgagcatgaaaccacctgaggccttagccatgtctctagattatgatcctctgtatgtttttaatcccaacccaggattatttgctgtaatgcatcctctgacctatgcagaaacgttgatagattaccatctatgctctcaccccaagtacaaattcaccaaagagtcccgccacgggtccagcattcctgtcacccaaaagcagtttctccatcacacggacattattcccggaataatgcactggaaaagcttccagtccctggttctctcctccctgccggacccctccaagatggagaccacaaagagctgcgattccttcaattcatttatgcttccgatagacgtccctgccatccttgatgccttaccagaagaggacagactagaaacagtagaacgtgagctctgtgagcagaatgtagaagttatgttgactccagaaatgatcaaagtggaattccctatgttgaactacaaggacatcaggaaggagaaagaagtgaaagatcaagcacaaccagcagagaaggccggagagaagctgctcgaggagatgaggaacctgcggggcaaagcactcaacacatacctgattctagaatgaaagtcaccagtaggtcagtcccttccatttgctttccgtgggccactgtggccccttgcgtccatttacatgccagccatctctgcaattaaagtttctggataaaaaaatgaaatgtagaggatgtatatatcttttaagtgataattataaatcttatatttaaaaataaaatggagttaggatgatga

SEQ ID NO: 119666 - DNA, 450 bp, Homo sapiens
  Payload ID: 3469
  Gene Symbol: CFAP221
  Gene Name: cilia and flagella associated protein 221
  ENST ID: ENST00000434869
  CDS Start-End: 1-290
agtcccgccacgggtccagcattcctgtcacccaaaagcagtttctccatcacacggacattattcccggaataatgcactggaaaagcttccagtccctggttctctcctccctgccggacccctccaagatggagaccacaaagagctgcgattccttcaattcatttatgcttccgatagacgtccctgccatccttgatgccttaccagaagaggacagactagaaacagtagaacggagcacctggatctgctgctgtatctgtgacgacagagtcggggtatagcacaaagaaggccaccagccctgcatgacaagagctccggcacattaggaagactcttggtcccagagttcctccctacccgctatttcctgaactcctgttactgaagacccattcctttagctttgcgctttgtttctattaaactacctctggggag

SEQ ID NO: 119667 - DNA, 779 bp, Homo sapiens
  Payload ID: 3469
  Gene Symbol: CFAP221
  Gene Name: cilia and flagella associated protein 221
  ENST ID: ENST00000442513
  CDS Start-End: 253-779
ggcgctggcgccggccgaatccggcccgggaaccacctccaggattcactgcctgtcgcttgatgttgtccgtcttgggagtctgaagctatgggtcttctccagaaaaaacaaaaccgaaaaaacacacaaagatccacactaattaacattccatttcagaggcttcgccgaccagccccatggcctgcgcaagggccccaaggacatgacctttggctctaaaaagaagactccatttttcatgataaaatggcagtggtgaaaacccccagcagaggactaaagaatgctaaagaaccctttaataatgcatcaccccatctcttgaagaacctagtggaggagccgaaaaaaagaaaagaagtacctaatcacctcctagaatcaaaggtttatgcaaaacttgtgaataataaggtcatacaggcaagacctggcataatacattttggaggctatcaagtagaaaaacaacaccaacagattctgcatctggtcaatgtttccaatgaagacacacgtgttcatattttacccccgcaaaccaaatactttgagatcaattatgtaagaaaggaacaccacctggtccctggcttgtccctcacggtcaccgttacattttctccagatgagtggcgatactattatgactgcatccgtgttcactgtaagggagatgacactttgcttgttcctattcatgcctatccagtcatgaactcactagactttccttcatttataaatctgtcaaatgttctacttggtgaaag

SEQ ID NO: 119668 - DNA, 3294 bp, Homo sapiens
  Payload ID: 3469
  Gene Symbol: CFAP221
  Gene Name: cilia and flagella associated protein 221
  ENST ID: ENST00000443972
  CDS Start-End: 1-1199
ttcatcctacttttgatccactcattaataacacttggctcagcaggtccagggcacaaaaacggtttcaacaagtagcacgcaaggtcatgattcagggacgattattcaatatgctgagtgctgttcgtgaaatggacaaagagagtatactgagaaagattggccaagcaaaacaatcgatagcacaagaggcgaatttcttcaaattcttcctgaggcggatcagtcaggatgattataccagccggttctctgtgtcgcccaaggaggtgctgcccttcgctttcccagactgcagcccaccccaggactccaacgagttggctcctgatggccttggactggtcccaattaagtcttcagaagttcaaatcaagcagagttattccttcttcaatctgcaggttcctcaactgtacaaaattaagagatatcagccattctctgtccacaagtcttcaacaagttacagacctcaaaagcttgcccgagccctaaagcaaggagctgaggatgaagtcaccaccatcacagcccttccgaaacaggactccacaactcagctctctggcaaaacatcagtcttgagcatgaaaccacctgaggccttagccatgtctctagattatgatcctctgtatgtttttaatcccaacccaggattatttgctgtaatgcatcctctgacctatgcagaaacgttgatagattaccatctatgctctcaccccaagtacaaattcaccaaagagtcccgccacgggtccagcattcctgtcacccaaaagcagtttctccatcacacggacattattcccggaataatgcactggaaaagcttccagtccctggttctctcctccctgccggacccctccaagatggagaccacaaagagctgcgattccttcaattcatttatgcttccgatagacgtccctgccatccttgatgccttaccagaagaggacagactagaaacagtagaacgtgagctctgtgagcagaatgtagaagttatgttgactccagaaatgatcaaagtggaattccctatgttgaactacaaggacatcaggaaggagaaagaagtgaaagatcaagcacaaccagcagagaaggccggagagaagctgctcgaggagatgaggaacctgcggggcaaagcactcaacacatacctgattctagaatgaaagtcaccagtaggttgaaaaggtcgtggccccttggaaagattgtattgactgtgttggggatctggtgccacctggtggttgccacaagaaaggcctctcctgactcccaagttgtaacccgtttccaccaaatcgacttccaaataatatttatcagatcatcatctgtgcttttcttccttgtttcagaccacttttaggtggaaaaggcaaagaaggcttatatgtattttcttccataatgagtccatcagaaaaagttccttcggtgaaatcgttgaccacgtgatgtttggggactccctatgggatcaatcatccgggttccttagagaccatggccataatcaggggctggccaagggaatgagtatccctgggttcaacagctgtttctgaagacctgccagttcccctgtcttgcattaactcgggttatcatgccattctccttctaaggccaaagatacctgtaaccgaagaatcgggatacttcactgcagtcacttcatttttttttcttttgaggcagagtcttgctctgtcacctaggctggagtgcagtggcacaatctcggctcactgcaacctctgcctcccaggttccagcgattctcctgcctcagcctctcaagtagctgggattacagggacccgccaccacgcccggctaatttttctatttttagtacagatggggtttcaccatattggccaggcttgtctcaaactcctgacttcaagtgatccacccgcctcagcctctcaaagtgctgggattacaggcatgagccaccatgcctggccaagcagcttcattttagaagtgattattattgctttcctttctagaacttccggtttgtgaagtattttctcaatgatcctcaaaacattctaagacataaagtagctgttattagtgtgattttatgcagaaactcaggcccagaaagcttcatggacttacccaattagcagaagagccaggtttgggcaggatcttggtttcctgcaaaggtttcgttgcctagccaggcgtggtggtgtgtacctgtagtcccagctacctggggggctggggtgggaggctcacctgagcccaggtagtcaaggctgcagtgagccatgatcctggtacccagtccactcttctctctactacatggtaatcaatgaaaatattacagatttacattttttaactttttatttaaactttcagctttggagtctctaagagtaaagatattatgtgatgatatttgtattttacttaattgcttattctttaaaacatgtaatatagaaaaaaatacaaattagcaaatgtcctttgctctaaagaaatcagctggcaagtttgccccacccagcagcagccatgtcttactcatttctgtatccccagcatgcagcaagatgtttggcacaatgcaggctctcaataaatgttttttgaggctgggtatggtggctcacacctgtagtccctgcactttgggaggctgaggcaggtagatcccttgagcccaggagttcaagaccaccctgggcaacatggtgaaaacctgcctctacaaaaaacacaaaaattggccgggcatggtggcccatgcccagctacttgggaggctgaggtggaaggatcacttgagcctgagaggtcaaggctgcagtaagccgacattatgccaccacactccagcctgggcaacagagcaagaccctgtctcaattttttaaaaattggctaggtgcagtggctcatgtctgtaatcccagcaccttaggagaccgaggtggacggattgcttgagctcaggcattcaagaccagcctgggcaacatggcaaaaccccatctctacaaaaaatacaaaaaagattagccaggtgtgttggtgcacatctgtggtcccagctactggggagggtaagatggaaggatcacttgaccccaggaggctgaggctgcagtgagccaagattgtgccactgcactccagcctgggcaacagagcaagaccctgtctcaaaacaatagcaataatgtttgttgaattaaggaatataaaagaaatgtgaaaact

SEQ ID NO: 119669 - DNA, 1267 bp, Homo sapiens
  Payload ID: 3469
  Gene Symbol: CFAP221
  Gene Name: cilia and flagella associated protein 221
  ENST ID: ENST00000594371
  CDS Start-End: 1-521
taaagaatgctaaagaaccctttaataatgcatcaccccatctcttgaagaacctagtggaggagccgaaaaaaagaaaagaagtacctaatcacctcctagaatcaaaggtttatgcaaaacttgtgaataataaggtcatacaggcaagacctggcataatacattttggaggctatcaagtagaaaaacaacaccaacagattctgcatctggtcaatgtttccaatgaagacacacgtgttcatattttacccccgcaaaccaaatactttgagatcaattatgtaagaaaggaacaccacctggtccctggcttgtccctcacggtcaccgttacattttctccagatgagtggcgatactattatgactgcatccgtgttcactgtaagggagatgacactttgcttgttcctattcatgcctatccagtcatgaactcactagactttccttcatttataaatctgtcaaatgttctacttggtgaaagaattaggaaacatctcacagagtgaagattgactgcatacctctaacagagcctgatttaagacaggatttgtgagtttggtagacaatcctatgaagttttcattttactgttgactgaagaccatacactgtacggtgacccttattcagaatttttatcagaaacctagggcccctgaacatgagtatataaagtctgatgcaggcctataccctattggggatctcatgtgctcacagtacagctacgctcctctcaaagagacatcatagctaaggaacaatgttttaaaaacaagtaccagtgcaaattaattagaaacagggcactgcctgacgttaggaactctgcattcagagtgtagatctctcaaaagtacagttagagacatctggtcaggatgaagcagtgtgcgcaaactgcaatgaaccttttttgtgcaaaattactagttagtgacaaacaaaatataaagagacctccaaaaagacacactcaggctcagaaacaagctgaacaactccacagagcaggaacagcatagaaatgctgagtgggttgcagggtggagccacaggcttgcaggctccaggttttgaagcagtcaggcagtgttggagaccactccatggggtaaaggagactgcaagtgtctcactgattcaggggatccgcacttggcctgcagccaggagaagaggtaagctgccccacctttgcacttcccacgaaaggaagctggaaaccctctgctgacctgttgcctgg

SEQ ID NO: 119670 - DNA, 689 bp, Homo sapiens
  Payload ID: 3469
  Gene Symbol: CFAP221
  Gene Name: cilia and flagella associated protein 221
  ENST ID: ENST00000463985
  CDS Start-End: 110-514
gacgctccgagcgggcgccggcgctggcgccggccgaatccggcccgggaaccacctccagggacatgacctttggctctaaaaagaagactccatttttcatgataaaatggcagtggtgaaaacccccagcagaggactaaagaatgctaaagaaccctttaataatgcatcaccccatctcttgaagaacctagtggaggagccgaaaaaaagaaaagaagtacctaatcacctcctagaatcaaaggtttatgcaaaacttgtgaataataaggtcatacaggcaagacctggcataatacattttggaggctatcaagtagaaaaacaacaccaacagattctgttcactgaaaaagctcattggcacgatgtcccctggaattgtcttagacattatttggttgaaatatccctgcccgcaccatcactatgtctgctgactgccttctctgccatccaccacgtggatcacagctcactgctgcctcaaactcctgggctcaagtgatcctcccacctccgcctcccaagtagctgggactacagcatctggtcaatgtttccaatgaagacacacgtgttcatattttacccccgcaaaccaaatactttgagatcaattatgtaagaaaggaacaccacctggtccctggcttgtccctcacggtcaccgttacattttc

SEQ ID NO: 119671 - DNA, 964 bp, Homo sapiens
  Payload ID: 3469
  Gene Symbol: CFAP221
  Gene Name: cilia and flagella associated protein 221
  ENST ID: ENST00000594033
  CDS Start-End: 88-360
gctggcgccggccgaatccggcccgggaaccacctccagggacatgacctttggctctaaaaagaagactccatttttcatgataaaatggcagtggtgaaaacccccagcagaggactaaagaatgctaaagaaccctttaataatgcatcaccccatctcttgaagaacctagtggaggagccgaaaaaaagaaaagaagtacctaatcacctcctagaatcaaaggtttatgcaaaacttgtgaataataaggtcatacaggcaagacctggcataatacattttggaggctatcaagtagaaaaacaacaccaacagattctggtgctggctggatctccagtcttgggagtttaggttcctgtcttccttgggaccattcaggaatactggaaaaatggagcgaacccagcagctttgaggacagatctctgttctggtcttctgcccataatgtcgcttgttggaaactgatttaagccagtgagcttatttctaattgtcaggcagatattgagagtctgaccctgacagcatgtgggagtcataggtccactcctcagcagccttgctacaggtggtcggctgcagcgaacaggtctgagaagacactctgcaacacatatgaacacttactagcaagcaggcaaaaagatcattgtgtttgtaatctcacgaagtcccagctgcagttcctagtggggaggctttgatggccgcagcatctggtcaatgtttccaatgaagacacacgtgttcatattttacccccgcaaaccaaatactttgagatcaattatgtaagaaaggaacaccacctggtccctggcttgtccctcacggtcaccgttacattttctccagatgagtggcgatactattatgactgcatccgtgttcactgtaagggagatgacactttgcttgttcctattcatgcctatccagtcatgaactcact

SEQ ID NO: 119672 - DNA, 401 bp, Homo sapiens
  Payload ID: 3469
  Gene Symbol: CFAP221
  Gene Name: cilia and flagella associated protein 221
  ENST ID: ENST00000599827
  CDS Start-End: 1-355
aggagatcctattttggatgaggaatttcagcgacttaaaacagaagttagccataaacgggttgttcgcaatcaagaagagaaaatcaaggaatttcatcctacttttgatccactcattaataacacttggctcagcaggtccagggcacaaaaacggtttcaacaagtagcacgcaaggtcatgattcagggacgattattcaatatgctgagtgctgttcgtgaaatggacaaagagagtatactgagaaagattggccaagcaaaacaatcgatagcacaaggtgaagtatggctgcaaagcacagagatgccgagactgatcatgcctctgagcgtgaactttccttagaatgaagttagctctatgcaaataaaaaattttcaccagtcacaaa

SEQ ID NO: 119673 - DNA, 440 bp, Homo sapiens
  Payload ID: 3469
  Gene Symbol: CFAP221
  Gene Name: cilia and flagella associated protein 221
  ENST ID: ENST00000600951
  CDS Start-End: 1-266
tcttcaatctgcaggttcctcaactgtacaaaattaagagatatcagccattctctgtccacaagtcttcaacaagttacagacctcaaaagcttgcccgagccctaaagcaaggagctgaggatgaagtcaccaccatcacagcccttccgaaacaggactccacaactcagctctctggcaaaacatcagtcttgagcatgaaaccacctgaggccttagccatgtctctagattatgatcctctgtatgtttttacaagctgacatggagtcacagagtgttagtgctagtgggagccacagacagcattagctgatgcctgtcctatgcctggcttagaaactggacattattcccggaataatgcactggaaaagcttccagtccctggttctctcctccctgccggacccctccaagatggagaccacaaagag

SEQ ID NO: 119674 - DNA, 743 bp, Homo sapiens
  Payload ID: 3469
  Gene Symbol: CFAP221
  Gene Name: cilia and flagella associated protein 221
  ENST ID: ENST00000594141
  CDS Start-End: 1-141
gttattcctttgcagtgcagctgccctgtagattttgagttttatatcaccttgattcagtctcatcaagcctttgctattgagccaacatcaggaactagaagcatcatctacgcacaccttccaggcattttatgctgaagtttgccaaatgaaaaaacaatttgaatcaagctattaataattctatttataaggtatgccctcaactttaactcaactggccatccttaagatgcaggtgggctctgtagccgtcaaaagctggacctgctgttgttgggggccaagatattcctgaggctggagaaaatgaataaaggattttatgaccttcctgtactgctgacaagaaatcatatgcaaccaaaacttcaagaacactctgttgataattttggaagagccagcaatgcacgactttggccaagatatttttttttccgtgaaatctgaagagaagtattgaccaagatcttattagcatcggagatcaggcaaatgccacaaaaaaattgttgaacttgtctacttgtcactattttgtgatcctggacattcccttgttgtcacaaatgctagggaagaatgcatctaactcatataaatggtaaattatagcattaagtggctggctaagcaagagttccttgggggctgttgcttagagttcttatataaagtttcaataagttcattctctttttttaattataagaaaaatataagccacttacaaataa

SEQ ID NO: 119675 - DNA, 1532 bp, Homo sapiens
  Payload ID: 3469
  Gene Symbol: CFAP221
  Gene Name: cilia and flagella associated protein 221
  Uniprot ID: Q4G0U5
  ENST ID: ENST00000598644
  CDS Start-End: 74-637
aatccggcccgggaaccacctccagggacatgacctttggctctaaaaagaagactccatttttcatgataaaatggcagtggtgaaaacccccagcagaggactaaagaatgctaaagaaccctttaataatgcatcaccccatctcttgaagaacctagtggaggagccgaaaaaaagaaaagaagtacctaatcacctcctagaatcaaaggtttatgcaaaacttgtgaataataaggtcatacaggcaagacctggcataatacattttggaggctatcaagtagaaaaacaacaccaacagattctgcatctggtcaatgtttccaatgaagacacacgtgttcatattttacccccgcaaaccaaatactttgagatcaattatgtaagaaaggaacaccacctggtccctggcttgtccctcacggtcaccgttacattttctccagatgagtggcgatactattatgactgcatccgtgttcactgtaagggagatgacactttgcttgttcctattcatgcctatccagtcatgaactcactagactttccttcatttataaatctgtcaaatgttctacttggtgaaagtttacccaacagcgtcttcctggtaccagataactagttgaaacttggagcaggtccagttggttgaccagttgctctcccatcaactcattttccttgcaccaagatgactttaaccaattggttagcgtgctctagacaaacctgcctgaaactcacctggggaagtgatgacaaatccaggagaggatccactgtggatctggtggctgaagatctggtaaaatgatgccatgggcaaggccgccatgggctcctgcagcaagtggaccatgtactcatctcaaggctatagaggctctgtagcctgcagggccacattaacaacattcacagaagaggctcctggtgactccattccaaagccaggatactttagcttcttgaacttttatgtcataaggtcagaaatttaccaaaggatgcttttccttacttagtgaatcttatggctccttttagaaagcgtgggaacaaccaaggtcagaatatgatgtttgagtgtaaccaaattctcctactgcccctggagcttaaagcatctgggccacatgggaatgtgcactcttaagctagtgctaagaaggaagattgatggtgagagtttgcccccacgtagacagcccccagtcttgcattgtgccaataaacagtctctaggagagggggctgagaaccagctgtaactgggttaaaatgcagatgtcaggagaagacgatcaaattgatgttcacaagtgttttttgaagccctccctactcggagagaaaaaattcacttttttcagcttgtcaagggaaacactgcttactcatatgagggactcattttatgtgccccaagcttgaagttgatggaaaggagcagcagcattttatgaaagcatctgaccagggtgacgtgagctcacgacatagtcgttctttacttt

SEQ ID NO: 119676 - DNA, 2048 bp, Homo sapiens
  Payload ID: 3470
  Gene Symbol: CFAP36
  Gene Name: cilia and flagella associated protein 36
  Uniprot ID: Q96G28
  ENST ID: ENST00000349456
  CDS Start-End: 149-1177
ttaactggttggtagcttctatcctgggggctgagcgactgcgggccagctcttcccctactccctctcggctccttgtggcccaaaggcctaaccggggtccggcggtctggcctagggatcttccccgttgcccctttggggcgggatggctgcggaagaagaagacgaggtggagtgggtagtggagagcatcgcggggttcctgcgaggcccagactggtccatccccatcttggactttgtggaacagaaatgtgaagtttttgatgatgaagaagaaagcaaattgacctatacagagattcatcaggaatacaaagaactagttgaaaagctgttagaaggttacctcaaagaaattggaattaatgaagatcaatttcaagaagcatgcacttctcctcttgcaaagacccatacatcacaggccattttgcaacctgtgttggcagcagaagattttactatctttaaagcaatgatggtccagaaaaacattgaaatgcagctgcaagccattcgaataattcaagagagaaatggtgtattacctgactgcttaaccgatggctctgatgtggtcagtgaccttgaacacgaagagatgaaaatcctgagggaagttcttagaaaatcaaaagaggaatatgaccaggaagaagaaaggaagaggaaaaaacagttatcagaggctaaaacagaagagcccacagtgcattccagtgaagctgcaataatgaataattcccaaggggatggtgaacattttgcacacccaccctcagaagttaaaatgcattttgctaatcagtcaatagaacctttgggaagaaaagtggaaaggtctgaaacttcctccctcccacaaaaagacctgaagattcctggcttagagcatgcgagcattgaaggaccaatagcaaacttatcagtacttggaacagaagaacttcggcaacgagaacactatctcaagcagaagagagataagttgatgtccatgagaaaggatatgaggactaaacagatacaaaatatggagcagaaaggaaaacccactggggaggtagaggaaatgacagagaaaccagaaatgacagcagaggagaagcaaacattactaaagaggagattgcttgcagagaaactcaaagaagaagttattaataagtaataattaagaacaatttaacaaaatggaagttcaaattgtcttaaaaataaattatttagtccttacactgagccttttagtttcgaacacttttgtaaatccaaatatcttaaacactttaggtaaaggacagtagggaaggcagctactcatactgattagtttaatacaaattcctggatgttttcccttggaaagagggtatagaaggaaactagttgatagtatgttcattcattcaaactcggttacctactgtttgtgccaggcattgtgctaagcactaaggatacaggagtcaactagattgacagggtcactgccttcatggggctagtggagagggcccaaagacgaaactgttagaaaggcaaagtgtagtgtcctatgagcagggctggctaagcctctttaagctgaatggaaggttaattacacaaagaataggtaaggaacagttcaggttctgcagcaggaaataaagcatatactgaaaaactggagtatatatatgagtggagacggttagcatatgaaattggagacaggtgggggactgacagtgcagagtcttacagggaatgtgaggatttaatttttttaaaaattattttagagacaggatcttgctctgctgcccaggctggcgtgcagttgcacaatcccagctctggattttaaattttgtaataccagcagtgtcaagtcattgaaaaattttaatgcaggggccaggcacggtggctgacactgtaatcccagcactttgggaggccgaggtggacagattgcttgagcccaggagtttgagatcagcctgggcaacatggcaaaaccctgtatctactaaaaatacaaaaaattagctagg

SEQ ID NO: 119677 - DNA, 1373 bp, Homo sapiens
  Payload ID: 3470
  Gene Symbol: CFAP36
  Gene Name: cilia and flagella associated protein 36
  Uniprot ID: Q96G28
  ENST ID: ENST00000339012
  CDS Start-End: 199-1302
gggccgcggtctagggcggctacgtgtgttgccatagcgaccattttgcattaactggttggtagcttctatcctgggggctgagcgactgcgggccagctcttcccctactccctctcggctccttgtggcccaaaggcctaaccggggtccggcggtctggcctagggatcttccccgttgcccctttggggcgggatggctgcggaagaagaagacgaggtggagtgggtagtggagagcatcgcggggttcctgcgaggcccagactggtccatccccatcttggactttgtggaacagaaatgtgaagttaactgcaaaggagggcatgtgataactccaggaagcccagagccggtgattttggtggcctgtgttccccttgtttttgatgatgaagaagaaagcaaattgacctatacagagattcatcaggaatacaaagaactagttgaaaagctgttagaaggttacctcaaagaaattggaattaatgaagatcaatttcaagaagcatgcacttctcctcttgcaaagacccatacatcacaggccattttgcaacctgtgttggcagcagaagattttactatctttaaagcaatgatggtccagaaaaacattgaaatgcagctgcaagccattcgaataattcaagagagaaatggtgtattacctgactgcttaaccgatggctctgatgtggtcagtgaccttgaacacgaagagatgaaaatcctgagggaagttcttagaaaatcaaaagaggaatatgaccaggaagaagaaaggaagaggaaaaaacagttatcagaggctaaaacagaagagcccacagtgcattccagtgaagctgcaataatgaataattcccaaggggatggtgaacattttgcacacccaccctcagaagttaaaatgcattttgctaatcagtcaatagaacctttgggaagaaaagtggaaaggtctgaaacttcctccctcccacaaaaagacctgaagattcctggcttagagcatgcgagcattgaaggaccaatagcaaacttatcagtacttggaacagaagaacttcggcaacgagaacactatctcaagcagaagagagataagttgatgtccatgagaaaggatatgaggactaaacagatacaaaatatggagcagaaaggaaaacccactggggaggtagaggaaatgacagagaaaccagaaatgacagcagaggagaagcaaacattactaaagaggagattgcttgcagagaaactcaaagaagaagttattaataagtaataattaagaacaatttaacaaaatggaagttcaaattgtcttaaaaataaattatttagtccttacactga

SEQ ID NO: 119678 - DNA, 1125 bp, Homo sapiens
  Payload ID: 3470
  Gene Symbol: CFAP36
  Gene Name: cilia and flagella associated protein 36
  ENST ID: ENST00000407816
  CDS Start-End: 113-1054
gactgcgggccagctcttcccctactccctctcggctccttgtggcccaaaggcctaaccggggtccggcggtctggcctagggatcttccccgttgcccctttggggcgggatggctgcggaagaagaagacgaggtggagtgggtagtggagagcatcgcggggttcctgcgaggcccagactggtccatccccatcttggactttgtggaacagaaatgtgaagtttttgatgatgaagaagaaagcaaattgacctatacagagattcatcaggaatacaaagaactagttgaaaagctgttagaaggttacctcaaagaaattggaattaatgaagatcaatttcaagaagcatgcacttctcctcttgcaaagacccatacatcacaggccattttgcaacctgtgttggcagcagaagattttactatctttaaagcaatgatggtccagaaaaacattgaaatgcagctgcaagccattcgaataattcaagagagaaatggtgtattacctgactgcttaaccgatggctctgatgtggtcagtgaccttgaacacgaagagatgaaaatcctgagggaagttcttagaaaatcaaaagaggaatatgaccaggaagaagaaaggaagaggaaaaaacagttatcagaggctaaaacagaagagcccacagtgcattccagtgaagctgcaataatgaataattcccaaggggatggtgaacattttgcacacccaccctcagacctgaagattcctggcttagagcatgcgagcattgaaggaccaatagcaaacttatcagtacttggaacagaagaacttcggcaacgagaacactatctcaagcagaagagagataagttgatgtccatgagaaaggatatgaggactaaacagatacaaaatatggagcagaaaggaaaacccactggggaggtagaggaaatgacagagaaaccagaaatgacagcagaggagaagcaaacattactaaagaggagattgcttgcagagaaactcaaagaagaagttattaataagtaataattaagaacaatttaacaaaatggaagttcaaattgtcttaaaaataaattatttagtccttacactga

SEQ ID NO: 119679 - DNA, 1575 bp, Homo sapiens
  Payload ID: 3470
  Gene Symbol: CFAP36
  Gene Name: cilia and flagella associated protein 36
  ENST ID: ENST00000406691
  CDS Start-End: 157-813
attttgcattaactggttggtagcttctatcctgggggctgagcgactgcgggccagctcttcccctactccctctcggctccttgtggcccaaaggcctaaccggggtccggcggtctggcctagggatcttccccgttgcccctttggggcgggatggctgcggaagaagaagacgaggtggagtgggtagtggagagcatcgcggggttcctgcgaggcccagactggtccatccccatcttggactttgtggaacagaaatgtgaagtttttgatgatgaagaagaaagcaaattgacctatacagagattcatcaggaatacaaagaactagttgaaaagctgttagaaggttacctcaaagaaattggaattaatgaagatcaatttcaagaagcatgcacttctcctcttgcaaagacccatacatcacaggccattttgcaacctgtgttggcagcagaagattttactatctttaaagcaatgatggtccagaaaaacattgaaatgcagctgcaagccattcgaataattcaagagagaaatggtgtattacctgactgcttaaccgatggctctgatgtggtcagtgaccttgaacacgaagagatgaaaatcctgagggaagttcttagaaaatcaaaagaggaatatgaccaggaagaagaaaggaagaggaaaaaacagttatcagaggctaaaacagaagagcccacagtgcattccagtgaagctgcaataatgaataattcccaaggggatggtgaacattttgcacacccaccctcagaaattcaaggaagctgagcgacttgtccaagatcaccgaactcttcaatggtgaaattatgacttaccttggtcttctgacactaaatatattcttctaaaccttagtttagaagaacttctataattgagattagtgtgatgtttacccattaattttttaatgtaagttggagaacacctttctttaatatgcctaatttaagctgttttaggttcacagtaaaattgagcagaaggtacagagatttcccccatatagtccctgccctagtacatgcctagcctctcccattatcgaccccctcaaaagtagtacatttgttacgttggtgaaccttccttgacacaacattaccaaccaaagagcatagtttacattagggttcactcttgctattgtatattctgtggattttgacaaatgtatgatgacatgcattcaccattatagtatcatgtagtatacagtttcattgccctaaaaattctttgtgctctgcctattcatccttcccacctcctagcccatggcaaccactgatcttttactgtttccacagttttgccttttctagaatgtcatatagttgaaatcatacagtagtacgtagccttttcagattggcttctttcacttagtaataatccatttaagatttctccatgtcttgtcatggctttgtagctcatttctttttagtgctgaataatattccattgtctggatgtgccacggtttgtttattcatttatctgctgaagaaaatcttggttgct

SEQ ID NO: 119680 - DNA, 759 bp, Homo sapiens
  Payload ID: 3470
  Gene Symbol: CFAP36
  Gene Name: cilia and flagella associated protein 36
  ENST ID: ENST00000403007
  CDS Start-End: 72-743
gtggcccaaaggcctaaccggggtccggcggtctggcctagggatcttccccgttgcccctttggggcgggatggctgcggaagaagaagacgaggtggagtgggtagtggagagcatcgcggggttcctgcgaggcccagactggtccatccccatcttggactttgtggaacagaaatgtgaagtttttgatgatgaagaagaaagcaaattgacctatacagagattcatcaggaatacaaagaactagttgaaaagctgttagaaggttacctcaaagaaattggaattaatgaagatcaatttcaagaagcatgcacttctcctcttgcaaagacccatacatcacaggccattttgcaacctgtgttggcagcagaagattttactatctttaaagcaatgatggtccagaaaaacattgaaatgcagctgcaagccattcgaataattcaagagagaaatggtgtattacctgactgcttaaccgatggctctgatgtggtcagtgaccttgaacacgaagagatgaaaatcctgagggaagttcttagaaaatcaaaagaggaatatgaccaggaagaagaaaggaagaggaaaaaacaggtgcctacagaacatataacagaagtattttattgctgttatctcttattaagtttacacctagatcttactattaaaatttatacttatgtggaactacataattttaagtacaatgtaaatattgaccaataatattaatatatcaata

SEQ ID NO: 119681 - DNA, 2963 bp, Homo sapiens
  Payload ID: 3471
  Gene Symbol: CFAP43
  Gene Name: cilia and flagella associated protein 43
  ENST ID: ENST00000278064
  CDS Start-End: 327-2939
acgggtgtacacagcagcggcgtcgcggcccgcagccccgcggcggcggaaaggtaaccgacccgccctggggtgctgcgtgcgctgcctgctcccgcctgaggaaaacactgcccatggcgcaaggccgggagcgcgacgaaggcccccactccgccggcggcgcgtccttgtccgtgagatgggtgcaaggattccctaagcagaatgttcattttgtcaacgacaacaccatttgctacccttgtgggaattatgtaatatttattaatattgaaaccaagaaaaagactgtactgcagtgtagtaatggaattgtgggcgtcatggcaactaacatcccctgtgaagttgtggctttttctgaccggaagctaaaacctctcatctacgtatacagctttccaggattgaccagaaggaccaaattgaaaggcaacattctcctggactacactttactttcattcagttactgtggcacctacctggctagttactcctctctcccagaatttgaactggccctttggaactgggaatcgagtatcattttgtgtaagaaatcacagcctggaatggatgtgaaccaaatgtcttttaaccccatgaactggcgccagctgtgcttatcaagtccaagtacagtgagcgtgtggaccattgaaagaagtaaccaggagcattgtttcagagcaaggtcggtgaaattacctctagaagatgggtcattttttaatgaaacggatgtcgttttcccccagtcgttgccgaaagatctcatctatggtcccgtgctgccactgtcagccattgccgggctggtaggcaaagaggcagagactttccggccgaaagatgatctatatcctttgcttcacccgactatgcattgctggactccaacaagtgacttgtacattggctgtgaagagggtcatcttttaatgattaatggagacaccttgcaagtgactgtacttaataagatagaagaggaatcgccattggaagacagaagaaattttatcagtccagtaaccttggtatatcagaaggagggcgtgctggcttctggaattgatggctttgtgtattcttttattattaaagatagaagttacatgatcgaggattttcttgagattgaaagacctgtagaacatatgacattttctcccaattatacagtgttgctgattcaaacagacaagggatctgtttatatctacacttttggtaaggagccaaccttaaataaagtcctagatgcttgtgatgggaaatttcaggcaattgactttatcacacctggaacccaatacttcatgacacttacatattcaggggaaatttgtgtttggtggctggaggattgtgcttgtgtaagcaagatttatctgaataccctagcaacggttctggcttgctgtccatcctccctctctgcagccgtgggcacggaggatggctcggtctacttcatcagcgtatatgataaggaatcccctcaggtcgtgcacaaggcctttctctcggaatcgtccgtgcagcacgtcgtttatgatcagcaaggaatatttctgttagttggaacagcagaaggaaaagtctttattatcaatgccaactcctcaagctcatttcagattattggattcacagaggtggccaaagacattttacagatatccacagtgtctcttttagaaacagacatagtggaagtgatggtgctttcctcgcttccagaagcagggagaagcaggttggagatgttcacactgcctacattactgccacaagtttccacaacctttgctgatgaaagaggaaggctgaaagatgaaatcattcataagtacctgtatgagttggagcacgctctgtcctctgcagtcttgggctttcaaagtaaccaaatatatggcttctgtagtcaagtgccatacatctgtagctaccttcttcctgaagaagaacataccggtatctacattcttaaaccatacaaaaaagtacaaagcagacagtatggacctggactgctctatctgtcttcacatggattgtggctcataacaatagctaaatgtggaattctgtgtatccgagacgtttatactttggaaacatttgcttggtgtcggagtcattctcaccagggtcatgggattcagtcaatgagaatttcaatggatggacaaaacattctggtgaatgggagagatgatggcacccttgtctacctaaagtggaagcgatttggaggacacctagccagtgaaattctggactattaccagaaactattaatttccctgagcagcgccatggacaaggagaatcattatttaagcacaacaccaaaagtttccgtagatttgggatccgattctgaacacacaaaacagaaggcaagcactgacttatcacaagatgaattagttctaaccgatgttaagaaggaaattccttggatacaacaaaaaagccaagaggccatcaaaaaggaggttaatctgttttccaagaaaaggaaagagataaaacaaggaatcaaatcactttccaaaactattctgaatatgatggaagaaaatgacaaactagaaaatattgcaaaattagaccaacaggaatttggtctggatcttgaggaactagaaaggcttcatgatgaaagtcaggaagaagtggcaaagatgataaaggatgtagagatgcataacttagccaagagctatttggctgaacttatcaaagaagaatgttggaattcgatggctgtgaaaggtcgagctcttaagtgttttcatatcccctgtgtggttgaaaacttcccgatgaaagcgcgcacggttgaagagctgaaagaattggaaagagttttacagcaaaagaagattgaagcagagtgtcttaaagtactattttaaatatacatgtgtttatataagtga

SEQ ID NO: 119682 - DNA, 5365 bp, Homo sapiens
  Payload ID: 3471
  Gene Symbol: CFAP43
  Gene Name: cilia and flagella associated protein 43
  Uniprot ID: Q8NDM7
  ENST ID: ENST00000357060
  CDS Start-End: 117-5114
acgggtgtacacagcagcggcgtcgcggcccgcagccccgcggcggcggaaaggtaaccgacccgccctggggtgctgcgtgcgctgcctgctcccgcctgaggaaaacactgcccatggcgcaaggccgggagcgcgacgaaggcccccactccgccggcggcgcgtccttgtccgtgagatgggtgcaaggattccctaagcagaatgttcattttgtcaacgacaacaccatttgctacccttgtgggaattatgtaatatttattaatattgaaaccaagaaaaagactgtactgcagtgtagtaatggaattgtgggcgtcatggcaactaacatcccctgtgaagttgtggctttttctgaccggaagctaaaacctctcatctacgtatacagctttccaggattgaccagaaggaccaaattgaaaggcaacattctcctggactacactttactttcattcagttactgtggcacctacctggctagttactcctctctcccagaatttgaactggccctttggaactgggaatcgagtatcattttgtgtaagaaatcacagcctggaatggatgtgaaccaaatgtcttttaaccccatgaactggcgccagctgtgcttatcaagtccaagtacagtgagcgtgtggaccattgaaagaagtaaccaggagcattgtttcagagcaaggtcggtgaaattacctctagaagatgggtcattttttaatgaaacggatgtcgttttcccccagtcgttgccgaaagatctcatctatggtcccgtgctgccactgtcagccattgccgggctggtaggcaaagaggcagagactttccggccgaaagatgatctatatcctttgcttcacccgactatgcattgctggactccaacaagtgacttgtacattggctgtgaagagggtcatcttttaatgattaatggagacaccttgcaagtgactgtacttaataagatagaagaggaatcgccattggacagaagaaattttatcagtccagtaaccttggtatatcagaaggagggcgtgctggcttctggaattgatggctttgtgtattcttttattattaaagatagaagttacatgatcgaggattttcttgagattgaaagacctgtagaacatatgacattttctcccaattatacagtgttgctgattcaaacagacaagggatctgtttatatctacacttttggtaaggagccaaccttaaataaagtcctagatgcttgtgatgggaaatttcaggcaattgactttatcacacctggaacccaatacttcatgacacttacatattcaggggaaatttgtgtttggtggctggaggattgtgcttgtgtaagcaagatttatctgaataccctagcaacggttctggcttgctgtccatcctccctctctgcagccgtgggcacggaggatggctcggtctacttcatcagcgtatatgataaggaatcccctcaggtcgtgcacaaggcctttctctcggaatcgtccgtgcagcacgtcgtttatgatcagcaaggaatatttctgttagttggaacagcagaaggaaaagtctttattatcaatgccaactcctcaagctcatttcagattattggattcacagaggtggccaaagacattttacagatatccacagtgtctcttttagaaacagacatagtggaagtgatggtgctttcctcgcttccagaagcagggagaagcaggttggagatgttcacactgcctacattactgccacaagtttccacaacctttgctgatgaaagaggaaggctgaaagatgaaatcattcataagtacctgtatgagttggagcacgctctgtcctctgcagtcttgggctttcaaagtaaccaaatatatggcttctgtagtcaagtgccatacatctgtagctaccttcttcctgaagaagaacataccggtatctacattcttaaaccatacaaaaaagtacaaagcagacagtatggacctggactgctctatctgtcttcacatggattgtggctcataacaatagctaaatgtggaattctgtgtatccgagacgtttatactttggaaacatttgcttggtgtcggagtcattctcaccagggtcatgggattcagtcaatgagaatttcaatggatggacaaaacattctggtgaatgggagagatgatggcacccttgtctacctaaagtggaagcgatttggaggacacctagccagtgaaattctggactattaccagaaactattaatttccctgagcagcgccatggacaaggagaatcattatttaagcacaacaccaaaagtttccgtagatttgggatccgattctgaacacacaaaacagaaggcaagcactgacttatcacaagatgaattagttctaaccgatgttaagaaggaaattccttggatacaacaaaaaagccaagaggccatcaaaaaggaggttaatctgttttccaagaaaaggaaagagataaaacaaggaatcaaatcactttccaaaactattctgaatatgatggaagaaaatgacaaactagaaaatattgcaaaattagaccaacaggaatttggtctggatcttgaggaactagaaaggcttcatgatgaaagtcaggaagaagtggcaaagatgataaaggatgtagagatgcataacttagccaagagctatttggctgaacttatcaaagaagaatgttggaattcgatggctgtgaaaggtcgagctcttaagtgttttcatatcccctgtgtggttgaaaacttcccgatgaaagcgcgcacggttgaagagctgaaagaattggaaagagttttacagcaaaagaagattgaagcagagtgtcttaaactacggaaggaaattgtagaggctcagtctggagttaagttgattaaacagcgtcatgaagaggatgatgaagaagaggaagaggaagacaagacagtaaaatatagcaatttgcccaattacctgcttggtagtctgagtactgattttggggtagatacctctttattgtcaagccaattggagcttcattccagagaagagaaaatcaaccaaattatattattgaaagatatcatttacaaggtaaaaactgttttcaataatgagtttgacgctgcatataaacaaaaagagtttgaaattgcacgcgtgaaggaaagaaatgttcgaattcgagaaattattttagatctggaattggaagaagcagtctggcaaccagaatttgaagactgtgagaagccagagagaacgcttgttgtgcaagatgaggagattacagcccacaaacacattaagccgtggcacaaagccaaagaattgatcgtgaatcatgaaaaggagcactggcttctgatacaggatgccagtacaagactccgagctctgatggacatgatgggaggagttctggaagtcaagaaggaagatattttgagaatggtgattcctcaacctgctttcatggcaaaacctgatgctgtgtggactgaagaagaaagaaaacaattcaaagattatgagaaaaaagtaaaggagttaaatgaagaaagagataagtatagaaagtcattagaagcagaactgaagaaacttcaaaactctattcaagaaagcacacaggcctttgatgaacatttgaaaagactttttgaaaggagagtgaaggcagagatggttaccaaccaggaggaactgaaaataagtaaccttgcattttctttattgttggatgaagaattaagctctagagaaaaattcctgaacaactaccttacaaggaaacagcacgagaaaagccagacttcagaagctgttcggaaatctagagaagacctggatgtgtgcaaggagcactatgacaacttactggcagaagacaaagttatggatcgcagctttaaaaaggaattttctgaaattcctggtcatcaagtggatatactctacaaactttttaaacgccgaccaaggatttccaaacagaaaacgcactcagaaacaaccagcgttgtccctttcggagaactaccaggatctggcaagttgaataaggatgcctttgcccagttaatgaaagctatggatgagttggacaatattagtaacatgccagaaggcttggaccctttggtctggaatcatttctgcatgacaagacgagcaaaagtggaaaatgaacagaaagtaaagcagaaagcagctgacttattggaaatggcaactttcctccagaagagagttgaggaggaagagaaggtgcaacaggagattgagagagtgttccatgaactcatcctattacaggaagagaaagtgagattccagttgaatttgacaatccaaattcttcttaaacaaggacaagtagaactggaaaatttccagctagtactggagtattctgatgcaattctcatcaacaagaacataattgaagacttgaattctgtgattcggactcaaggacaaaagaaagttgctagcatgatggaaagtaaagatgtacacaaaagaatacttcagattgagtgggaacataagaaaatggagatggaaagggaagatctaaatcagaaggcttgggatattcagatgctatttttttcaagagatcgtcaaaagtacctaaatgaaccaaactatgaggctctgattagtattcagattggaataatggaacaaaccattgctgttttagataagatgcacaaaaagaatgtggaaaactgcaagaaactactcaaaaaacttggaaagttcagcaatcaaaaagatatagcaaattatgccctaagctgcaatctacgagaagagttggtagctgtctcagagagaaaagacatctgtaatgcaatggggtctaaactgacttgtgaaaagattgtcaaagaacggtatgaaaacatgatgcaacagcagaagttaacaaatatttcaaaacaacaagctgaacagatttcaatactacagactgaagttgaaagattaagaatgaaaacatttcctgctcttgttcaaatgtaaaaacgctggcaggaaaacacaaggccaaatcaatcatttaaaaaatcatttcatttgggtaaaatgatttccttttctttcttactgggaaattgaagtagcatgtcctctgagttgcatgttttagataaaaaattgtttaattttagccttaattgtatacaaatttttgtcctgcatgaataaatgtgtaaaataccatgaattgctgtttttattcaagaataaacaagacttgaagtcagaaagta

SEQ ID NO: 119683 - DNA, 1434 bp, Homo sapiens
  Payload ID: 3471
  Gene Symbol: CFAP43
  Gene Name: cilia and flagella associated protein 43
  ENST ID: ENST00000369719
  CDS Start-End: 305-1216
tcgcggcccgcagccccgcggcggcggaaaggtaaccgacccgccctggggtgctgcgtgcgctgcctgctcccgcctgaggaaaacactgcccatggcgcaaggccgggagcgcgacgaaggcccccactccgccggcggcgcgtccttgtccgtgagatgggtgcaaggattccctaagcagaatgttcattttgtcaacgacaacaccatttgctacccttgtgggaattatgtaatatttattaatattgaaaccaagaaaaagactgtactgcagtgtagtaatggaattgtgggcgtcatggcaactaacatcccctgtgaagttgtggctttttctgaccggaagctaaaacctctcatctacgtatacagctttccaggattgaccagaaggaccaaattgaaaggcaacattctcctggactacactttactttcattcagttactgtggcacctacctggctagttactcctctctcccagaatttgaactggccctttggaactgggaatcgagtatcattttgtgtaagaaatcacagcctggaatggatgtgaaccaaatgtcttttaaccccatgaactggcgccagctgtgcttatcaagtccaagtacagtgagcgtgtggaccattgaaagaagtaaccaggagcattgtttcagagcaaggtcggtgaaattacctctagaagatgggtcattttttaatgaaacggatgtcgttttcccccagtcgttgccgaaagatctcatctatggtcccgtgctgccactgtcagccattgccgggctggtaggcaaagaggcagagactttccggccgaaagatgatctatatcctttgcttcacccgactatgcattgctggactccaacaagtgacttgtacattggctgtgaagagggtcatcttttaatgattaatggagacaccttgcaagtgactgtacttaataagatagaagaggaatcgccattggaagacagaagaaattttatcagtccagtaaccttggtatatcagaaggagggcgtgctggcttctggaattgatggctttgtgtattcttttattattaaagatagaagttacatgatcgaggattttcttgagattgaaagacctgtagaacatatgacattttctcccaattatacagtgttgctgattcaaacagacaaggtatgttggatggtaatttcttgatatgtgattttcagatagtattattatcatcattacatgacaggaatgaggagcagagtatgctgcacagtggtactctacttgtcaagactctaggttgtaaatgaaaaaatacccaatttaaaaggcctaaattacaaagagctattggtttatttttgtgcatgtaactgaaagggcaaggagtgaatctgaataaaagagctaccatgatgcca

SEQ ID NO: 119684 - DNA, 2876 bp, Homo sapiens
  Payload ID: 3471
  Gene Symbol: CFAP43
  Gene Name: cilia and flagella associated protein 43
  ENST ID: ENST00000369720
  CDS Start-End: 270-1508
ccgacccgccctggggtgctgcgtgcgctgcctgctcccgcctgaggaaaacactgcccatggcgcaaggccgggagcgcgacgaaggcccccactccgccggcggcgcgtccttgtccgtgagatgggtgcaaggattccctaagcagaatgttcattttgtcaacgacaacaccatttgctacccttgtgggaattatgtaatatttattaatattgaaaccaagaaaaagactgtactgcagtgtagtaatggaattgtgggcgtcatggcaactaacatcccctgtgaagttgtggctttttctgaccggaagctaaaacctctcatctacgtatacagctttccaggattgaccagaaggaccaaattgaaaggcaacattctcctggactacactttactttcattcagttactgtggcacctacctggctagttactcctctctcccagaatttgaactggccctttggaactgggaatcgagtatcattttgtgtaagaaatcacagcctggaatggatgtgaaccaaatgtcttttaaccccatgaactggcgccagctgtgcttatcaagtccaagtacagtgagcgtgtggaccattgaaagaagtaaccaggagcattgtttcagagcaaggtcggtgaaattacctctagaagatgggtcattttttaatgaaacggatgtcgttttcccccagtcgttgccgaaagatctcatctatggtcccgtgctgccactgtcagccattgccgggctggtaggcaaagaggcagagactttccggccgaaagatgatctatatcctttgcttcacccgactatgcattgctggactccaacaagtgacttgtacattggctgtgaagagggtcatcttttaatgattaatggagacaccttgcaagtgactgtacttaataagatagaagaggaatcgccattggaagacagaagaaattttatcagtccagtaaccttggtatatcagaaggagggcgtgctggcttctggaattgatggctttgtgtattcttttattattaaagatagaagttacatgatcgaggattttcttgagattgaaagacctgtagaacatatgacattttctcccaattatacagtgttgctgattcaaacagacaagggatctgtttatatctacacttttggtaaggagccaaccttaaataaagtcctagatgcttgtgatgggaaatttcaggcaattgactttatcacacctggaacccaatacttcatgacacttacatattcaggggaaatttgtgtttggtggctggaggattgtgcttgtgtaagcaagatttatctgaataccctagcaacggttctggcttgctgtccatcctccctctctgcagccgtgggcacggaggatggctcggtctacttcatcagcgtatatgataaggaatcccctcaggtcgtgcacaaggcctttctctcggaatcgtccgtgcagcacgtcgtgtaagtcctttctgcctccaggagcggctccgtgtcacacccgtctgttgaaaattctagtgaagccatcctttcttttaattttaagttttacgtgtttcatttgttttgaatgttaatatattcacacagttcaacactcaaaaggtacagagggctgtgtagtaaagtaccccccatacccaggtctgtccttgcaggcagcctggtaccaatttctcatgtctctcctgagatgttttatccatgaacaagcaaaacataataagcacttctttttacttgtatcaatggccatcatgtgtgtatagtgtgccaggcacttctgctgtattaactccatgaggtaaacactcttgttgtctctatttgacaggtgaggaagataaggcacaaggattttaaataacttgctcaatagtacacagatagtgaatggcaaatgttgggatttgaacccaggtagttgggctgcagagtcactgcctttgctcttaaaaggagaaaactatgtacaatgcctcatttcttttttcacttaatcgtatatcttggagaatgttttatatccacacataaagaccagcctgattatttgtatagccacatagtattccattatatgaatatactatcattttttaaaaacggtatattaatgaacatttagagtatttcaaaacttttgaagcaatacttttaagatgataatatagagacattagatttggacttgtaggtgctatcattattactgtttctttttaatttattatattattaggtattaataagaacagacatttgtattctgctttacagcttgagatcactgtagcttgtggcatgtgatcctcaaaacaccagtcagaaaggtgttattcttatccctattagacaaattagggaattcagggttagagaggtgaggaaaagcattgtccaagattacacattacacagctagcacactgaggagctggccctgccactgtggactgcccagctccaccaccctagctcagtggggaaggatggataacctccttccatttaccccctgcctttctgcactgtcatttttttgtgcctttcctttctcagatcctcttattctaatttacatcttcccactttttctaatttgataaagttgtagacatgtttcactacattcttcctcccactgccaggtaccagacacagggtaatgaaatgtcacacccaccactaatttgagaattgcttatttgcgcttgaaacatcaagaaagctctaccgacagacatgtttcattcacttatgatgaaccaactgcccatctttactgaatcttcttgactgtatttattaaagttgcaatttggaaata

SEQ ID NO: 119685 - DNA, 3198 bp, Homo sapiens
  Payload ID: 3471
  Gene Symbol: CFAP43
  Gene Name: cilia and flagella associated protein 43
  ENST ID: ENST00000434629
  CDS Start-End: 1-2993
gacctggactgctctatctgtcttcacatggattgtggctcataacaatagctaaatgtggaattctgtgtatccgagacgtttatactttggaaacatttgcttggtgtcggagtcattctcaccagggtcatgggattcagtcaatgagaatttcaatggatggacaaaacattctggtgaatgggagagatgatggcacccttgtctacctaaagtggaagcgatttggaggacacctagccagtgaaattctggactattaccagaaactattaatttccctgagcagcgccatggacaaggagaatcattatttaagcacaacaccaaaagtttccgtagatttgggatccgattctgaacacacaaaacagaaggcaagcactgacttatcacaagatgaattagttctaaccgatgttaagaaggaaattccttggatacaacaaaaaagccaagaggccatcaaaaaggaggttaatctgttttccaagaaaaggaaagagataaaacaaggaatcaaatcactttccaaaactattctgaatatgatggaagaaaatgacaaactagaaaatattgcaaaattagaccaacaggaatttggtctggatcttgaggaactagaaaggcttcatgatgaaagtcaggaagaagtggcaaagatgataaaggatgtagagatgcataacttagccaagagctatttggctgaacttatcaaagaagaatgttggaattcgatggctgtgaaaggtcgagctcttaagtgttttcatatcccctgtgtggttgaaaacttcccgatgaaagcgcgcacggttgaagagctgaaagaattggaaagagttttacagcaaaagaagattgaagcagagtgtcttaaactacggaaggaaattgtagaggctcagtctggagttaagttgattaaacagcgtcatgaagaggatgatgaagaagaggaagaggaagacaagacagtaaaatatagcaatttgcccaattacctgcttggtagtctgagtactgattttggggtagatacctctttattgtcaagccaattggagcttcattccagagaagagaaaatcaaccaaattatattattgaaagatatcatttacaaggtaaaaactgttttcaataatgagtttgacgctgcatataaacaaaaagagtttgaaattgcacgcgtgaaggaaagaaatgttcgaattcgagaaattattttagatctggaattggaagaagcagtctggcaaccagaatttgaagactgtgagaagccagagagaacgcttgttgtgcaagatgaggagattacagcccacaaacacattaagccgtggcacaaagccaaagaattgatcgtgaatcatgaaaaggagcactggcttctgatacaggatgccagtacaagactccgagctctgatggacatgatgggaggagttctggaagtcaagaaggaagatattttgagaatggtgattcctcaacctgctttcatggcaaaacctgatgctgtgtggactgaagaagaaagaaaacaattcaaagattatgagaaaaaagtaaaggagttaaatgaagaaagagataagtatagaaagtcattagaagcagaactgaagaaacttcaaaactctattcaagaaagcacacaggcctttgatgaacatttgaaaagactttttgaaaggagagtgaaggcagagatggttaccaaccaggaggaactgaaaataagtaaccttgcattttctttattgttggatgaagaattaagctctagagaaaaattcctgaacaactaccttacaaggaaacagcacgagaaagttatggatcgcagctttaaaaaggaattttctgaaattcctggtcatcaagtggatatactctacaaactttttaaacgccgaccaaggatttccaaacagaaaacgcactcagaaacaaccagcgttgtccctttcggagaactaccaggatctggcaagttgaataaggatgcctttgcccagttaatgaaagctatggatgagttggacaatattagtaacatgccagaaggcttggaccctttggtctggaatcatttctgcatgacaagacgagcaaaagtggaaaatgaacagaaagtaaagcagaaagcagctgacttattggaaatggcaactttcctccagaagagagttgaggaggaagagaaggtgcaacaggagattgagagagtgttccatgaactcatcctattacaggaagagaaagtgagattccagttgaatttgacaatccaaattcttcttaaacaaggacaagtagaactggaaaatttccagctagtactggagtattctgatgcaattctcatcaacaagaacataattgaagacttgaattctgtgattcggactcaaggacaaaagaaagttgctagcatgatggaaagtaaagatgtacacaaaagaatacttcagattgagtgggaacataagaaaatggagatggaaagggaagatctaaatcagaaggcttgggatattcagatgctatttttttcaagagatcgtcaaaagtacctaaatgaaccaaactatgaggctctgattagtattcagattggaataatggaacaaaccattgctgttttagataagatgcacaaaaagaatgtggaaaactgcaagaaactactcaaaaaacttggaaagttcagcaatcaaaaagatatagcaaattatgccctaagctgcaatctacgagaagagttggtagctgtctcagagagaaaagacatctgtaatgcaatggggtctaaactgacttgtgaaaagattgtcaaagaacggtatgaaaacatgatgcaacagcagaagttaacaaatatttcaaaacaacaagctgaacagatttcaatactacagactgaagttgaaagattaagaatgaaaacatttcctgctcttgttcaaatgtaaaaacgctggcaggaaaacacaaggccaaatcaatcatttaaaaaatcatttcatttgggtaaaatgatttccttttctttcttactgggaaattgaagtagcatgtcctctgagttgcatgttttagataaaaaattgtttaattttagccttaattgtatacaaatttttgtcctgcatgaataaatgtgtaaaataccatgaa

SEQ ID NO: 119686 - DNA, 1794 bp, Homo sapiens
  Payload ID: 3471
  Gene Symbol: CFAP43
  Gene Name: cilia and flagella associated protein 43
  ENST ID: ENST00000457071
  CDS Start-End: 1-1544
tgtggactgaagaagaaagaaaacaattcaaagattatgagaaaaaagtaaaggagttaaatgaagaaagagataagtatagaaagtcattagaagcagaactgaagaaacttcaaaactctattcaagaaagcacacaggcctttgatgaacatttgaaaagactttttgaaaggagagtgaaggcagagatggttaccaaccaggaggaactgaaaataagtaaccttgcattttctttattgttggatgaagaattaagctctagagaaaaattcctgaacaactaccttacaaggaaacagcacgagaaaagccagacttcagaagctgttcggaaatctagagaagacctggatgtgtgcaaggagcactatgacaacttactggcagaagacaaagttatggatcgcagctttaaaaaggaattttctgaaattcctggtcatcaagtggatatactctacaaactttttaaacgccgaccaaggatttccaaacagaaaacgcactcagaaacaaccagcgttgtccctttcggagaactaccaggatctggcaagttgaataaggatgcctttgcccagttaatgaaagctatggatgagttggacaatattagtaacatgccagaaggcttggaccctttggtctggaatcatttctgcatgacaagacgagcaaaagtggaaaatgaacagaaagtaaagcagaaagcagctgacttattggaaatggcaactttcctccagaagagagttgaggaggaagagaaggtgcaacaggagattgagagagtgttccatgaactcatcctattacaggaagagaaagtgagattccagttgaatttgacaatccaaattcttcttaaacaaggacaagtagaactggaaaatttccagctagtactggagtattctgatgcaattctcatcaacaagaacataattgaagacttgaattctgtgattcggactcaaggacaaaagaaagttgctagcatgatggaaagtaaagatgtacacaaaagaatacttcagattgagtgggaacataagaaaatggagatggaaagggaagatctaaatcagaaggcttgggatattcagatgctatttttttcaagagatcgtcaaaagtacctaaatgaaccaaactatgaggctctgattagtattcagattggaataatggaacaaaccattgctgttttagataagatgcacaaaaagaatgtggaaaactgcaagaaactactcaaaaaacttggaaagttcagcaatcaaaaagatatagcaaattatgccctaagctgcaatctacgagaagagttggtagctgtctcagagagaaaagacatctgtaatgcaatggggtctaaactgacttgtgaaaagattgtcaaagaacggtatgaaaacatgatgcaacagcagaagttaacaaatatttcaaaacaacaagctgaacagatttcaatactacagactgaagttgaaagattaagaatgaaaacatttcctgctcttgttcaaatgtaaaaacgctggcaggaaaacacaaggccaaatcaatcatttaaaaaatcatttcatttgggtaaaatgatttccttttctttcttactgggaaattgaagtagcatgtcctctgagttgcatgttttagataaaaaattgtttaattttagccttaattgtatacaaatttttgtcctgcatgaataaatgtgtaaaataccatgaattgctgtttttattcaagaataaacaagacttgaagtcagaaagt

SEQ ID NO: 119687 - DNA, 3377 bp, Homo sapiens
  Payload ID: 3472
  Gene Symbol: CFAP44
  Gene Name: cilia and flagella associated protein 44
  Uniprot ID: Q96MT7
  ENST ID: ENST00000295868
  CDS Start-End: 164-3112
gggttcccggagagctggacgccggccgcgcatgcgccccacggcccgccctggttccgcctccctggaagaggggtggcgttgtctcggtaaccggagtaaacggaggcctccggcagacgctgtgaagagaggagccgcggcggtcagtaccttcgaggaaatgaaggaaccagatgatcaggatactgatggggagaaatcagttacatcaaagagtgatgggaagaagtctctgaggtcttctaaatcagaatcaagatctcctgttcaagaagataacacatttttagaagatgacacagatgaaacatttaccaaaggggaaggatcatatttagaagaagactcagatgaggaacgtttggaaggaagtttgagttcatttcagtatggtgatttgcaaagcactacagtacctcagcaaacccctgctccagctgtggaagaagcagaggaggaagttaagaagaaaatatcagagagcttcttctatgattatatggagcttgcttcgatgccttttgtgactctggattcaaacataccactggatcttctcacacttgtacattcttttggttatgactgtagaaagcgagccaacctacaacttctggacgacagtatcgccatatacatagctgggaaccaactgatctttctgaatttgaaaaccaaggaacagatctacctgcgaagtagcagtggtgaaggaattggcgtcattggggttcatccacataaaacttatttcacagtagctgaaaaagggagttttccagatattatcatctatgaatatccttctctgagaccatacagagtccttcgagatgggactgagaagggatatgcttatgtggactttaactacagcggtaacttgctggcctctgttggtagtaaccctgactacacactgactatctggaactggaaagaagaacaacccatactaaggacaaaagctttttctcaggaagtttttaaggttactttcaatcctgataaggaagagcagcttactacatcgggatcaggccacatcaagttctgggaaatggcttttacgttcaccggtctcaagctgcagggatcactaggtcgatttggcaaaacaatcactactgatatagaaggctacatggagctcccagatgggaaggtgctctcagggtcagaatggggcaacatgctgctttgggaaggtggtctgatcaaagtggagctctgtcgagggacaagcaagtcatgtcacaatggtcccattaaccagataatgctgtatgagggtgaagttatcactgttgggtcagatggatatgttaggatatgggattttgagacaatagacactgctgatgtaatagatgagactggattgttggagattgagcctattaatgaacttcaagtagacaagaatgtgaatctcttctctatgataaaaatgaatgaaactggaaataacttttggttggctcaggatgccaatggagccatatggaagcttgaccttagtttttcaaatattacccaggacccagaatgcctcttctccttccattctggagctattgaagccgtggctgtttctcctctcacttatctcatggccacaactgccttggactgctctgttcgaatctatgattttgctagcaaaactcctttggcccagatgaaattcaaacaaggaggtactgcccttgtttgggtaccccgaatggtaaacttcactggagcacaaattattgtaggatttgaagatggagttgttcgaattcttgaactttatgatccaaaagggctcacgatttttgcgggacggaagaaaattttggatgctgatattcagttgaaacaggttttcaaaccccatactgcttgtgtcactgctttagcttatgaacgtgatggggaaattctagccacagggagtaaagatcaaactgttttcttctttgaagtggaaagggattataagccgattggttatattaatactcctggacctgtgtgtcagttaatgtggtctcccatgtctcatcctgaaagtactttactaattatctgtgaaaatggctatattcttgaagctccacttccaaccataaagcaagaagaggatgatcatgatgtagtctcctatgaaatcaaagacatgtgcataaaatgtttccatttttcaagtgtcaaatctaagattctgagattaatagaaattgaaaagagggagagacaaagggagttgaaggagaaaataagggaagaaaggaggaacaagctagcagcagagatgggagaagatggagaaaaagaatttcaggaggaggaagaggagaaagaggaggaggaggaggaagaagagccattacctgaaatatttattccgtcaaccccctctcccatcctctgtggattttactcagagccagggaagttctgggtttctttgggtggctatgattctggttttctatatcactgtgagttccccccttgtgatgaaagcagtgatttcaaagaacaaaaagatgaacctattgatgtccgttatcttgcggatacagaggacaatcccatccaaactatcactttcaacattaacaaagttatgatgttttgtggaatgaaaaatggagcaattcgagtctatgtcctaaatcaaaatgatccttcattgaccagtttggtggactactggcacttcaatatgcatgacaataattatggatgtattaaaagtattgctaatagctttgatgatcgtttcttggtgactgctggagcagatggcaatatctttgttttcaacattttttctgaatttatgctaaggaaagacatgaaggccaaagttccatctcccaggtttggaattgaaacagagccaattccagaagacattgaagatcccaaagcctacagtatcgagaatgctaggagaaaaagagaacatgacaagttaatgaaagaagtgggagaaataaaggcacggaagagagagcaaatcaaagctttgaggagtgaattttgtaatctattagaaatgaatgaaaaattaccaaagcatatgcagtttaaacgaacagtaagcctaatataaacttgatttttattttaacatatgctatttctggatagagatgactattttcccaacaagtagaaacacttaaaatcatctttcttttttgtttgtttctttcaaaatttcaatagccatttattttgggcatcttttaatttgtatgtggggtttatcccttttaatcagttaagattcttgttgacacaaattgttttacatcaactgttgttatagaacacatgaaaggaatacatggggaagaaataaagtagaacccaag

SEQ ID NO: 119688 - DNA, 10259 bp, Homo sapiens
  Payload ID: 3472
  Gene Symbol: CFAP44
  Gene Name: cilia and flagella associated protein 44
  Uniprot ID: Q96MT7
  ENST ID: ENST00000393845
  CDS Start-End: 68-5632
gagtaaacggaggcctccggcagacgctgtgaagagaggagccgcggcggtcagtaccttcgaggaaatgaaggaaccagatgatcaggatactgatggggagaaatcagttacatcaaagagtgatgggaagaagtctctgaggtcttctaaatcagaatcaagatctcctgttcaagaagataacacatttttagaagatgacacagatgaaacatttaccaaaggggaaggatcatatttagaagaagactcagatgaggaacgtttggaaggaagtttgagttcatttcagtatggtgatttgcaaagcactacagtacctcagcaaacccctgctccagctgtggaagaagcagaggaggaagttaagaagaaaatatcagagagcttcttctatgattatatggagcttgcttcgatgccttttgtgactctggattcaaacataccactggatcttctcacacttgtacattcttttggttatgactgtagaaagcgagccaacctacaacttctggacgacagtatcgccatatacatagctgggaaccaactgatctttctgaatttgaaaaccaaggaacagatctacctgcgaagtagcagtggtgaaggaattggcgtcattggggttcatccacataaaacttatttcacagtagctgaaaaagggagttttccagatattatcatctatgaatatccttctctgagaccatacagagtccttcgagatgggactgagaagggatatgcttatgtggactttaactacagcggtaacttgctggcctctgttggtagtaaccctgactacacactgactatctggaactggaaagaagaacaacccatactaaggacaaaagctttttctcaggaagtttttaaggttactttcaatcctgataaggaagagcagcttactacatcgggatcaggccacatcaagttctgggaaatggcttttacgttcaccggtctcaagctgcagggatcactaggtcgatttggcaaaacaatcactactgatatagaaggctacatggagctcccagatgggaaggtgctctcagggtcagaatggggcaacatgctgctttgggaaggtggtctgatcaaagtggagctctgtcgagggacaagcaagtcatgtcacaatggtcccattaaccagataatgctgtatgagggtgaagttatcactgttgggtcagatggatatgttaggatatgggattttgagacaatagacactgctgatgtaatagatgagactggattgttggagattgagcctattaatgaacttcaagtagacaagaatgtgaatctcttctctatgataaaaatgaatgaaactggaaataacttttggttggctcaggatgccaatggagccatatggaagcttgaccttagtttttcaaatattacccaggacccagaatgcctcttctccttccattctggagctattgaagccgtggctgtttctcctctcacttatctcatggccacaactgccttggactgctctgttcgaatctatgattttgctagcaaaactcctttggcccagatgaaattcaaacaaggaggtactgcccttgtttgggtaccccgaatggtaaacttcactggagcacaaattattgtaggatttgaagatggagttgttcgaattcttgaactttatgatccaaaagggctcacgatttttgcgggacggaagaaaattttggatgctgatattcagttgaaacaggttttcaaaccccatactgcttgtgtcactgctttagcttatgaacgtgatggggaaattctagccacagggagtaaagatcaaactgttttcttctttgaagtggaaagggattataagccgattggttatattaatactcctggacctgtgtgtcagttaatgtggtctcccatgtctcatcctgaaagtactttactaattatctgtgaaaatggctatattcttgaagctccacttccaaccataaagcaagaagaggatgatcatgatgtagtctcctatgaaatcaaagacatgtgcataaaatgtttccatttttcaagtgtcaaatctaagattctgagattaatagaaattgaaaagagggagagacaaagggagttgaaggagaaaataagggaagaaaggaggaacaagctagcagcagagatgggagaagatggagaaaaagaatttcaggaggaggaagaggagaaagaggaggaggaggaggaagaagagccattacctgaaatatttattccgtcaaccccctctcccatcctctgtggattttactcagagccagggaagttctgggtttctttgggtggctatgattctggttttctatatcactgtgagttccccccttgtgatgaaagcagtgatttcaaagaacaaaaagatgaacctattgatgtccgttatcttgcggatacagaggacaatcccatccaaactatcactttcaacattaacaaagttatgatgttttgtggaatgaaaaatggagcaattcgagtctatgtcctaaatcaaaatgatccttcattgaccagtttggtggactactggcacttcaatatgcatgacaataattatggatgtattaaaagtattgctaatagctttgatgatcgtttcttggtgactgctggagcagatggcaatatctttgttttcaacattttttctgaatttatgctaaggaaagacatgaaggccaaagttccatctcccaggtttggaattgaaacagagccaattccagaagacattgaagatcccaaagcctacagtatcgagaatgctaggagaaaaagagaacatgacaagttaatgaaagaagtgggagaaataaaggcacggaagagagagcaaatcaaagctttgaggagtgaattttgtaatctattagaaatgaatgaaaaattaccaaagcatatgcagtttaaacgaacagattttgatgtagattcccaaatccgtgctgagatgcacagaaaaacagctttcaaaattcaacaagtggaaaaggaattagcttgggaaaaagagaaacatgaactcggcctaatgaagctaaagaatcgatttcgagatccactggaaagtgatactattgtggttcatgccatactgagtgaccacaagatatcctcttacaggctggtgcagccctctaagtactccaaattcaaacgagctagtcaatcagagagaaaaccaagcaaattggacaggtttgaaaaagagggacctggaagaaaggacagccagagagatgcaggtgggagtgttaccatacaagaagaatcaataatagaaaaagggaagaaatttcggcctaaaaccctaagtgaaatcatcgtggaaaatcaaattgagaaaacgagaaaacttatattaaaagctgaaagggcacaactaaagattcaacagcgaaaaaaagaatgggaggaactatacaagagtaaacctggtgatgactatgaagatcccaaagatcttcaagccatcaaagaagcccaggtgtatatgggagatttcaatctgaagacagccccagactacaagatacctgagcacatgagaataaatgctgccaagaaggaagaggaactaggacacctagattctttggtccatggaaataaaaggcacatgaacaagtgcattctctctcttagagaccttaaagtggctgttgttgaggaaatacagtgcctggtacaagaactgaagaacattcagtcgactcttcacatatccaagcacatacccattcccaaaattcctcagatacacccagaagaagttccagaaaagagatttcagtatgatgaagaaactctcctaaattttaagcaacagcaaatgaaaagtaaagatgaaaagtcccccggagtggaacagacagggtctggaggcccagttggaggattcctcaaactctcttctagaaaggatggggatttgacaacccgtgattcaatatctagatcatcaaaggcatcaacattcagcctagatataccaaagtgtttggaatttgaaaaagcagagccaacggatgtggagctggaaattatgaagagagacgagattaaacacgtgtacatgcaacagtatttggtcaacaggatcaaagaactggttgtcactttcgatgcagaactccgtctccttagacatcagaaactaaaactagatactcagatgaaattatctgacctgcaccatgtcaccttatttcaagaaatacttctcctgaagaattttgaaaaacaggagaacatacttcaagaacgtgttaattccttagacaaagaggaacagtacatgcaatggaaaataaatgaaactcttaaagagatggaagagaaaaagaatgaaatcaccaaactccaggagcaagaaaaggcactctatgctggttttcaagcagccattggagaaaacaataaatttgcaaacttcctcatgaaggtcctaaagaagaagattaaacgggtaaagaaaaaagaagttgaaggagatgctgatgaagatgaggagagtgaggaatcaagtgaagaagaatctagcttggagagtgatgaagatgagtctgaatcagaagatgaggtttttgatgattctatttgcccaacaaattgtgatgtggctctttttgagctggcccttcaccttcgagagaaaaggctggacattgaggaggctttagttgaagaaaagaaaattgttgataacctcaaaaaggaatatgatacattgtcaaaaaaagtgaaaattgtggcaactaatctgaatgcagcagaggaggccctggaggcttatcagcgagagaagcagcagcggctgaatgaactgctagttgtgattccgctcaagctccaccagatagagtatgtggtatttggagaaatacctagcgatctttctggtactttggtcttctctaaccatgccttgagacggctgcaagaacgaatccatgagctccaggaggaaaattccaagcagcaaaaacttaacaaagaatggagagagagacgtaaacagctcatccgagaaaagagagaaatgacaaaaaccatacacaaaatggaggaaacagtccggcagctcatgatcagcaagtttggccgtgtggtaaatctagaagcccttcaaacgctttctgttaatacaacacttgaagaactgaagatcagaaaacttcgaaaggagctagcaaatgcgaaagagatgaagatgtgggaggaaaagattgctcaaatgcgatgggaactgatgatgaagacaaaagaacacaccagaaagctttatcagatgaatgatttgtgtattgaaaagaagaaacttgattctcggttgaatacactacagaatcagcagggcaatgccttccagggccctcgggaagcagatgttgtggcaagagaggaggtcactgaattgatccaactccaggcggaaaggatttcggccttaaaggaggagattgctcttttgcgtaggaaaggcagtcttatcctcccacccattcagtctccacgagagaaagagatacagcccgcagacctttgagtttgctattttctcaaacccatacaagatttctgacataactcactggaagttctgtctcctcatcacctccaacaatcttattactttaaactgaactcgcctgaaagtgtaaaaccagatccagtcacgttaagtcactttaagaatctctctacaatttggttatcttagaactgactgcagcacccaacctctgttatgaaactgaatcattttagatgtttcgaacctactagattgaatatgaagtctcggaaggctgtgtttcatgattgcagcaaatcacctgtaatatattttgttttaggaaaatttgatttgggggtatcctgaatttttagcccttggcaagaaaaactatcattcagcaattcatgagaaaactttgttttcttgatccttagaaaataaacttagatgttattaagtgttctctgagaggatgcaggagaaaaggacattttgtcagctatatcttagaatagaaatgcaaatttcagttttggcattgttgacttcataaagcagtgttttgagggctcaggattcaggaaatacaaacagacatggcagagcagtttgctttgggttggcagaaagcaggaaaataaccagccttcttggattgcccacagtttttgtagactcctcagttctgagtggagcagaggggcatgcttaataaaacagtcaataaagaggcttttctttaaagatttctgcaactccgtcagaattctaagttttccccatagtttctcatgtcccctgccattttctttcaggttttacttgggccatttgctggttttgatatagatgaggagataatgaaatagatttactagagatcatctttaacaatcacctttgattatgcataacattttaaactaattgaagagtatccttttggtttgggggtaagtgctcattgaagttcatggctataaccattgcaggataatctcactgacatttggaatcctgttagtaacagagcatagctctttagattaagagctctgtattaacgagctactcattgaggctgttccaggataagctggtcactgagaagggcgggtgaagaaaggaacattgcataaatgtagaagggaactcagcaatgccaagtcttcctcacctgtgattagcctgctaatgtgccccccaaaattacagacaggtcttgctttctttgtacatcagcatattcttagaggtggccacttggcctattgtcttcctaagattccttcatattcctatttaagaggtcagaataccttattgtttgcacttgtcaccattaatttctgatgtagtcacttctctactggagagcacccacttttttttttaaatcactttctgtgttgtatatcctaagccatgtgtgcctttcaagtatttttaaaaatatgctagtcatagccctgagtgtcttatttattgcggtaaaaaattacccccaaacttagcttgaaacaacaaacttgtgatctcacccaggagtgagagggtttctgaggtccaggaatctggggacagcttggccgggtgttctggctcagggtctttcgtggagttgcagtcacactaggagctggggctgcagccatctgaagcttggctggagctggaggggctattagcaaattcactcccttggccattaggcagggcttcagttcctcgccatgtgggcctctccatagggccgcttgggatatgacttctcccagagcaagtgatccaagagtgagggagacagcaagagagaatgatgtatacaagagccacagtcttttacagcccaagctcagaagtgacatagcgtcactattgtcatatgggtcacaggctgaccctgtgtgatgtgggaggggactgaacagggtgtgaatgccaggtgggggtcaccggggccttcgtgggagctggcagccacaagaagcagctgcctggagagagtggctggtctctgagaaaggtcttgaggcgataccatccccttggtaattgtagagaatcaggagaagttacgttatcttcctgggcctcattttattatctgacaaatgaaggattggtagaatgggttccttcccattctgagattctgattctgattgcagcaagaatggacctacagtctacagaagagccacatcaggacttgctgtgcatttcaactgagaggaaagctaatcgggataattattcccaaactgagctggactaaatcactagttaattctacaatattcagggcttcattccgcatgtttgggaattgacgacagttaacactgaattactttattttgaattggacaaaatatgttgatagctttaggttcatttcaacttgattccaggcttagtcttaaatctgtagttaagttagagcatctgagtctttgggaagttaagcttcaaacacaagtagaccagcagggtgtggcatgggcagggtggctgggaagctatcctgctcctggcacacttccctgccttctgctgtgctcccagaggagcagcctcacctctgagggtaaggccaaaaatcagcctacactgagttacttgtgggtcaattgttcatataacttggctcttctgaactgtcatccatagtatcaccgatgatcaatctcagcattggaagaaaaagaaaccacagagtccagcccctctgtcacaacttcagagtaaaggagttgctcatgcctgccagccagcctgtcccaccacagcgggctccccagcttagggaggtctgtgagccatgtgctaaatttctctttagagctaaatccattgagtgctatgattccagtgctgtgcagaaagcagatgtttcacctatcacttcagaaaagttcaccagacttcattttgacagctaccttagatcatcaaggagaaaaaggaaaaaatgtaaaaaccagtggggctagaaggtgagttacagctcagattggggggcctctggatagcaaagcaatgactgagagcgtcagccctacccaccccagaagtgagctctgggccgtgatgccaggttgtctgaaatcacagtatcttattttttctcttctcttccctgctctgcttctcatttcctaacatttacctgttccttacagtccttccttttaaataatatttttaaaatactgctttcctgaaaaccatgctgcacttccacatgaagttctctctgacgttgagcttgatggaaaaaggatgcagaagtcaggaatagcaggtgctatacttattttggccagcagaggatgcacttgccctaaacagtcagagtgactcttccctaggaccctgtttatcaaattcttcatgtttaaaagccagggtctggccccccacttaacgagattgtctcaagtggcatttcatctgtaactcaattttacagaaatctagaaaatacaggctccccccaccctctccagccccaaaacacaaagcgtagtaaggctttcattgcaagcatcagtctccatctaattccacttccacatataaagattttaaaatttcaattaaaaaagaatctatggttgatcctttggttggacaacagtaagtaaatgttgattttaaactagtgagtcaactactctggcaatgttggtgtatctttggaaagaagggaagtgaatttattatgcaccatatgtccatgtgtggcacagcacttagctaaacagtattttggagaaaatatttggtcttcaacacacacctatataaaaaagattagttctatttcttcaatatgacctaaacttcatctcaagtccagttggtaagagaactatgaacctgtttttcctggtctgttgtacaacggttcccttgtggactaaacggtaatgtgttctgcatgaatccaagcacaactgacattcactgttttaaaaaacaaaaaagagaaacatttactacctttttcagatctcatttctgatggacctgaaaatattgtaagtgggtattttcttcaaatactcagagactgaattctaacatgtaaagaaaatgctgactcacacatgactcagtttgaaggttacagggaagactaaacatttatttagaagttacagtgtttgtttttacagagatatgttgccacggattattgattctggaaggttttttaatgctcatagtgctgtacacatcttggtctgttctcatgggcatcttaggaaaatgtttcccgtagcaccggatccagccatctgtgtgggtgtctccaggctgtgataccgtgccccttgctgttccctcatgctcgtgatgaaccatgtgcctgggatccttcctcttgccagcttatctgtgggcctcctgcagcctcgcctgccactgcagaggccccaggttaggagtctgtcccgcgccagcctgtgcggtgctttcctgggtgactcctgttaggtggcagcttctttattttccctctccaacctcaacgggtaggactccttatgtctctccagaattataaaacatatacatttatttacaagtgcataaatatataaatatggctataatagaaaaataaataccaattttctctgtc

SEQ ID NO: 119689 - DNA, 4411 bp, Homo sapiens
  Payload ID: 3472
  Gene Symbol: CFAP44
  Gene Name: cilia and flagella associated protein 44
  ENST ID: ENST00000465636
  CDS Start-End: 1-2974
tgctaatagctttgatgatcgtttcttggtgactgctggagcagatggcaatatctttgttttcaacattttttctgaatttatgctaaggaaagacatgaaggccaaagttccatctcccaggtttggaattgaaacagagccaattccagaagacattgaagatcccaaagcctacagtatcgagaatgctaggagaaaaagagaacatgacaagttaatgaaagaagtgggagaaataaaggcacggaagagagagcaaatcaaagctttgaggagtgaattttgtaatctattagaaatgaatgaaaaattaccaaagcatatgcagtttaaacgaacagattttgatgtagattcccaaatccgtgctgagatgcacagaaaaacagctttcaaaattcaacaagtggaaaaggaattagcttgggaaaaagagaaacatgaactcggcctaatgaagctaaagaatcgatttcgagatccactggaaagtgatactattgtggttcatgccatactgagtgaccacaagatatcctcttacaggctggtgcagccctctaagtactccaaattcaaacgagctagtcaatcagagagaaaaccaagcaaattggacaggtttgaaaaagagggacctggaagaaaggacagccagagagatgcaggtgggagtgttaccatacaagaagaatcaataatagaaaaagggaagaaatttcggcctaaaaccctaagtgaaatcatcgtggaaaatcaaattgagaaaacgagaaaacttatattaaaagctgaaagggcacaactaaagattcaacagcgaaaaaaagaatgggaggaactatacaagagtaaacctggtgatgactatgaagatcccaaagatcttcaagccatcaaagaagcccaggtgtatatgggagatttcaatctgaagacagccccagactacaagatacctgagcacatgagaataaatgctgccaagaaggaagaggaactaggacacctagattctttggtccatggaaataaaaggcacatgaacaagtgcattctctctcttagagaccttaaagtggctgttgttgaggaaatacagtgcctggtacaagaactgaagaacattcagtcgactcttcacatatccaagcacatacccattcccaaaattcctcagatacacccagaagaagttccagaaaagagatttcagtatgatgaagaaactctcctaaattttaagcaacagcaaatgaaaagtaaagatgaaaagtcccccggagtggaacagacagggtctggaggcccagttggaggattcctcaaactctcttctagaaaggatggggatttgacaacccgtgattcaatatctagatcatcaaaggcatcaacattcagcctagatataccaaagtgtttggaatttgaaaaagcagagccaacggatgtggagctggaaattatgaagagagacgagattaaacacgtgtacatgcaacagtatttggtcaacaggatcaaagaactggttgtcactttcgatgcagaactccgtctccttagacatcagaaactaaaactagatactcagatgaaattatctgacctgcaccatgtcaccttatttcaagaaatacttctcctgaagaattttgaaaaacaggagaacatacttcaagaacgtgttaattccttagacaaagaggaacagtacatgcaatggaaaataaatgaaactcttaaagagatggaagagaaaaagaatgaaatcaccaaactccaggagcaagaaaaggcactctatgctggttttcaagcagccattggagaaaacaataaatttgcaaacttcctcatgaaggtcctaaagaagaagattaaacgggtaaagaaaaaagaagttgaaggagatgctgatgaagatgaggagagtgaggaatcaagtgaagaagaatctagcttggagagtgatgaagatgagtctgaatcagaagatgaggtttttgatgattctatttgcccaacaaattgtgatgtggctctttttgagctggcccttcaccttcgagagaaaaggctggacattgaggaggctttagttgaagaaaagaaaattgttgataacctcaaaaaggaatatgatacattgtcaaaaaaagtgaaaattgtggcaactaatctgaatgcagcagaggaggccctggaggcttatcagcgagagaagcagcagcggctgaatgaactgctagttgtgattccgctcaagctccaccagatagagtatgtggtatttggagaaatacctagcgatctttctggtactttggtcttctctaaccatgccttgagacggctgcaagaacgaatccatgagctccaggaggaaaattccaagcagcaaaaacttaacaaagaatggagagagagacgtaaacagctcatccgagaaaagagagaaatgacaaaaaccatacacaaaatggaggaaacagtccggcagctcatgatcagcaagtttggccgtgtggtaaatctagaagcccttcaaacgctttctgttaatacaacacttgaagaactgaagatcagaaaacttcgaaaggagctagcaaatgcgaaagagatgaagatgtgggaggaaaagattgctcaaatgcgatgggaactgatgatgaagacaaaagaacacaccagaaagctttatcagatgaatgatttgtgtattgaaaagaagaaacttgattctcggttgaatacactacagaatcagcagggcaatgccttccagggccctcgggaagcagatgttgtggcaagagaggaggtcactgaattgatccaactccaggcggaaaggatttcggccttaaaggaggagattgctcttttgcgtaggaaaggcagtcttatcctcccacccattcagtctccacgagagaaagagatacagcccgcagacctttgagtttgctattttctcaaacccatacaagatttctgacataactcactggaagttctgtctcctcatcacctccaacaatcttattactttaaactgaactcgcctgaaagtgtaaaaccagatccagtcacgttaagtcactttaagaatctctctacaatttggttatcttagaactgactgcagcacccaacctctgttatgaaactgaatcattttagatgtttcgaacctactagattgaatatgaagtctcggaaggctgtgtttcatgattgcagcaaatcacctgtaatatattttgttttaggaaaatttgatttgggggtatcctgaatttttagcccttggcaagaaaaactatcattcagcaattcatgagaaaactttgttttcttgatccttagaaaataaacttagatgttattaagtgttctctgagaggatgcaggagaaaaggacattttgtcagctatatcttagaatagaaatgcaaatttcagttttggcattgttgacttcataaagcagtgttttgagggctcaggattcaggaaatacaaacagacatggcagagcagtttgctttgggttggcagaaagcaggaaaataaccagccttcttggattgcccacagtttttgtagactcctcagttctgagtggagcagaggggcatgcttaataaaacagtcaataaagaggcttttctttaaagatttctgcaactccgtcagaattctaagttttccccatagtttctcatgtcccctgccattttctttcaggttttacttgggccatttgctggttttgatatagatgaggagataatgaaatagatttactagagatcatctttaacaatcacctttgattatgcataacattttaaactaattgaagagtatccttttggtttgggggtaagtgctcattgaagttcatggctataaccattgcaggataatctcactgacatttggaatcctgttagtaacagagcatagctctttagattaagagctctgtattaacgagctactcattgaggctgttccaggataagctggtcactgagaagggcgggtgaagaaaggaacattgcataaatgtagaagggaactcagcaatgccaagtcttcctcacctgtgattagcctgctaatgtgccccccaaaattacagacaggtcttgctttctttgtacatcagcatattcttagaggtggccacttggcctattgtcttcctaagattccttcatattcctatttaagaggtcagaataccttattgtttgcacttgtcaccattaatttctgatgtagtcacttctctactggagagcacccacttttttttttaaatcactttctgtgttgtatatcctaagccatgtgtgcctttcaagtatttttaaaaatatgctagtca

SEQ ID NO: 119690 - DNA, 5267 bp, Homo sapiens
  Payload ID: 3472
  Gene Symbol: CFAP44
  Gene Name: cilia and flagella associated protein 44
  ENST ID: ENST00000489244
  CDS Start-End: 1-169
ggtcttctctaaccatgccttgagacggctgcaagaacgaatccatgagctccaggaggaaaattccaagcagcaaaaacttaacaaagaatggagagagagacgtaaacagctcatccgagaaaagagagaaatgacaaaaaccatacacatgactgtcttcttttagaaatggaggaaacagtccggcagctcatgatcagcaagtttggccgtgtggtaaatctagaagcccttcaaacgctttctgttaatacaacacttgaagaactgaagatcagaaaacttcgaaaggagctagcaaatgcgaaagagatgaagatgtgggaggaaaagattgctcaaatgcgatgggaactgatgatgaagacaaaagaacacaccagaaagctttatcagatgaatgatttgtgtattgaaaagaagaaacttgattctcggttgaatacactacagaatcagcagggcaatgccttccagggccctcgggaagcagatgttgtggcaagagaggaggtcactgaattgatccaactccaggcggaaaggatttcggccttaaaggaggagattgctcttttgcgtaggaaaggcagtcttatcctcccacccattcagtctccacgagagaaagagatacagcccgcagacctttgagtttgctattttctcaaacccatacaagatttctgacataactcactggaagttctgtctcctcatcacctccaacaatcttattactttaaactgaactcgcctgaaagtgtaaaaccagatccagtcacgttaagtcactttaagaatctctctacaatttggttatcttagaactgactgcagcacccaacctctgttatgaaactgaatcattttagatgtttcgaacctactagattgaatatgaagtctcggaaggctgtgtttcatgattgcagcaaatcacctgtaatatattttgttttaggaaaatttgatttgggggtatcctgaatttttagcccttggcaagaaaaactatcattcagcaattcatgagaaaactttgttttcttgatccttagaaaataaacttagatgttattaagtgttctctgagaggatgcaggagaaaaggacattttgtcagctatatcttagaatagaaatgcaaatttcagttttggcattgttgacttcataaagcagtgttttgagggctcaggattcaggaaatacaaacagacatggcagagcagtttgctttgggttggcagaaagcaggaaaataaccagccttcttggattgcccacagtttttgtagactcctcagttctgagtggagcagaggggcatgcttaataaaacagtcaataaagaggcttttctttaaagatttctgcaactccgtcagaattctaagttttccccatagtttctcatgtcccctgccattttctttcaggttttacttgggccatttgctggttttgatatagatgaggagataatgaaatagatttactagagatcatctttaacaatcacctttgattatgcataacattttaaactaattgaagagtatccttttggtttgggggtaagtgctcattgaagttcatggctataaccattgcaggataatctcactgacatttggaatcctgttagtaacagagcatagctctttagattaagagctctgtattaacgagctactcattgaggctgttccaggataagctggtcactgagaagggcgggtgaagaaaggaacattgcataaatgtagaagggaactcagcaatgccaagtcttcctcacctgtgattagcctgctaatgtgccccccaaaattacagacaggtcttgctttctttgtacatcagcatattcttagaggtggccacttggcctattgtcttcctaagattccttcatattcctatttaagaggtcagaataccttattgtttgcacttgtcaccattaatttctgatgtagtcacttctctactggagagcacccacttttttttttaaatcactttctgtgttgtatatcctaagccatgtgtgcctttcaagtatttttaaaaatatgctagtcatagccctgagtgtcttatttattgcggtaaaaaattacccccaaacttagcttgaaacaacaaacttgtgatctcacccaggagtgagagggtttctgaggtccaggaatctggggacagcttggccgggtgttctggctcagggtctttcgtggagttgcagtcacactaggagctggggctgcagccatctgaagcttggctggagctggaggggctattagcaaattcactcccttggccattaggcagggcttcagttcctcgccatgtgggcctctccatagggccgcttgggatatgacttctcccagagcaagtgatccaagagtgagggagacagcaagagagaatgatgtatacaagagccacagtcttttacagcccaagctcagaagtgacatagcgtcactattgtcatatgggtcacaggctgaccctgtgtgatgtgggaggggactgaacagggtgtgaatgccaggtgggggtcaccggggccttcgtgggagctggcagccacaagaagcagctgcctggagagagtggctggtctctgagaaaggtcttgaggcgataccatccccttggtaattgtagagaatcaggagaagttacgttatcttcctgggcctcattttattatctgacaaatgaaggattggtagaatgggttccttcccattctgagattctgattctgattgcagcaagaatggacctacagtctacagaagagccacatcaggacttgctgtgcatttcaactgagaggaaagctaatcgggataattattcccaaactgagctggactaaatcactagttaattctacaatattcagggcttcattccgcatgtttgggaattgacgacagttaacactgaattactttattttgaattggacaaaatatgttgatagctttaggttcatttcaacttgattccaggcttagtcttaaatctgtagttaagttagagcatctgagtctttgggaagttaagcttcaaacacaagtagaccagcagggtgtggcatgggcagggtggctgggaagctatcctgctcctggcacacttccctgccttctgctgtgctcccagaggagcagcctcacctctgagggtaaggccaaaaatcagcctacactgagttacttgtgggtcaattgttcatataacttggctcttctgaactgtcatccatagtatcaccgatgatcaatctcagcattggaagaaaaagaaaccacagagtccagcccctctgtcacaacttcagagtaaaggagttgctcatgcctgccagccagcctgtcccaccacagcgggctccccagcttagggaggtctgtgagccatgtgctaaatttctctttagagctaaatccattgagtgctatgattccagtgctgtgcagaaagcagatgtttcacctatcacttcagaaaagttcaccagacttcattttgacagctaccttagatcatcaaggagaaaaaggaaaaaatgtaaaaaccagtggggctagaaggtgagttacagctcagattggggggcctctggatagcaaagcaatgactgagagcgtcagccctacccaccccagaagtgagctctgggccgtgatgccaggttgtctgaaatcacagtatcttattttttctcttctcttccctgctctgcttctcatttcctaacatttacctgttccttacagtccttccttttaaataatatttttaaaatactgctttcctgaaaaccatgctgcacttccacatgaagttctctctgacgttgagcttgatggaaaaaggatgcagaagtcaggaatagcaggtgctatacttattttggccagcagaggatgcacttgccctaaacagtcagagtgactcttccctaggaccctgtttatcaaattcttcatgtttaaaagccagggtctggccccccacttaacgagattgtctcaagtggcatttcatctgtaactcaattttacagaaatctagaaaatacaggctccccccaccctctccagccccaaaacacaaagcgtagtaaggctttcattgcaagcatcagtctccatctaattccacttccacatataaagattttaaaatttcaattaaaaaagaatctatggttgatcctttggttggacaacagtaagtaaatgttgattttaaactagtgagtcaactactctggcaatgttggtgtatctttggaaagaagggaagtgaatttattatgcaccatatgtccatgtgtggcacagcacttagctaaacagtattttggagaaaatatttggtcttcaacacacacctatataaaaaagattagttctatttcttcaatatgacctaaacttcatctcaagtccagttggtaagagaactatgaacctgtttttcctggtctgttgtacaacggttcccttgtggactaaacggtaatgtgttctgcatgaatccaagcacaactgacattcactgttttaaaaaacaaaaaagagaaacatttactacctttttcagatctcatttctgatggacctgaaaatattgtaagtgggtattttcttcaaatactcagagactgaattctaacatgtaaagaaaatgctgactcacacatgactcagtttgaaggttacagggaagactaaacatttatttagaagttacagtgtttgtttttacagagatatgttgccacggattattgattctggaaggttttttaatgctcatagtgctgtacacatcttggtctgttctcatgggcatcttaggaaaatgtttcccgtagcaccggatccagccatctgtgtgggtgtctccaggctgtgataccgtgccccttgctgttccctcatgctcgtgatgaaccatgtgcctgggatccttcctcttgccagcttatctgtgggcctcctgcagcctcgcctgccactgcagaggccccaggttaggagtctgtcccgcgccagcctgtgcggtgctttcctgggtgactcctgttaggtggcagcttctttattttccctctccaacctcaacgggtaggactccttatgtctctccagaattataaaacatatacatttatttacaagtgcataaatatataaatatggctataatagaaaaataaa

SEQ ID NO: 119691 - DNA, 236 bp, Homo sapiens
  Payload ID: 3472
  Gene Symbol: CFAP44
  Gene Name: cilia and flagella associated protein 44
  ENST ID: ENST00000465186
  CDS Start-End: 1-81
actgttgggtcagatggatatgttagggatgccaatggagccatatggaagcttgaccttagtttttcaaatattatctagtaagctgtctatctattctcagacccaggacccagaatgcctcttctccttccattctggagctattgaagccgtggctgtttctcctctcacttatctcatggccacaactgccttggactgctctgttcgaatctatgattttgctagcaaaa

SEQ ID NO: 119692 - DNA, 2218 bp, Homo sapiens
  Payload ID: 3472
  Gene Symbol: CFAP44
  Gene Name: cilia and flagella associated protein 44
  ENST ID: ENST00000461734
  CDS Start-End: 1-1259
tcgatgcagaactccgtctccttagacatcagaaactaaaactagatactcagatgaaattatctgacctgcaccatgtcaccttatttcaagaaatacttctcctgaagaattttgaaaaacaggagaacatacttcaagaacgtgttaattccttagacaaagaggaacagtacatgcaatggaaaataaatgaaactcttaaagagatggaagagaaaaagaatgaaatcaccaaactccaggagcaagaaaaggcactctatgctggttttcaagcagccattggagaaaacaataaatttgcaaacttcctcatgaaggtcctaaagaagaagattaaacgggtaaagaaaaaagaagttgaaggagatgctgatgaagatgaggagagtgaggaatcaagtgaagaagaatctagcttggagagtgatgaagatgagtctgaatcagaagatgaggtttttgatgattctatttgcccaacaaattgtgatgtggctctttttgagctggcccttcaccttcgagagaaaaggctggacattgaggaggctttagttgaagaaaagaaaattgttgataacctcaaaaaggaatatgatacattgtcaaaaaaagtgaaaattgtggcaactaatctgaatgcagcagaggaggccctggaggcttatcagcgagagaagcagcagcggctgaatgaactgctagttgtgattccgctcaagctccaccagatagagtatgtggtatttggagaaatacctagcgatctttctggtactttggtcttctctaaccatgccttgagacggctgcaagaacgaatccatgagctccaggaggaaaattccaagcagcaaaaacttaacaaagaatggagagagagacgtaaacagctcatccgagaaaagagagaaatgacaaaaaccatacacaaaatggaggaaacagtccggcagctcatgatcagcaagtttggccgtgtggtaaatctagaagcccttcaaacgctttctgttaatacaacacttgaagaactgaagatcagaaaacttcgaaaggagctagcaaatgcgaaagagatgaagatgtgggaggaaaagattgctcaaatgcgatgggaactgatgatgaagacaaaagaacacaccagaaagctttatcagatgaatgatttgtgtattgaaaagaagaaacttgattctcggttgaatacactacagaatcagcagaaccctggaaatggtctaagctaagtgttccaacagtttggtcctctgaagaagagcatcagcatcacctgggaacttgtttaaaatggcaatgccttccagggccctcgggaagcagatgttgtggcaagagaggaggtcactgaattgatccaactccaggcggaaaggatttcggccttaaaggaggagattgctcttttgcgtaggaaaggcagtcttatcctcccacccattcagtctccacgagagaaagagatacagcccgcagacctttgagtttgctattttctcaaacccatacaagatttctgacataactcactggaagttctgtctcctcatcacctccaacaatcttattactttaaactgaactcgcctgaaagtgtaaaaccagatccagtcacgttaagtcactttaagaatctctctacaatttggttatcttagaactgactgcagcacccaacctctgttatgaaactgaatcattttagatgtttcgaacctactagattgaatatgaagtctcggaaggctgtgtttcatgattgcagcaaatcacctgtaatatattttgttttaggaaaatttgatttgggggtatcctgaatttttagcccttggcaagaaaaactatcattcagcaattcatgagaaaactttgttttcttgatccttagaaaataaacttagatgttattaagtgttctctgagaggatgcaggagaaaaggacattttgtcagctatatcttagaatagaaatgcaaatttcagttttggcattgttgacttcataaagcagtgttttgagggctcaggattcaggaaatacaaacagacatggcagagcagtttgctttgggttggcagaaagcaggaaaataaccagccttcttggattgcccacagtttttgtagactcctcagttctgagtggagcagaggggcatgcttaataaaacagtcaataaagag

SEQ ID NO: 119693 - DNA, 605 bp, Homo sapiens
  Payload ID: 3472
  Gene Symbol: CFAP44
  Gene Name: cilia and flagella associated protein 44
  ENST ID: ENST00000490481
  CDS Start-End: 1-358
cagtatcgagaatgctaggagaaaaagagaacatgacaagttaatgaaagaagtgggagaaataaaggcacggaagagagagcaaatcaaagctttgaggagtgaattttgtaatctattagaaatgaatgaaaaattaccaaagcatatgcagtttaaacgaacagattttgatgtagattcccaaatccgtgctgagatgcacagaaaaacagctttcaaaattcaacaagtggaaaaggaattagcttgggaaaaagagaaacatgaactcggcctaatgaagctaaagaatcggtgggagtgttaccatacaagaagaatcaataatagaaaaagggaagaaatttcggcctaaaaccctaagtgaaatcatcgtggaaaatcaaattgagaaaacgagaaaacttatattaaaagctgaaagggcacaactaaagattcaacagcgaaaaaaagaatgggaggaactatacaagagtaaacctggtgatgactatgaagatcccaaagatcttcaagccatcaaagaagcccaggtgtatatgggagatttcaatctgaagacagccccagactacaagatacctgagcacatgagaata

SEQ ID NO: 119694 - DNA, 724 bp, Homo sapiens
  Payload ID: 3472
  Gene Symbol: CFAP44
  Gene Name: cilia and flagella associated protein 44
  ENST ID: ENST00000473143
  CDS Start-End: 472-724
gggagacagtcatcatactacactctcctttgtcctttgatcgtgtagtgtaccatatctgctttaggcataccagtctatcttcagagaccaggaagatataacagtgtggcagtttaagtaaccctcatagcaggcttgtaaaaagttttttcttcattcccattacagttggggaattcatataaagtttagttagctagttatatgtcagtactgggattcaaaccctaatctaactataaatctgatccaaatagaactagtgttccattctgcttgccaggcatatcgtagaagaatgttgaggaaacatagggtgtttagtatagagaagtgaagacttagaaggaaggtgttttcaaatatatgaaaagctgcattatagacagagggcagagaaaacctgttgtgtcgctcccctctttaaaaccctttaatggttttcagttgtcaaggaaataagaggaaatgaaggaaccagatgatcaggatactgatggggagaaatcagttacatcaaagagtgatgggaagaagtctctgaggtcttctaaatcagaatcaagatctcctgttcaagaagataacacatttttagaagatgacacagatgaaacatttaccaaaggggaaggatcatatttagaagaagactcagatgaggaacgtttggaaggaagtttgagttcatttcagtatggtgatttgcaaagcactacag

SEQ ID NO: 119695 - DNA, 2410 bp, Homo sapiens
  Payload ID: 3472
  Gene Symbol: CFAP44
  Gene Name: cilia and flagella associated protein 44
  ENST ID: ENST00000488854
  CDS Start-End: 67-180
agtaaacggaggcctccggcagacgctgtgaagagaggagccgcggcggtcagtaccttcgaggaaatgaaggaaccagatgatcaggatactgatggggagaaatcagttacatcaaagagtgatgggaagaagtctctgaggtcttctaaatcagaatcaagatgttcatccacataaaacttatttcacagtagctgaaaaagggagttttccagatattatcatctatgaatatccttctctgagaccatacagagtccttcgagatgggactgagaagggatatgcttatgtggactttaactacagcggtaacttgctggcctctgttggtagtaaccctgactacacactgactatctggaactggaaagaagaacaacccatactaaggacaaaagctttttctcaggaagtttttaaggttactttcaatcctgataaggaagagcagcttactacatcgggatcaggccacatcaagttctgggaaatggcttttacgttcaccggtctcaagctgcagggatcactaggtcgatttggcaaaacaatcactactgatatagaaggctacatggagctcccagatgggaaggtgctctcagggtcagaatggggcaacatgctgctttgggaaggtggtctgatcaaagtggagctctgtcgagggacaagcaagtcatgtcacaatggtcccattaaccagataatgctgtatgagggtgaagttatcactgttgggtcagatggatatgttaggatatgggattttgagacaatagacactgctgatgtaatagatgagactggattgttggagattgagcctattaatgaacttcaagtagacaagaatgtgaatctcttctctatgataaaaatgaatgaaactggaaataacttttggttggctcaggatgccaatggagccatatggaagcttgaccttagtttttcaaatattacccaggacccagaatgcctcttctccttccattctggagctattgaagccgtggctgtttctcctctcacttatctcatggccacaactgccttggactgctctgttcgaatctatgattttgctagcaaaactcctttggcccagatgaaattcaaacaaggaggtactgcccttgtttgggtaccccgaatggtaaacttcactggagcacaaattattgtaggatttgaagatggagttgttcgaattcttgaactttatgatccaaaagggctcacgatttttgcgggacggaagaaaattttggatgctgatattcagttgaaacaggttttcaaaccccatactgcttgtgtcactgctttagcttatgaacgtgatggggaaattctagccacagggagtaaagatcaaactgttttcttctttgaagtggaaagggattataagccgattggttatattaatactcctggacctgtgtgtcagttaatgtggtctcccatgtctcatcctgaaagtactttactaattatctgtgaaaatggctatattcttgaagctccacttccaaccataaagcaagaagaggatgatcatgatgtagtctcctatgaaatcaaagacatgtgcataaaatgtttccatttttcaagtgtcaaatctaagattctgagattaatagaaattgaaaagagggagagacaaagggagttgaaggagaaaataagggaagaaaggaggaacaagctagcagcagagatgggagaagatggagaaaaagaatttcaggaggaggaagaggagaaagaggaggaggaggaggaagaagagccattacctgaaatatttattccgtcaaccccctctcccatcctctgtggattttactcagagccagggaagttctgggtttctttgtttggaattgaaacagagccaattccagaagacattgaagatcccaaagcctacagtatcgagaatgctaggagaaaaagagaacatgacaagttaatgaaagaagtgggagaaataaaggcacggaagagagagcaaatcaaagctttgaggagtgaattttgtaatctattagaaatgaatgaaaaattaccaaagcatatgcagtttaaacgaacagtaagcctaatataaacttgatttttattttaacatatgctatttctggatagagatgactattttcccaacaagtagaaacacttaaaatcatctttcttttttgtttgtttctttcaaaatttcaatagccatttattttgggcatcttttaatttgtatgtggggtttatcccttttaatcagttaagattcttgttgacacaaattgttttacatcaactgttgttatagaacacatgaaaggaatacatggggaagaaataaagtagaacccaagagttcttttaagttttc

SEQ ID NO: 119696 - DNA, 241 bp, Homo sapiens
  Payload ID: 3472
  Gene Symbol: CFAP44
  Gene Name: cilia and flagella associated protein 44
  ENST ID: ENST00000489938
  CDS Start-End: 1-31
taaatcagaatcaagatgttcatccacataaaacttatttcacagtagctgaaaaagggagttttccagatattatcatctatgaatatccttctctgagaccatacagagtccttcgaggttctgggaaatggcttttacgttcaccggtctcaagctgcagggatcactaggtcgatttggcaaaacaatcactactgatatagaaggctacatggagctcccagatgggaaggtgctc

SEQ ID NO: 119697 - DNA, 1842 bp, Homo sapiens
  Payload ID: 3473
  Gene Symbol: CFAP45
  Gene Name: cilia and flagella associated protein 45
  Uniprot ID: Q9UL16
  ENST ID: ENST00000368099
  CDS Start-End: 66-1721
cactagggccttggcggcgccgaggcggcagcagaagtccggagtcagggcgtgtggctgaggagatgccactaagcacagctggcatcctgagctcctcttctgccgcttccaacaggtcaaggaataaggctcgctatcggaccaaagccgtgagctctgaggtggatgagagcctctttggagatatcaagtccccagcccagggccagagcgacagccccattgtgctgctccgagataagcatacccttcaaaaaactctcactgctttgggcttggatcgcaagccagagaccatccagctcatcacccgggacatggtccgagaactcattgttcccacagaggatccctccggggagtccctaatcatcagccctgaggagtttgagcgaatcaaatgggcatcccatgtcctgaccagagaagaacttgaggccagggaccaggccttcaagaaggagaaggaagccaccatggatgcagtgatgacacgaaagaagatcatgaaacagaaggagatggtgtggaacaacaacaagaagctcagtgacctggaggaggtggccaaggaacgggcccagaacctcctgcagagagccaacaagctgcggatggagcaggaggaggagctcaaggacatgagcaagattatcctcaatgctaagtgccatgccatccgggatgcccaaatcctggagaagcagcagatccaaaaagaactggacacagaagagaagcggttggatcagatgatggaagtggagcggcagaaatccattcaaaggcaggaggaactggagaggaagaggagggaggaaagaattagaggaaggcggcaaattgtggaacagatggaaaagaaccaggaggagcgatcgctgcttgctgagcagcgggagcaggagaaggagcagatgctggaatatatggaacagctccaagaggaagatctaaaggacatggaacgaaggcagcaacaaaaactgaagatgcaagctgagattaagcgcatcaatgatgaaaaccagaaacagaaagcagaactgctggctcaggagaagctggcagaccagatggtgatggagtttaccaagaagaagatggctcgagaagcagagtttgaggctgagcaggagagaatccggagggagaaagagaaggagatcgcacgcttgagggccatgcaggagaaggcccaggattaccaggcagaacaggatgccttgcgggccaagcgcaaccaggaggttgcagacagagagtggcgcagaaaggaaaaggaaaatgcgcggaagaagatggaaacagaggctgagctgcgaaaaagtcggctcgaacaggtggctttcaaggagcacgctctggctgttcaggtgcaacgggaccgggatgagttcgagaggattcttcgggctcagagagaacagattgagaaggagcggctggaggaggagaaaaaggccacagggcgcttacagcatgccaatgagctccggcgccaggtgcgcgagaaccagcagaaggaagtgcagaaccggattgccacctttgaggagggccggcgcctcaaagaggaggcccagaaacgccgtgagcgcatcgatgagatcaagaggaaaaagcttgaagagctgagagccactggccttcccgagaagtactgcattgaagctgagcgcaaagctaacatcctgccagctacctctgtgaactgaggggagccttcgtggccctcaggatgccttcgggggacagattctgcccagtctctgggcatccataattgctgctaacctagacatttcatagttacagattaaatctacttgactttaa

SEQ ID NO: 119698 - DNA, 1976 bp, Homo sapiens
  Payload ID: 3473
  Gene Symbol: CFAP45
  Gene Name: cilia and flagella associated protein 45
  Uniprot ID: Q9UL16
  ENST ID: ENST00000426543
  CDS Start-End: 457-1857
gatggccaacttggtcccaattgaagaaagaggataattgcgtggatcactcagagtaaaaggcaaggggtctcgtgcatgggaatctccctttcttggtaaccaaagtctacagaaagggaagtagaaccaggccaagagtttgaagcctgaatttgccagcctgcggagactgtgcaaaagaagaactagatctcagaatggccactaagcacagctggcatcctgagctcctcttctgccgcttccaacaggtcaaggaataaggctcgctatcggaccaaagccgtgagctctgaggtggatgagagcctctttggagatatcaagtccccagcccagggccagagcgacagccccattgtgctgctccgagataagcatacccttcaaaaaactctcactgctttgggcttggatcgcaagccagagaccatccagctcatcacccgggacatggtccgagaactcattgttcccacagaggatccctccggggagtccctaatcatcagccctgaggagtttgagcgaatcaaatgggcatcccatgtcctgaccagagaagaacttgaggccagggaccaggccttcaagaaggagaaggaagccaccatggatgcagtgatgacacgaaagaagatcatgaaacagaaggagatggtgtggaacaacaacaagaagctcagtgacctggaggaggtggccaaggaacgggcccagaacctcctgcagagagccaacaagctgcggatggagcaggaggaggagctcaaggacatgagcaagattatcctcaatgctaagtgccatgccatccgggatgcccaaatcctggagaagcagcagatccaaaaagaactggacacagaagagaagcggttggatcagatgatggaagtggagcggcagaaatccattcaaaggcaggaggaactggagaggaagaggagggaggaaagaattagaggaaggcggcaaattgtggaacagatggaaaagaaccaggaggagcgatcgctgcttgctgagcagcgggagcaggagaaggagcagatgctggaatatatggaacagctccaagaggaagatctaaaggacatggaacgaaggcagcaacaaaaactgaagatgcaagctgagattaagcgcatcaatgatgaaaaccagaaacagaaagcagaactgctggctcaggagaagctggcagaccagatggtgatggagtttaccaagaagaagatggctcgagaagcagagtttgaggctgagcaggagagaatccggagggagaaagagaaggagatcgcacgcttgagggccatgcaggagaaggcccaggattaccaggcagaacaggatgccttgcgggccaagcgcaaccaggaggttgcagacagagagtggcgcagaaaggaaaaggaaaatgcgcggaagaagatggaaacagaggctgagctgcgaaaaagtcggctcgaacaggtggctttcaaggagcacgctctggctgttcaggtgcaacgggaccgggatgagttcgagaggattcttcgggctcagagagaacagattgagaaggagcggctggaggaggagaaaaaggccacagggcgcttacagcatgccaatgagctccggcgccaggtgcgcgagaaccagcagaaggaagtgcagaaccggattgccacctttgaggagggccggcgcctcaaagaggaggcccagaaacgccgtgagcgcatcgatgagatcaagaggaaaaagcttgaagagctgagagccactggccttcccgagaagtactgcattgaagctgagcgcaaagctaacatcctgccagctacctctgtgaactgaggggagccttcgtggccctcaggatgccttcgggggacagattctgcccagtctctgggcatccataattgctgctaacctagacatttcatagttacagattaaatctacttgacttt

SEQ ID NO: 119699 - DNA, 896 bp, Homo sapiens
  Payload ID: 3473
  Gene Symbol: CFAP45
  Gene Name: cilia and flagella associated protein 45
  ENST ID: ENST00000479940
  CDS Start-End: 473-896
gtgtggctgaggagatgatggccaacttggtcccaattgaagaaagaggataattgcgtggatcactcagagtaaaaggcaaggggtctcgtgcatgggaatctccctttcttggtaaccaaagtctacagaaagggaagtagaaccaggccaagagtttgaagcctgaatttgccagcctgcggagactgtgcaaaagaagaactagatctcagaatggccactaagcacagctggcatcctgagctcctcttctgccgcttccaacaggtcaaggaataaggctcgctatcggaccaaagccgtgagctctgaggtggatgagagcctctttggagatatcaagtccccagcccagggccagagcgacagccccattgtgctgctccgagataagcatacccttcaaaaaactctcactgctttgggcttggatcgcaagccagagaccatccagctcatcacccgggacatggtccgagaactcattgttcccacagaggatccctccggggagtccctaatcatcagccctgaggagtttgagcgaatcaaatgggcatcccatgtcctgaccagagaagaacttgaggccagggaccaggccttcaagaaggagaaggaagccaccatggatgcagtgatgacacgaaagaagatcatgaaacagaaggagatggtgtggaacaacaacaagaagctcagtgacctggaggaggtggccaaggaacgggcccagaacctcctgcagagagccaacaagctgcggatggagcaggaggaggagctcaaggacatgagcaagattatcctcaatgctaagtgccatgccatccgggatgcccaaatcctggagaagcagcagatccaaaaagaactggacacagaagagaagc

SEQ ID NO: 119700 - DNA, 1844 bp, Homo sapiens
  Payload ID: 3473
  Gene Symbol: CFAP45
  Gene Name: cilia and flagella associated protein 45
  ENST ID: ENST00000476696
  CDS Start-End: 28-1323
ccggagtcagggcgtgtggctgaggagatgccactaagcacagctggcatcctgagctcctcttctgccgcttccaacaggtcaaggaataaggctcgctatcggaccaaagccgtgagctctgaggtggatgagagcctctttggagatatcaagtccccagcccagggccagagcgacagccccattgtgctgctccgagataagcatacccttcaaaaaactctcactgctttgggcttggatcgcaagccagagaccatccagctcatcacccgggacatggtccgagaactcattgttcccacagaggatccctccggggagtccctaatcatcagccctgaggagtttgagcgaatcaaatgggcatcccatgtcctgaccagagaagaacttgaggccagggaccaggccttcaagaaggagaaggaagccaccatggatgcagtgatgacacgaaagaagatcatgaaacagaaggagatggtgtggaacaacaacaagaagctcagtgacctggaggaggtggccaaggaacgggcccagaacctcctgcagagagccaacaagctgcggatggagcaggaggaggagctcaaggacatgagcaagattatcctcaatgctaagtgccatgccatccgggatgcccaaatcctggagaagcagcagatccaaaaagaactggacacagaagagaagcggttggatcagatgatggaagtggagcggcagaaatccattcaaaggcaggaggaactggagaggaagaggagggaggaaagaattagaggaaggcggcaaattgtggaacagatggaaaagaaccaggaggagcgatcgctgcttgctgagcagcgggagcaggagaaggagcagatgctggaatatatggaacagctccaagaggaagatctaaaggacatggaacgaaggcagcaacaaaaactgaagatgcaagctgagattaagcgcatcaatgatgaaaaccagaaacagaaagcagaactgctggctcaggagaagctggcagaccagatggtgatggagtttaccaagaagaagatggctcgagaagcagagtttgaggctgagcaggagagaatccggagggagaaagagaaggagatcgcacgcttgagggccatgcaggagaaggcccaggattaccaggcagaacagctattttgtgccctcactggtcccctgccaacattcccaggatgccttgcgggccaagcgcaaccaggaggttgcagacagagagtggcgcagaaaggaaaaggaaaatgcgcggaagaagatggaaacagaggctgagctgcgaaaaagtcggctcgaacaggtggctttcaaggagcacgctctggctgttcaggtgcaacgggaccgggatgagttcgagaggattcttcgggctcagagagaacagattgagaaggagcggctggaggaggagaaaaaggccacagggcgcttacagcatgccaatgagctccggcgccaggtgcgcgagaaccagcagaaggaagtgcagaaccggattgccacctttgaggagggccggcgcctcaaagaggaggcccagaaacgccgtgagcgcatcgatgagatcaagaggaaaaagcttgaagagctgagagccactggccttcccgagaagtactgcattgaagctgagcgcaaagctaacatcctgccagctacctctgtgaactgaggggagccttcgtggccctcaggatgccttcgggggacagattctgcccagtctctgggcatccataattgctgctaacctagacatttcatagttacagattaaatctacttgactttaa

SEQ ID NO: 119701 - DNA, 1825 bp, Homo sapiens
  Payload ID: 3474
  Gene Symbol: CFAP46
  Gene Name: cilia and flagella associated protein 46
  Uniprot ID: Q8IYW2
  ENST ID: ENST00000368585
  CDS Start-End: 340-1557
gggcacacaggagccctgagcggggagaggaggcccgcgcggagcccccggcgtccccccacgccgccttccctcccctttcttcttcccgcccctcgccgggggtcgctgccctggtgtctcactcccgcggagctggcggggggcagggcgggggcgcggcgttgttcgccttccccgaagtgtggccccgccgccgacccgtagccccgcgtccgcgtccctttcggtctccaggcaaccgtggccgggtcctcgcggctggagaacccaaccgacagtgggcggcaggacgcaccgcggaccccggagagagcggacgagcagggcgccggcgccatggacctggtcatcacgcaggagctggcccgcgccgagagccagcaagatgctgcgtccttgaagaaggcctacgagttgatcaaatcggccaacctagggaaatcggagtttgacccctcagagagcttcagcccagacctgtttgttctgtgtgcagagcaggccctgaagatgaggcagccagaggtgagcgaggactgcatccaaatgtacttcaaggtgaaggcgcccatcacccagtttctgggccgagcgcacctgtgcagggcccagatgtgtgccccgaagtcggcagaaaacctggaggaatttgaaaattgcgtgactgagtacatgaaggccataaactttgccaaaggagaaccgaggtactactttttggtgtacaatgcatcagtcctctactggcagatggtgaggccgttcctcaagcctggatatcgtcaccatctgatccccagcctttcccaaatcataaacgtgctgagtcagactgaggaggaagacaaggagtggcgtgctgagctgatgctggaacttctggagtgttatctgcaagccggaagaaaggaggaggctgccaggttctgctccacggcagctccgttcattaagtctcacgtgccacagaaataccggcagatattctctgttatggttcgtcatgaattaatggacgaacttcagttaaaggaagaaaagaaaaattccattagcctgtcagtcactttctatattaatatgctaaaggcaaaagcggagcaaaatgatttaccaggtgacatcagtgtcattctgaggaaggcctacagacacttaggtcattacaaccaccagcgctttccctctatcagtgaagaaaaaatgcttttgctttttgaattggcgcgtttttccttgaccttgaaatgcatggagatctcctctgcctgcctctcagacctgaagaagatggaaagcaaagtaagtggcttcatgacactgctgcctggggatgaggcgctgctcaccgtgcagttggacaaaaggcaaagaaaggaagagcagttcaccaggccacggcccccagggcttcggtccgtggttggcacattgccgtctttcctacctgtgttttgcacagttgcagttagatggtgtttgcaattttacacctgcccgtttctctttacctttcttgtggccacgggtccacagcaccacagttgtttctagagtccaatttacggacggcgtaaaatttcatgatgctgatgatccagaacatcctccaccagtcccattattggacgtgtaaatcacaccggcagtgcctcgttacccgcagttcactttctgcagtttgttacctgcagacagctacagtatgaaaatattaagctattctgagggagaggccacagccacatcacttctgttacagtatagtgttatgattgtatcttattattagttattgttataaatatcttattgtgcctaa

SEQ ID NO: 119702 - DNA, 8278 bp, Homo sapiens
  Payload ID: 3474
  Gene Symbol: CFAP46
  Gene Name: cilia and flagella associated protein 46
  Uniprot ID: Q8IYW2
  ENST ID: ENST00000368586
  CDS Start-End: 102-8249
caaccgtggccgggtcctcgcggctggagaacccaaccgacagtgggcggcaggacgcaccgcggaccccggagagagcggacgagcagggcgccggcgccatggacctggtcatcacgcaggagctggcccgcgccgagagccagcaagatgctgcgtccttgaagaaggcctacgagttgatcaaatcggccaacctagggaaatcggagtttgacccctcagagagcttcagcccagacctgtttgttctgtgtgcagagcaggccctgaagatgaggcagccagaggtgagcgaggactgcatccaaatgtacttcaaggtgaaggcgcccatcacccagtttctgggccgagcgcacctgtgcagggcccagatgtgtgccccgaagtcggcagaaaacctggaggaatttgaaaattgcgtgactgagtacatgaaggccataaactttgccaaaggagaaccgaggtactactttttggtgtacaatgcatcagtcctctactggcagatggtgaggccgttcctcaagcctggatatcgtcaccatctgatccccagcctttcccaaatcataaacgtgctgagtcagactgaggaggaagacaaggagtggcgtgctgagctgatgctggaacttctggagtgttatctgcaagccggaagaaaggaggaggctgccaggttctgctccacggcagctccgttcattaagtctcacgtgccacagaaataccggcagatattctctgttatggttcgtcatgaattaatggacgaacttcagttaaaggaagaaaagaaaaattccattagcctgtcagtcactttctatattaatatgctaaaggcaaaagcggagcaaaatgatttaccaggtgacatcagtgtcattctgaggaaggcctacagacacttaggtcattacaaccaccagcgctttccctctatcagtgaagaaaaaatgcttttgctttttgaattggcgcgtttttccttgaccttgaaatgcatggagatctcctctgcctgcctctcagacctgaagaagatggaaagcaaagatcctgggaagcttattgaaatggaatgtctggagtgtgaatcggaagctttaagacttgaaagtaagatgaaagtgtacaaccgagcggctgttgaggcccagctggatatcatacagaggctagacgtcgcgctgcagcgagccgtgcgcctgggcgacccccgggtcatccacgtggtgtgcgccacgcagtggaacacctgcctgcccctgctgcagcacaacctgcggcaccacctgcggaagcccctggctggcgttgcggacgtgctggagaagctggacagcctcatgacgcttctccgctgtcaagtgcacatggagatggcgcagatcgaggaggacgaggaccggctggagcccgccacggagcacctccggaaagccgcgcgcctggacagcctgggcctctaccgggacaggatccagatggcctccacccggctgcgtctgtgcaccacgctataccaggcccctgagcgcgcagaggacaaggccatcatggccgttgagcaggcaaaaaaagctacaccaaaggacagcgtcaggaagaagcgggccctcctggtgaatgcaggcctggccttagcccctgacgcgtttcagattgtgctggacagtgagaatgaggccaaagtctccaccgggaagaacaggggccggttcacctacctctgtgcgaaggcgtggcaccacaccgtcagcgtggacaaagctgccgggcacctgcggcgcctgggcaacgaaaacgacaaggagaggatacagatttgggcagagctggccaaagtggcccggaaacaaggcgtgtgggacgtctgtcggacggcgagccgcttctgcctcctgtatgacaacgtcaaggtgaagaagttgaggctgcggcgagggaagaagaagcgaggtagggacggctcggtgcaggacacctggagccagcctgaggtcgtcctgcagaggcaggtgtgccccgacctgctgcggaagttcgcggaggtggggttcatccatgctgaggccacggttcatttgctgcggtcagaaggtgtagagctgaatgaccgggccatcccccccgaagacctgagccagcacccagctggctacgtgcctgagcccccggaggtgaatgctgagtggatcacatacagaacctggatcgagagtctgtcccggtgtgccatgaataactggctgcgctccgcagagatcggacaggagatccaggaggcgtggattgtgcagaacgccgtggtctacgtcctgaaccacaaccaccacctgatcctggccgggcggcagaaggagctggtggacgccctgtaccacctcctgagcatcgttaaggccacaggccacagtggggaccccgtgatgctggtgacgctctgcaacaccttggcgcgaggcctgatcatcagctggattccagtccaggctgccgagaagtccaggaaattcatgcgaccaaacgcgtttcacagcccactggacgcaggagccacttccgagatcaaaacagcggtggaggtctgcgagtttgccctgaacctgaccaatgggagtgcgcccgaggagacggtgcccaccggcacccggcagcagcttatcgccacctgggtcaaggccaagcagctgctgcagcagcagattgggccacggctgggcaccgaggagcagggcaccaatgaggatgtcagctcggtgaccagagtcctcgttgccttggaaatgtactcatgcaacgggctgggcctcatggacttcactgtcccctccctggcccagttggtgaaaatggcttccgagtgcaactggtcggaccccctggtggagctgcagaccctgacgcggctgacccacttcgcccatgcagcgcgtgaccatgagaccaccatggcctgtgctcacagggctctggagatgggcatcaagtacctgaagaaatttgggcccgaggagtcccggctggtggcagagatgctgtgcacagccacggccatccagggcaggagcatcatggaaaacctgaagggccggaagcagctgcgactggtggcagccaaggccttcacggagagcgccaggttcggaggcatcgcgggcagcagcgccctggtgatgctggccgcgcggcattactggaacgcctggctcccactgctgtcctcagccgtctacaggaagaaggccaagggtgccctgaagaggctcatcggcatcatcaacaagacagaggccagaaagcaggagaaaggaaagacgctgcttctgcaccagtggcccacggccgacttccagggtggcgggacgaccgaaggatattttcttccaggggctgaggacgacctggcgctccgtgctgcgctctacggcctgctcttccacagccatgccgaccaggacgactgggagggcggcctcaaggtgctggacgaggctgtgcaggtgctgccaaggacggcccaccgcctcttgatcttcaagcacatggtcatcgtgaaggccaagctcgggcagaatttttcgatggaaatacagaaattcaaggccgagagtgaggactacttggcgcgcatgtggcaccgcctggccctgaactcgccgagcgtgtctggagagctggcctgctacaacaacgccatccaggccttgcagaagcctgagatggagtggcagaaggtggagtacctcatggagttcggccagtggctccatcacagacactttcctctcgaggacgtggtcttccacctccgctgggctgtcgagatcctgctggccatgaagccgcccggcgatgtccctgagccacagcccacgccggatggggagtacgtggctgtggagatgcccccacggagccccgtgtccgaggccgaggaggcggtgtccttggagcagctgcgtagcgtgcggcagctggaggcgctggcccgcgtgcacatcctgctggccctggtgctgtcgccgggcgccgagggctacgaggactgctgccttgcagcctacgccttcttcaggcacatctggcaggtttctttgatgacagcaggaaaatcagttctggaaaacagacccctggcagcaaccagctcacatctgttattgcctaaaaaagagaaggagaatgagaggagtaaagagaaggagaaggagaggagtaaagagaaggagaatgagaggagtaaagagaaggacaaggagaagggaaaggaggagaaagtcaaggagcccaagcagtctcaaagcccagctcctatcaaacaactggaagacttacccatgagcatagaagagtgggcttcctactcctgccccgaggaagtgctgtctgtactgaaacaggacagaagtgactctactgtgaacccctcaagtatccagaagccgacatacagtttgtatttcctggaccacctggtcaaggccctgcagaagatgtgcctgcacgaactcacggttcccgtcctgcagttgggggtgctgatttcggactccgtggtgggaagcaagggcctgtcggatctctaccaccttcgcctcgcccacgcgtgctccgagctgaagctgagagaagcagccgcgcgccatgaagaggcggtcgggcaggtgtgcgtcagcgagctggagcaggccagctgcagaaaagagatcgcgttgaaaaaagagaaaaataaggagcctttattagaagaaagcctgccagcactgaatgagcagacacttcctgtccagcctggggagatcaaaccactggacgccaaggacaagattttgaagatgaatggggagaccgggagggacctggatgggacgtcctttccccacctgtggatgctgaaggcagaagttctgctggagatgaacctgtaccagcctgcacggctgctcctgtcggaggcttacctggctttccaggagctggatgagccttgtgcagaggcccagtgcctgctcctcctcgcacagttggccaacaaggagaaaaactatggacaagccaagaaaatgatcgcacaggcccagcacctgggcggaagtgaggagttctggtacaattccactctgaccctggcagaggcgctcttgtccatggaacactcaggaagggaagctacggtgtgtcacatatttcagaagctcatcaatgccttcaagatcctcaagaaagaaagaccaaaccgattgcctttactggaattcatgatcacagatctagaagccaggtgcctgagcctgcgggtcagagttgcgcagcactcagcggtcactgaacccacagagtgctcgttgctactgaaagagatggatgatggcctgttggaaattgagagaaagtttatcgactgtggctgcaaagagaattgtgttgacgtaaaactagagcgtgcgaagatcaagaggttacgtgcccagaacgagaaagatgaagaacaaaaaactgcgtattacttggaagcgtatggcctggcccagggtgccgtagctgaggaagaagggaggcttcacagcatccagggcttatatggcctggcccagggcgccatggctgaggaagaagggaggcttcacagcgtccagggcctattgtcacttcaagacttgcagaacgtcaacacgcccctgatgaggaagctggcgcgcctcaagctcggcctcgtggaaatggctctggacatgctccagttcatctgggaggaggcccacgggcagcagagtgagcaggggtccctggagaagctgctggcggactatctgcagaacaccagtgactacacttccgtcggcctgcaatggttcacgctgaagcggactctagcacacggggcactggcacagctggggagcctgcagccgctgagcgtgggctgtgtggagatccgcgcccggctcctgggcctggccgggagggccctgcacctgctggccatgcaagctgaccctgtgcaccctacctgctactgggaggcgggcccctcggtgggcgccaagctgagcggcctcaagtctctggagctggaggtagaggaagagggtgccacaaagtccagcagggacccgccggcctccagggcagccccggaggagcactgcaggagaggcgaggacctgaagaggaggatggttctggcccagcagtacctggctcaggcgtcagaggtgctgctgcagtgcctacaggtggcccttggcagtggcctcctggatgtcgcagcagccgccagcctggagatggtggagtgtgtcggcaccctggaccctgcaactacctgccagttcctggctctgtctcagagctgctcggcctcagagacgatgagggatgtcctgcttgcagccacagccaacaccagcagctcacagctggcggccctgctgcagctacagcaccagctccggtgccaagacaggaccaccaccagcctgggcgcccgtgtggagcagaggctggccgccgtgtccaaggcttggcaaaatctctgcgtcactgagcagcattttaacctcttgaatgagatgcctccgaccttttggatcctctttctgcacctctcaggggacaggtcccgtctgtacggcgctgcctacgagaaacccaagttcattactgcagccaaaggaaaggtgcaggcggtgggaggctcctgcaaggtgatgcgtctggccataagtcccactgccttctcccacctgctggcctgtgcccagcagttccggaagcagacccaggcccaggtgtacagtgaggacatggccctgaacataggctcggaaccagaaggcctgcaggtggaagagaaggagcgccctgtgcagaggctcagtagcgtcctggggcccctggaggagcttctgcagccgctattccccctgctcagcctctccaaggccagagtgcagacacctgcggttgttgccgattcagggaagtcgaagggcaaagacaaggagaggaaaacgtccacaggacaacacagcacagtccagcctgaggttgccgataagatagtcctggtcgcagacagacatctcctggagctgccactggaaggtctctctgtgttcgatgaagggacaatttcctctgtgtcacgagaattttctcttcaaatgctgtggaatcgcctccataaagaagagacagaaggtggcgtgaaaaaggagggaagaagcagagaccccaaaaagagaagcctagcgaagaagggcaggaagggcagcatcccccggaccatcccccctgactgcatcatagtcgactcagacaacttcaagttcgtcgtggacccatacgaggaggcccagggcccagaaatgctaactcctgtctccatcacccaagacattttggaaagattccaagacacattcacgtcgcgatgggcgggacatctgggaagcaagcactttcccagccaggcccagtgggagcaggccctgggcagctgcagcggtttcttcttctatggaatggagagcttcctgtcccatatattagtggagagattggtcgccatgaacttgcaagagtgccaggtggcagtcctgctggacctggcgcggtcctaccagagcttgaagaggcacatggagagcgtggagcacaggagatctgttggccgttgggaagccaattggagaaacagtgcgtctccttcagaagatgagtggcgacgaggcggtgaaccaagacgaggcttctcagaccttgaaggacaagctgctgctgctccaaagctccgagctccttcccaccacgctcaacttggtcctgtatgggctgccgcaccaagccatcgggtagtgcaggcctggacctgcctcccatcagctgctggggccccagcacttgcctctgcccttggctctgcccctctgccaacccatccccacctcccggctcccatccccagctcccagctcgctctccccttcctgggcctctccccagcccttggtgcagcctcagccagggaccctcccccagcgacttcccgcaaggcagccgcctggacctcgagctctgcctgcctgtgtgcgccatggggtctgcgtcggggctggagctgcgtctcttcccggggccaggacaagggcggcctccccttggcggcgctggtgctgagttgcttagaccagaagactattcagaccgtgagcctgtttttgatttgagtgttccactaaacaaacaacaaaagcca

SEQ ID NO: 119703 - DNA, 610 bp, Homo sapiens
  Payload ID: 3474
  Gene Symbol: CFAP46
  Gene Name: cilia and flagella associated protein 46
  ENST ID: ENST00000448925
  CDS Start-End: 1-461
agacccaggcccaggtgtacagtgaggacatggccctgaacataggctcggaaccagaaggcctgcaggtggaagagaaggagcgccctgtgcagaggctcagtagcgtcctggggcccctggaggagcttctgcagccgctattccccctgctcagcctctccaaggccagagtgcagacacctgcggttgttgccgattcagggaagtcgaagggcaaagacaaggagaggaaaacgtccacaggacaacacagcacagtccagcctgaggttgccgataagatagtcctggtcgcagacagacatctcctggagctgccactggaaggtctctctgtgttcgatgaagggacaatttcctctgtgtcacgagaattttctcttcaaatgctgtggaatcgcctccataaagaagagacagacagtgaaaagcacgagggagcgcgcggaaggccctgacctcggctgggattcgggggtgatgacattctgtgactgagtgctggctgtgcagacgtgccccggttgtgaagcttccccgagcgctacccttgcggtacgtgcagttttctgcacttcggtatcaaataaaattaaaaataaatcga

SEQ ID NO: 119704 - DNA, 3608 bp, Homo sapiens
  Payload ID: 3475
  Gene Symbol: CFAP47
  Gene Name: cilia and flagella associated protein 47
  ENST ID: ENST00000297866
  CDS Start-End: 67-2997
ggtcgtcgacgctaatccttggccggacggatccacatctgttttctggctaccgagagggcagccatgaacacccaaaagggttccctcaccataaacgtccacagaggttccctcgccatgagcatccaaaggggttccctcgtcccccgggatatggatagctcgggtagagacatgcagctgcgggtgatcccggctgaggtgaagttcctggacacgatggccgggagggtgtaccgcctcccgattactgtgcataatatttgccgctggaaccagaaaatccgatttaaggagcccgtcaagccacagttcaaactgatgttgaccagtctggataaagaacttgcttctggccttcagatgacagctatggtggaatatcatcctgataaagacgaagacacttttgaccggctacttatttcaatagaaaataaaacaacagaaattcctctaattgggttgattccatcctgtcaattggaaattgaatcagtagttaattttggcacactggttgccaatagtaaagtatattctaaagagattactatcactaaccatggcaaagctccaggcatatttaaggcagaataccacggccaattacccatcctcatttttccaactagtggtatcgtggatgctaagtcatcaatggttattaaagtagatttctgtgcagaccagccaagaattgtagatgaagaggcaatagtgattttgcaaggtcaacctgagatgctcttgagtatcaaagctcatgtggttgagcagattattgaattattaagcatgagtagtgacagaaggctggaatgcatacactttggtcctgttttcttcggatcatcaaaaattaaacatgcacgtgtatacaataatagcccagagcccataaattgggtggccatcatacaagatgatgccgtgggagaagaattgggtacagatattcaacaaagaacagatattgctttaaataatctcacctacataagaaaaataaagaacatagatactactatcattatctcctgtcttcctaatgaagggactttacaaccttatcaaaagactgtaattacattttgtttcaccccaaagctaatggctgttggtaaaaaggatattggaccttcatacagacaggactatgctctctttttgagatttgagtccgtaggaagtaaagatggatttttgagagatgatgactataaaaccatcaaaagtgaacgatttcagaaagtggaattagcactgacaggcacaggacttcctgttttactacagtttgatccaggaccagttcttaattttaaaccttgtttcatgggtgaacgttcagaaattcagtgcatcataaaaaatcaatgcgaattacttcctgtgacgtaccactttaaaaaaactgcaaattttgaaattgatcctgaaaagggcaagattactggagggggtatggtggatgtgatgtgttcatttgttccacatcaacttggagtcttcaaagtgaagcagatgatagagattattggtttagtggcagaagaagatttgcaatctttgtcggtaaaatctttccatcacgtatatttagctttcaacagcatctgtaaagcttccaccaagaaagttgtgatgaaatttgatcctggtatattgccttcgatccgtaatcccacgggaaagtttgtggtcaaagacttggcaaaacgcaagaattatgcacctgtagcaatgcttcaatcagccatgacacgcactcacaatcatcgctcatgtgaagagccagtgaaggatatgctattagcctttcccaatgaccgagctgcaactatcaggtctaaagaccatcataaacatttcaggccaattttcacaaaagttccaagatttaactatgtgaatcatgattttgcatatactacatttgaaaaacagcaaaagaaattacatgaaaactattatgcaatgtatcttaaatatttaagaagtgtgcgcttgcagaagaaacaagcagagagggagcgcatgtattcatatgatgatacagacataggcttagagccaggatcaggtctaaagtcaccctcactctcagaagcggaaatagaagaggagctgtcttcagcagcaaattcaattagagcgaatcgattgttaaccaccaggggtatagcatctcaggaggaagagtctgtgagaagaaaggttctcaaaggacttaaatcagaaccatccactccacaagaaaaacatgattgcagcttaatgttgacaccaaagcaaattcatcaagtaattgttgggccttctgtccttaactttggtaatatttgtgtgaactctccaaatactcatctacttcatgttattaatatgctacctatgcatgttttgctccagttagatactgatttagaagaacttcagaagaccaaccaattttcatacgtgattctacctacatccagtacttatatttcaatggtatttgactctcccaccattggaaaattttggaagtctttcacctttacagtgaacaatgtacccagtggacacatcctagtggtggcagttgtccagccagtaacacttgagctatcttctaatgagctagtattgagaccacgaggcttcttcatgaaaacatgttttcgggggacagttagattgtataatcgtcagaattgttgtgctcagtttcaatggcaacccgtaaacacaggaagagggatagcattttctatttgtccagctaaaggcactgttgaagcatattcctcactggaatgtgaagtaacttggcagcagggcttcagttctccagaagaaggagaatttattcttcatgtctttcaaggaaacgcgttgaagctaaaatgtgttgcacatgtaattattttccttgaacatggtttttgttttgagggctatgaatttgttgggtatacactggtgtatatagttacctatatctagaattaactgtaaaacccaagactttcatgcaacagtactagtttttttgttagagcctctataaatatgtaatatcatcatgggagccattgaaatgaaattattttattaagagacacaaaaagtattttcagagaatatacttgatggattaaaaatgtgagtagagggaaagctgtaatatgcaattttaacctttttctggtacagtccagagggccttaaattcatgactcaatcaccaagcatgattttacatgtgtaccaaatttcccactcaatgttcttagaaatattaaagaagccaaatgctcttttactaaaccccatctatatttctaggacatgatgatactcttacatatttcagctgtggaggagtttttagcctcaagagatgagaaattcatctacttttagtgatggcaagtgacagaactcagtatggtttttcttctaagcctaaaataagctgggtcctactacttttcattatgtgtaaattagttttattttttaaaaactttctattgaagtataacatgcatatgtatatgtatatgtggagaaacatgaagtgattaaataaaatattcatttgtttgtcattc

SEQ ID NO: 119705 - DNA, 1549 bp, Homo sapiens
  Payload ID: 3475
  Gene Symbol: CFAP47
  Gene Name: cilia and flagella associated protein 47
  ENST ID: ENST00000313548
  CDS Start-End: 41-1549
tgcaacagcagaaaactgcattcttactatttacccatatatggcaattcatctggataagcaaaacattattttaaagaatgataaggatgaatatcttaagaagactagagatggtgttttgcctccctaccaggatgctaaaccaccctctcctgcttcaattaaaaagacatacaccactagcaaattcaatgatgctgaacctgcaaagggaaacttatttattggagtggaagtactgcctgaaaatttgcacttggatgaaagtgaaacatcagaggaagatcatgggtctctggaaaaggaaaaatatgaacaattcctttctcttgaggaaggaacaaaggcacactacttttttgagaaggttgtaaatgcagcacagacctggttcagtctctttggctggcctgaaggaccccattctttttctattccagagactataagaagggatgtatataaaatgcaattctactcatcaacctcgccaccccaaaagttttccagacagaatgacttttccaaatataataagaccatttatgatgtgctgctccatttgagtggaaaaatgccacctggaattaattcaagtcaatctttacctgtagataaccatgaaaaaagggtaattcaactccatttgcaacattcctcacttctggactttctcaatgctcaaggaggatgtatttcacatgtcctgccagaatttttgcttgaaccagaagattataagaggtggattgaaattatgtcttccactaatacgatgcctgtgagttcctgtacacctaagaaaaaatgttctattgttatagaaatgtctaaatttgaagcctggagtaaacgggcatggacagatgtatttctacagatatacaaggttttggttctatcccgtgtagtgccatactgcagcaataatatgccccccatatgtgtgcaaaatacaccaaaagtcaatccttgttttgcatccagcaacatatattctgattctgaaagaattttgcttagttggatgaacataaattatgagaatactcgacatgtgatatggaaaaactgtcacaaagatgttatcccttctgagagatggatagtaaattttgacaaagacctttcagatggtcttgtttttgcaacacagttgggagcctattgcccattcttgattgagtctcattttataaatatgtacacacgaccaaaaagtcctgaagagtatctgcacaattgcctgattattgtaaatactctttatgaaattgactttgacgtggaaatacaggtgtgtctgagggtgtttccaaaggagatggatgcaggagtcagtggcctgagaaaggaagatatgccctcagtgtgggttgttaccatccgattggctgtggcagtggccagaacaaagagacagaagaagggggatattcagtttgcttgtttttttgtttgtttgttcttttttatttttgtcgtgatctctttctccctttggagcaggatgcatttttttctccttctgcccttggacatctga

SEQ ID NO: 119706 - DNA, 9943 bp, Homo sapiens
  Payload ID: 3475
  Gene Symbol: CFAP47
  Gene Name: cilia and flagella associated protein 47
  ENST ID: ENST00000378653
  CDS Start-End: 67-9630
ggtcgtcgacgctaatccttggccggacggatccacatctgttttctggctaccgagagggcagccatgaacacccaaaagggttccctcaccataaacgtccacagaggttccctcgccatgagcatccaaaggggttccctcgtcccccgggatatggatagctcgggtagagacatgcagctgcgggtgatcccggctgaggtgaagttcctggacacgatggccgggagggtgtaccgcctcccgattactgtgcataatatttgccgctggaaccagaaaatccgatttaaggagcccgtcaagccacagttcaaactgatgttgaccagtctggataaagaacttgcttctggccttcagatgacagctatggtggaatatcatcctgataaagacgaagacacttttgaccggctacttatttcaatagaaaataaaacaacagaaattcctctaattgggttgattccatcctgtcaattggaaattgaatcagtagttaattttggcacactggttgccaatagtaaagtatattctaaagagattactatcactaaccatggcaaagctccaggcatatttaaggcagaataccacggccaattacccatcctcatttttccaactagtggtatcgtggatgctaagtcatcaatggttattaaagtagatttctgtgcagaccagccaagaattgtagatgaagaggcaatagtgattttgcaaggtcaacctgagatgctcttgagtatcaaagctcatgtggttgagcagattattgaattattaagcatgagtagtgacagaaggctggaatgcatacactttggtcctgttttcttcggatcatcaaaaattaaacatgcacgtgtatacaataatagcccagagcccataaattgggtggccatcatacaagatgatgccgtgggagaagaattgggtacagatattcaacaaagaacagatattgctttaaataatctcacctacataagaaaaataaagaacatagatactactatcattatctcctgtcttcctaatgaagggactttacaaccttatcaaaagactgtaattacattttgtttcaccccaaagctaatggctgttggtaaaaaggatattggaccttcatacagacaggactatgctctctttttgagatttgagtccgtaggaagtaaagatggatttttgagagatgatgactataaaaccatcaaaagtgaacgatttcagaaagtggaattagcactgacaggcacaggacttcctgttttactacagtttgatccaggaccagttcttaattttaaaccttgtttcatgggtgaacgttcagaaattcagtgcatcataaaaaatcaatgcgaattacttcctgtgacgtaccactttaaaaaaactgcaaattttgaaattgatcctgaaaagggcaagattactggagggggtatggtggatgtgatgtgttcatttgttccacatcaacttggagtcttcaaagtgaagcagatgatagagattattggtttagtggcagaagaagatttgcaatctttgtcggtaaaatctttccatcacgtatatttagctttcaacagcatctgtaaagcttccaccaagaaagttgtgatgaaatttgatcctggtatattgccttcgatccgtaatcccacgggaaagtttgtggtcaaagacttggcaaaacgcaagaattatgcacctgtagcaatgcttcaatcagccatgacacgcactcacaatcatcgctcatgtgaagagccagtgaaggatatgctattagcctttcccaatgaccgagctgcaactatcaggtctaaagaccatcataaacatttcaggccaattttcacaaaagttccaagatttaactatgtgaatcatgattttgcatatactacatttgaaaaacagcaaaagaaattacatgaaaactattatgcaatgtatcttaaatatttaagaagtgtgcgcttgcagaagaaacaagcagagagggagcgcatgtattcatatgatgatacagacataggcttagagccaggatcaggtctaaagtcaccctcactctcagaagcggaaatagaagaggagctgtcttcagcagcaaattcaattagagcgaatcgattgttaaccaccaggggtatagcatctcaggaggaagagtctgtgagaagaaaggttctcaaaggacttaaatcagaaccatccactccacaagaaaaacatgattgcagcttaatgttgacaccaaagcaaattcatcaagtaattgttgggccttctgtccttaactttggtaatatttgtgtgaactctccaaatactcatctacttcatgttattaatatgctacctatgcatgttttgctccagttagatactgatttagaagaacttcagaagaccaaccaattttcatacgtgattctacctacatccagtacttatatttcaatggtatttgactctcccaccattggaaaattttggaagtctttcacctttacagtgaacaatgtacccagtggacacatcctagtggtggcagttgtccagccagtaacacttgagctatcttctaatgagctagtattgagaccacgaggcttcttcatgaaaacatgttttcgggggacagttagattgtataatcgtcagaattgttgtgctcagtttcaatggcaacccgtaaacacaggaagagggatagcattttctatttgtccagctaaaggcactgttgaagcatattcctcactggaatgtgaagtaacttggcagcagggcttcagttctccagaagaaggagaatttattcttcatgtctttcaaggaaacgcgttgaagctaaaatgtgttgcacatcttggtcgcaccaaggttttacttttgcagccaaggatactctttagtaattgccctcaaggtttaacaacttggaggaaagccattcttcaaaatgtaggacaaaaccatgcttatttcaaggtttgtagtcagagtcttttgcctatcattaatattattccatcgcaaggaatagttccatttgggggaataactgttctcaatatctcctgtaaacccactgtggcagaaaagtttgatacaagagcaaaggtttctattcgtcatgcgaatgttatagaccttaggattggtggatctgctgaaattgctgatgtagaaatcaatcctgatgtatttaatttcagtggcgcctatattggtggtacccagattattccatttgtaataaaaaacaaaggtataacacgtgccagagtggagtttaatctaaaagactttccggatttttcaatggatcttaaagacaaatcagaagaatttaaagaccctgcagttccttatatatattctttggaattagaggaaaatacatctctggaatgtagcataacattttctcccaaagaagtgacagtagttgaattcatcattcaagttcagattaatttctttgagtcttcaaagctctacactaaatatttgtccagttctccttcgaatccaaaaacagtaccacttatccgaccatgttacgttcaagctactgcattgcaatcaccattgaacttatctagtactaagtttgtatttgaaatccctttacatgagatgaatcctaataacaaggtcacaaaaactcagaatcttgttttatataatattaccaaacaccatgtgacatggactttggatcttagtaatactggcaaacttttcaaagacggcacattcaagttcagtgtactgaatgggattctacgaccaaatgaaaagtataatgtttccataagtttctgtccaaatcgtcctgggacatacacagcagatattcctatgcttttaaattatattccagtttgctataaaatattacatcttactggggaagtaaaatcaccagagttattgtttgaccctccatttatatttttcactcctgttcctttggatataacaactgtaatggatatcaacattttacctcaaaactatttcagaaattcaactctatgtgtccagattcccacagtaaggcttcttgatggtgaagagattcaccctctttctgtgaaatttccaaaaggcagagtcatcccaggctctcacagtggaattaataataagctcacttgccacctcagtttcaagtcatctaaacctgtgtcattttttaccaatcttcttttctgtgatgacagaaaaaactggttttcacttccagttactgcaacagcagaaaactgcattcttactatttacccatatatggcaattcatctggataagcaaaacattattttaaagaatgataaggatgaatatcttaagaagactagagatggtgttttgcctccctaccaggatgctaaaccaccctctcctgcttcaattaaaaagacatacaccactagcaaattcaatgatgctgaacctgcaaagggaaacttatttattggagtggaagtactgcctgaaaatttgcacttggatgaaagtgaaacatcagaggaagatcatgggtctctggaaaaggaaaaatatgaacaattcctttctcttgaggaaggaacaaaggcacactacttttttgagaaggttgtaaatgcagcacagacctggttcagtctctttggctggcctgaaggaccccattctttttctattccagagactataagaagggatgtatataaaatgcaattctactcatcaacctcgccaccccaaaagttttccagacagaatgacttttccaaatataataagaccatttatgatgtgctgctccatttgagtggaaaaatgccacctggaattaattcaagtcaatctttacctgtagataaccatgaaaaaagggtaattcaactccatttgcaacattcctcacttctggactttctcaatgctcaaggaggatgtatttcacatgtcctgccagaatttttgcttgaaccagaagattataagaggtggattgaaattatgtcttccactaatacgatgcctgtgagttcctgtacacctaagaaaaaatgttctattgttatagaaatgtctaaatttgaagcctggagtaaacgggcatggacagatgtatttctacagatatacaaggttttggttctatcccgtgtagtgccatactgcagcaataatatgccccccatatgtgtgcaaaatacaccaaaagtcaatccttgttttgcatccagcaacatatattctgattctgaaagaattttgcttagttggatgaacataaattatgagaatactcgacatgtgatatggaaaaactgtcacaaagatgttatcccttctgagagatggatagtaaattttgacaaagacctttcagatggtcttgtttttgcaacacagttgggagcctattgcccattcttgattgagtctcattttataaatatgtacacacgaccaaaaagtcctgaagagtatctgcacaattgcctgattattgtaaatactctttatgaaattgactttgacgtggaaatacaggccacagacatctgtgacccaaatccaatcctgatgctcatgctttgtgtctacatgtatgaaagactccctacatatctccctaagaaggtggtgtcctttgaatgtactctacatgacacggtgctgaataagattctactgaaaaattccagctcgcgaaacttagtgtataatgctagaattgttggaagagatgctgctgacttctccctttcccaaaaagggaatgttgtgacaatttctccaagaaatgaaattaatgtcactctgaaattcaccagtcgctttattcgtcctgctgaagcttcactactattaatttcaaaacccaagaatgcagtaagaggaattacaatgacttttgctcttaaaggcaaagtcctcgattttaaagccattgacattataaaatgcgaaagcccatgttatcaatttcaggaagtcactgtaaatgtgaaaaaccccttccatacggctggggacttcagtgtcattttggtggaatcctcaacatttgtctcttcgccaacgaagttaactgaatccaggcaatacccgaaacatgatgatgatatgagtagcagtgggagtgacactgatcagggctgttccgattccccaaatgtcttacatacctcaattaagtccacttttatcagagagttcttctgctccatgcatactgttcacctgggagtgaaaggaacttcaagcctagagctccgctttcttccctttaacatgcacgtgcgctactgtgtcatcatcttgagcaacaaaaagattggacaattaatatatgttgcggaaggaaaaggtatgacccccttgccttccagttgccttccaatgaatacgtcttcaagtccagtttattacagcactactcgagaagaagggcctaataagaaatacccagttctgtatttgaaatgcaaaccctatcaaatcctgtatgtggaccttaaattgccaatgactaatgaagccaaggaaaaggctttggcttttgcagcacagcaacagatgtcgagtattgagtatgagcgaaggttgatcacaggcactctagagagcagtagtatccgtgtggccatcgccctcctgggactgacgaagatcgagactcttatgctctttcgtatctcaaagttgaggaagcctaagaccgtttcatacacaacagaagtgagccttccaaagtatttttatatccctgagaaaatctccattccttggattccagaacctcaagtaattaaactttcaaaagcaaaagcttcagatggatctgttccacttcctttgcaatttcttcctctccaatctggacgctacccttgtaaaattttattgaaatcaaggtatgatgtgcgtgcctattatgttgaaggtattgtgaatgaagaacaaccagaggccaaatttgagtttgaaacaccagcatttgaagcccttactcagaatattccaataaaaaatcaaacaaacgataaatggacctttcaagttactatagaaggagaatggttttatggacctgttgatttacatgttggaccagatgaaattgtggagtatcctctcacattcaaacctatttttgaatgtgtcattacgggtaaacttattctacaaaatgaagtagatggtagggagcacatctttgacataaaaggggttgggaaaaaaccttcggccttggaacacatcactgtggaatgtcaagtggggaatgtgacacaaaagcatataacattgcctcatttcacaaatactgccctaacatttaaggtaactgcagatcttccaatagtgtggggaaatccacaaattacagtatacccttataaagaaattctgtacctgattcatgtgcgcccttggaaacgtggtatattgaaaggtacaattacattttctactacaagaagatgtactacaagaaggaaacatgatgattatgaggaagacacagatcaagatcaagccctctcctgtcttgattcaataacagaacaatctagcattttggatgatgcagacacatatggtaattttaacaatttaagattctggtataatcttgagatccatagcactcctggaccacccatagagattatggaaatgacatgtattgctctggacagcacttgcattgaaatacctctctctaatccaaaagatagaggtcttcacttagaggtgcagttaacgagtgctgcccttaatggggataatgaaattatcctgagtccactacagtgcaccaaatatattgtatggtattctccagcaactacaggctacagcgatgaaagcattatttttcagcctgaaatggctgaagagttctggtatttactgaagttaactattgaattaccaaaaccaaccacaatgccagaaatacagtgcgaccttggcaagcatgtcactcagatcattcctttagttaattgtacgcatgaaaccttaaaattgcaagtaacaaacagtaatcctgaaaattttgtcctggatattaacagaaaatcacaactgatcatatctcctcactccaccacagaattacctgttctcttttatccttctgcacttggaagagctgatcatcaagcttgcatcaacttctactgtactcagtttacagaatggaaattctacttatctggagtaggactatttccccagcctctagacacggaaagaataaccacacgcattggtcttcagtcaactattgttatacctttcaaaaatcccacaatggaagatgtcctcattgatataatactgacaagtgtggaacatcccaggaatcttgtcatggatcattgctgggatagcttcatctatgagagttctgccttcagatttagttctccgagtgaaatacaaggaattgcactgcctcctaaaggaaatatagatatctcattgttatttatacctcaaattatgaaattacacaaaacaatggttattattgagatgacgaaagcaaatggaaaatattggcctattgacaattttgatgagttggatataaaatttaaaagtattgtgggaatcgacagcgaagaaatccaagcaatacactggatataccctattgttggactcccacaagcaccacctcctaaatctcccccagttgtcatacaatgtcagtccaggaagcgggcagaagagaaggtagaaatcatactgaatgctggttttttcggatttagtcttactccagatctgacagaagttttagtgattccaaaaagaaattcacataatttttgtgaggatcccaatgaaattcctaaaatacatgaattcgagtatgaaattcaatttgaatctgaagctatgaagtctaagttggaatcctgtgtagctttatatatgattgaaaaatcttatgatattatggctaaaaggataacatttatcttcaatctggtattcacaccaaagaaaccattaaggtctcacataacactgaaaatagagtgcgtaacagaagggatctggaagtttcccataatgttgatcgctactgaacctgatacggatgctgtcattgacattgaaggagttggtttatttaaggaatctgtttttgaacttaggctgaaaagtcagacaagaaatcctgagccgttcaccgcacacttcctacctggcagcgatctggagttttttgtaaaacctcaggctggagaacttcttccttttaacacaaacggaactctcatcactgtaggatttaaacctaaaatgtactgtaggaaatataaagcaacattagtaatacagacagaagaaatgtactggaagtatgagatcaatggattaactccaactaccgtgccaccaaaaaatgcaaaagccaaaattgatgctactcacaagacacatgacaacatgccagtccgtccacataattttgtccgtgaaaatactaaactcataagaacaggggtgtcttccaccatcaagggtgctcctttggtgaagaatcaataaaatttttttccaaaatatttcttggtctcaggtagaactttgatgactattatttcatcttttggaatatttctgaggaataatggtttaattataataggccttctatatttccttgtcttttaaaattcaatctgttctctgaatatattatacttcatttgtgagttatgaatgttttttggttgcgaacattggaattggttcacttttaaagtgcaggtgtatatttgtggtaaaacgaaatataatttaaatgacaacagtatttccaataacagcgttgctaataaagctaaatgtctcatgtaga

SEQ ID NO: 119707 - DNA, 2906 bp, Homo sapiens
  Payload ID: 3475
  Gene Symbol: CFAP47
  Gene Name: cilia and flagella associated protein 47
  ENST ID: ENST00000378657
  CDS Start-End: 695-2596
gtttgaaacaccagcatttgaagcccttactcagaatattccaataaaaaatcaaacaaacgataaatggacctttcaagttactatagaaggagaatggttttatggacctgttgatttacatgttggaccagatgaaattgtggagtatcctctcacattcaaacctatttttgaatgtgtcattacgggtaaacttattctacaaaatgaagtagatggtagggagcacatctttgacataaaaggggttgggaaaaaaccttcggccttggaacacatcactgtggaatgtcaagtggggaatgtgacacaaaagcatataacattgcctcatttcacaaatactgccctaacatttaaggtaactgcagatcttccaatagtgtggggaaatccacaaattacagtatacccttataaagaaattctgtacctgattcatgtgcgcccttggaaacgtggtatattgaaaggtacaattacattttctactacaagaagatgtactacaagaaggaaacatgatgattatgaggaagacacagatcaagatcaagccctctcctgtcttgattcaataacagaacaatctagcattttggatgatgcagacacatatggtaattttaacaatttaagattctggtataatcttgagatccatagcactcctggaccacccatagagattatggaaatgacatgtattgctctggacagcacttgcattgaaatacctctctctaatccaaaagatagaggtcttcacttagaggtgcagttaacgagtgctgcccttaatggggataatgaaattatcctgagtccactacagtgcaccaaatatattgtatggtattctccagcaactacaggctacagcgatgaaagcattatttttcagcctgaaatggctgaagagttctggtatttactgaagttaactattgaattaccaaaaccaaccacaatgccagaaatacagtgcgaccttggcaagcatgtcactcagatcattcctttagttaattgtacgcatgaaaccttaaaattgcaagtaacaaacagtaatcctgaaaattttgtcctggatattaacagaaaatcacaactgatcatatctcctcactccaccacagaattacctgttctcttttatccttctgcacttggaagagctgatcatcaagcttgcatcaacttctactgtactcagtttacagaatggaaattctacttatctggagtaggactatttccccagcctctagacacggaaagaataaccacacgcattggtcttcagtcaactattgttatacctttcaaaaatcccacaatggaagatgtcctcattgatataatactgacaagtgtggaacatcccaggaatcttgtcatggatcattgctgggatagcttcatctatgagagttctgccttcagatttagttctccgagtgaaatacaaggaattgcactgcctcctaaaggaaatatagatatctcattgttatttatacctcaaattatgaaattacacaaaacaatggttattattgagatgacgaaagcaaatggaaaatattggcctattgacaattttgatgagttggatataaaatttaaaagtattgtgggaatcgacagcgaagaaatccaagcaatacactggatataccctattgttggactcccacaagcaccacctcctaaatctcccccagttgtcatacaatgtcagtccaggaagcgggcagaagagaaggtagaaatcatactgaatgctggttttttcggatttagtcttactccagatctgacagaagttttagtgattccaaaaagaaattcacataatttttgtgaggatcccaatgaaattcctaaaatacatgaattcgagtatgaaattcaatttgaatctgaagctatgaagtctaagttggaatcctgtgtagctttatatatgattgaaaaatcttatgatattatggctaaaaggataacatttatcttcaatctggtattcacaccaaagaaaccattaaggtctcacataacactgaaaatagagtgcgtaacagaagggatctggaagtttcccataatgttgatcgctactgaacctgatacggatgctgtcattgacattgaaggagttggtttatttaaggaatctgtttttgaacttaggctgaaaagtcagacaagaaatcctgagccgttcaccgcacacttcctacctggcagcgatctggagttttttgtaaaacctcaggctggagaacttcttccttttaacacaaacggaactctcatcactgtaggatttaaacctaaaatgtactgtaggaaatataaagcaacattagtaatacagacagaagaaatgtactggaagtatgagatcaatggattaactccaactaccgtgccaccaaaaaatgcaaaagccaaaattgatgctactcacaagacacatgacaacatgccagtccgtccacataattttgtccgtgaaaatactaaactcataagaacaggggtgtcttccaccatcaagggtgctcctttggtgaagaatcaataaaatttttttccaaaatatttcttggtctcaggtagaactttgatgactattatttcatcttttggaatatttctgaggaataatggtttaattataataggccttctatatttccttgtcttttaaaattcaatctgttctctgaatatattatacttcatttgtgagttatgaatgttttttggttgcgaacattggaattggttcacttttaaagtgcaggtgtatatttgtggtaaaacgaaatataatttaaatgacaacagtatttccaataacagcgttgctaataaagctaaatgtctcatgt

SEQ ID NO: 119708 - DNA, 3468 bp, Homo sapiens
  Payload ID: 3475
  Gene Symbol: CFAP47
  Gene Name: cilia and flagella associated protein 47
  ENST ID: ENST00000493930
  CDS Start-End: 20-2284
ggctaccgagagggcagccatgaacacccaaaagggttccctcaccataaacgtccacagaggttccctcgccatgagcatccaaaggggttccctcgtcccccgggatatggatagctcgggtagagacatgcagctgcgggtgatcccggctgaggtgaagttcctggacacgatggccgggagggtgtaccgcctcccgattactgtgcataatatttgccgctggaaccagaaaatccgatttaaggagcccgtcaagccacagttcaaactgatgttgaccagtctggataaagaacttgcttctggccttcagatgacagctatggtggaatatcatcctgataaagacgaagacacttttgaccggctacttatttcaatagaaaataaaacaacagaaattcctctaattgggttgattccatcctgtcaattggaaattgaatcagtagttaattttggcacactggttgccaatagtaaagtatattctaaagagattactatcactaaccatggcaaagctccaggcatatttaaggcagaataccacggccaattacccatcctcatttttccaactagtggtatcgtggatgctaagtcatcaatggttattaaagtagatttctgtgcagaccagccaagaattgtagatgaagaggcaatagtgattttgcaaggtcaacctgagatgctcttgagtatcaaagctcatgtggttgagcagattattgaattattaagcatgagtagtgacagaaggctggaatgcatacactttggtcctgttttcttcggatcatcaaaaattaaacatgcacgtgtatacaataatagcccagagcccataaattgggtggccatcatacaagatgatgccgtgggagaagaattgggtacagatattcaacaaagaacagatattgctttaaataatctcacctacataagaaaaataaagaacatagatactactatcattatctcctgtcttcctaatgaagggactttacaaccttatcaaaagactgtaattacattttgtttcaccccaaagctaatggctgttggtaaaaaggatattggaccttcatacagacaggactatgctctctttttgagatttgagtccgtaggaagtaaagatggatttttgagagatgatgactataaaaccatcaaaagtgaacgatttcagaaagtggaattagcactgacaggcacaggacttcctgttttactacagtttgatccaggaccagttcttaattttaaaccttgtttcatgggtgaacgttcagaaattcagtgcatcataaaaaatcaatgcgaattacttcctgtgacgtaccactttaaaaaaactgcaaattttgaaattgatcctgaaaagggcaagattactggagggggtatggtggatgtgatgtgttcatttgttccacatcaacttggagtcttcaaagtgaagcagatgatagagattattggtttagtggcagaagaagatttgcaatctttgtcggtaaaatctttccatcacgtatatttagctttcaacagcatctgtaaagcttccaccaagaaagttgtgatgaaatttgatcctggtatattgccttcgatccgtaatcccacgggaaagtttgtggtcaaagacttggcaaaacgcaagaattatgcacctgtagcaatgcttcaatcagccatgacacgcactcacaatcatcgctcatgtgaagagccagtgaaggatatgctattagcctttcccaatgaccgagctgcaactatcaggtctaaagaccatcataaacatttcaggccaattttcacaaaagttccaagatttaactatgtgaatcatgattttgcatatactacatttgaaaaacagcaaaagaaattacatgaaaactattatgcaatgtatcttaaatatttaagaagtgtgcgcttgcagaagaaacaagcagagagggagcgcatgtattcatatgatgatacagacataggcttagagccaggatcaggtctaaagtcaccctcactctcagaagcggaaatagaagaggagctgtcttcagcagcaaattcaattagagcgaatcgattgttaaccaccaggggtatagcatctcaggaggaagagtctgtgagaagaaaggttctcaaaggacttaaatcagaaccatccactccacaagaaaaacatgattgcagcttaatgttgacaccaaagcaaattcatcaagtaattgttgttagatactgatttagaagaacttcagaagaccaaccaattttcatacgtgattctacctacatccagtacttatatttcaatggtatttgactctcccaccattggaaaattttggaagtctttcacctttacagtgaacaatgtacccagtggacacatcctagtggtggcagttgtccagccagtaacacttgagctatcttctaatgagctagtattgagaccacgaggcttcttcatgaaaacatgttttcgggggacagttagattgtataatcgtcagaattgttgtgctcagtttcaatggcaacccgtaaacacaggaagagggatagcattttctatttgtccagctaaaggcactgttgaagcatattcctcactggaatgtgaagtaacttggcagcagggcttcagttctccagaagaaggagaatttattcttcatgtctttcaaggaaacgcgttgaagctaaaatgtgttgcacatgtaattattttccttgaacatggtttttgttttgagggctatgaatttgttgggtatacactggtgtatatagttacctatatctagaattaactgtaaaacccaagactttcatgcaacagtactagtttttttgttagagcctctataaatatgtaatatcatcatgggagccattgaaatgaaattattttattaagagacacaaaaagtattttcagagaatatacttgatggattaaaaatgtgagtagagggaaagctgtaatatgcaattttaacctttttctggtacagtccagagggccttaaattcatgactcaatcaccaagcatgattttacatgtgtaccaaatttcccactcaatgttcttagaaatattaaagaagccaaatgctcttttactaaaccccatctatatttctaggacatgatgatactcttacatatttcagctgtggaggagtttttagcctcaagagatgagaaattcatctacttttagtgatggcaagtgacagaactcagtatggtttttcttctaagcctaaaataagctgggtcctactacttttcattatgtgtaaattagttttattttttaaaaactttctattgaagtataacatgcatatgtatatgtatatgtggagaaacatgaagtgattaaataaaatattcatttgtttgtcattcatata

SEQ ID NO: 119709 - DNA, 269 bp, Homo sapiens
  Payload ID: 3475
  Gene Symbol: CFAP47
  Gene Name: cilia and flagella associated protein 47
  ENST ID: ENST00000630521
  CDS Start-End: 1-269
aaattcctaaaatacatgaattcgagtatgaaattcaatttgaatctgaagctatgaagtctaagttggaatcctgtgtagctttatatatgattgaaaaatcttatgatattatggctaaaaggataacatttatcttcaatctggtattcacaccaaagaaaccattaagaaatcctgagccgttcaccgcacacttcctacctggcagcgatctggagttttttgtaaaacctcaggctggagaacttcttccttttaacacaaac

SEQ ID NO: 119710 - DNA, 2193 bp, Homo sapiens
  Payload ID: 3476
  Gene Symbol: CFAP52
  Gene Name: cilia and flagella associated protein 52
  Uniprot ID: Q8N1V2
  ENST ID: ENST00000352665
  CDS Start-End: 70-1932
gttaccataacgaccagaagacgctgcagccactagggaggagagcaaagtaatcagaacctcccaaggatggataacaaaatttcgccggaggcccaagtggcggagctggaacttgacgccgtgatcggcttcaatggacatgtgcccactggtctcaaatgccatcctgaccaggagcatatgatttatcctcttggttgcacagtcctcattcaggcaataaatactaaagagcagaacttcctacagggtcatggcaacaacgtctcctgcttggccatctccaggtctggagagtacatcgcctccggacaagtcacattcatggggttcaaggcagacatcattttgtgggattataagaacagagagctgcttgctcggctgtcccttcacaaaggcaaaattgaagctctggccttttctccaaatgatttgtacttggtatcactaggaggcccagatgacggaagtgtggtggtgtggagcatagccaagagagatgccatctgtggcagccctgcagccggcctcaatgttggcaatgccaccaatgtgatcttctccaggtgccgggatgagatgtttatgactgctggaaatgggacaattcgagtatgggaattggatcttccaaatagaaaaatctggccaactgagtgccaaacaggacagttgaaaagaatagtcatgagtattggagtggatgatgatgatagctttttctaccttggcaccacgactggagatattctaaaaatgaaccccaggactaaactgctgacagatgttgggcctgcgaaggacaaattcagtttgggagtgtcagctatcaggtgcctgaagatggggggtttgttggtgggctctggagccggactgctggtcttctgtaaaagccctggctacaaacccatcaagaagattcagttacaaggcggcatcacttctatcacacttcgaggagaaggacaccagtttctcgtaggaacagaagaatcgcacatttatcgtgtcagcttcacggatttcaaagagacgctcatagcgacttgtcactttgatgctgtcgaggatattgtctttccatttggcactgctgagctatttgcaacctgtgccaagaaggatatcagggtgtggcacacatcatccaacagggagctgctgcggatcaccgtgcccaacatgacctgccacggcatcgacttcatgagggacggcaaaagcatcatttcagcatggaacgacggtaaaatccgagccttcgccccagagacaggccgactgatgtatgtcattaacaatgctcacaggatcggcgtcaccgccatcgccaccaccagtgactgtaaaagggtcatcagtggcggtggggaaggggaggtgagggtatggcagataggctgtcagacccagaagctggaggaggccctgaaggaacacaagtcatcagtgtcctgcattagggtgaagaggaacaacgaggagtgtgtcaccgccagcaccgatgggacttgtatcatttgggaccttgtgcgtctcaggaggaatcagatgatactagccaacaccttattccagtgtgtgtgctatcaccctgaggagttccagatcatcaccagcggaacagacagaaagattgcttactgggaagtatttgatgggacagtaatcagagaattggaaggttccctgtctgggtcgataaatggcatggatatcacacaggaaggggtgcactttgtcacaggtggaaatgaccatctggtcaaagtttgggattataatgagggtgaagtgactcacgttggggtgggacacagtggcaacatcacacgcatccgcataagtccaggaaatcaatatattgttagtgtaagtgccgatggagccattttgcgatggaagtacccatatacctcctgaagctgatgagatgtctctgagccttggcgttgcacgcagtcctgttgaagactgagtttagataactccaacactagtcttcatttctcacagctctgtttttgttcttgagtcaatttttctctttttctttatagaatgcattttatattcttaaattgcatattaaaattgaagtatgttcaagaataatttgtgcagactctaattagaacttttaacattttgaataaattcttagttgttggttttctgttataa

SEQ ID NO: 119711 - DNA, 1912 bp, Homo sapiens
  Payload ID: 3476
  Gene Symbol: CFAP52
  Gene Name: cilia and flagella associated protein 52
  Uniprot ID: Q8N1V2
  ENST ID: ENST00000396219
  CDS Start-End: 70-1728
gttaccataacgaccagaagacgctgcagccactagggaggagagcaaagtaatcagaacctcccaaggatggataacaaaatttcgccggaggcccaagtggcggagctggaacttgacgccgtgatcggcttcaatgacatcattttgtgggattataagaacagagagctgcttgctcggctgtcccttcacaaaggcaaaattgaagctctggccttttctccaaatgatttgtacttggtatcactaggaggcccagatgacggaagtgtggtggtgtggagcatagccaagagagatgccatctgtggcagccctgcagccggcctcaatgttggcaatgccaccaatgtgatcttctccaggtgccgggatgagatgtttatgactgctggaaatgggacaattcgagtatgggaattggatcttccaaatagaaaaatctggccaactgagtgccaaacaggacagttgaaaagaatagtcatgagtattggagtggatgatgatgatagctttttctaccttggcaccacgactggagatattctaaaaatgaaccccaggactaaactgctgacagatgttgggcctgcgaaggacaaattcagtttgggagtgtcagctatcaggtgcctgaagatggggggtttgttggtgggctctggagccggactgctggtcttctgtaaaagccctggctacaaacccatcaagaagattcagttacaaggcggcatcacttctatcacacttcgaggagaaggacaccagtttctcgtaggaacagaagaatcgcacatttatcgtgtcagcttcacggatttcaaagagacgctcatagcgacttgtcactttgatgctgtcgaggatattgtctttccatttggcactgctgagctatttgcaacctgtgccaagaaggatatcagggtgtggcacacatcatccaacagggagctgctgcggatcaccgtgcccaacatgacctgccacggcatcgacttcatgagggacggcaaaagcatcatttcagcatggaacgacggtaaaatccgagccttcgccccagagacaggccgactgatgtatgtcattaacaatgctcacaggatcggcgtcaccgccatcgccaccaccagtgactgtaaaagggtcatcagtggcggtggggaaggggaggtgagggtatggcagataggctgtcagacccagaagctggaggaggccctgaaggaacacaagtcatcagtgtcctgcattagggtgaagaggaacaacgaggagtgtgtcaccgccagcaccgatgggacttgtatcatttgggaccttgtgcgtctcaggaggaatcagatgatactagccaacaccttattccagtgtgtgtgctatcaccctgaggagttccagatcatcaccagcggaacagacagaaagattgcttactgggaagtatttgatgggacagtaatcagagaattggaaggttccctgtctgggtcgataaatggcatggatatcacacaggaaggggtgcactttgtcacaggtggaaatgaccatctggtcaaagtttgggattataatgagggtgaagtgactcacgttggggtgggacacagtggcaacatcacacgcatccgcataagtccaggaaatcaatatattgttagtgtaagtgccgatggagccattttgcgatggaagtacccatatacctcctgaagctgatgagatgtctctgagccttggcgttgcacgcagtcctgttgaagactgagtttagataactccaacactagtcttcatttctcacagctctgtttttgttcttgagtcaatttttctctttttctttatagaatgcattttatattcttaaattgcatattaaaattgaagtatgttc

SEQ ID NO: 119712 - DNA, 2266 bp, Homo sapiens
  Payload ID: 3476
  Gene Symbol: CFAP52
  Gene Name: cilia and flagella associated protein 52
  ENST ID: ENST00000576630
  CDS Start-End: 27-155
agcaaagtaatcagaacctcccaaggatggataacaaaatttcgccggaggcccaagtggcggagctggaacttgacgccgtgatcggcttcaatggtcctgttctcctgaaactgtttttagtgaataaactaccaactcaagcaaaacaataattacattcaagcatacaaacttttctctaacatggaagcagtagtgttaccttggcagatatttggagtacgggagttgcctgtggaaagaggtgtcaccatgaaaggtcccaggctcttcagagcacctggacatgtgcccactggtctcaaatgccatcctgaccaggagcatatgatttatcctcttggttgcacagtcctcattcaggcaataaatactaaagagcagaacttcctacagggtcatggcaacaacgtctcctgcttggccatctccaggtctggagagtacatcgcctccggacaagtcacattcatggggttcaaggcagacatcattttgtgggattataagaacagagagctgcttgctcggctgtcccttcacaaaggcaaaattgaagctctggccttttctccaaatgatttgtacttggtatcactaggaggcccagatgacggaagtgtggtggtgtggagcatagccaagagagatgccatctgtggcagccctgcagccggcctcaatgttggcaatgccaccaatgtgatcttctccaggtgccgggatgagatgtttatgactgctggaaatgggacaattcgagtatgggaattggatcttccaaatagaaaaatctggccaactgagtgccaaacaggacagttgaaaagaatagtcatgagtattggagtggatgatgatgatagctttttctaccttggcaccacgactggagatattctaaaaatgaaccccaggactaaactgctgacagatgttgggcctgcgaaggacaaattcagtttgggagtgtcagctatcaggtgcctgaagatggggggtttgttggtgggctctggagccggactgctggtcttctgtaaaagccctggctacaaacccatcaagaagattcagttacaaggcggcatcacttctatcacacttcgaggagaaggacaccagtttctcgtaggaacagaagaatcgcacatttatcgtgtcagcttcacggatttcaaagagacgctcatagcgacttgtcactttgatgctgtcgaggatattgtctttccatttggcactgctgagctatttgcaacctgtgccaagaaggatatcagggtgtggcacacatcatccaacagggagctgctgcggatcaccgtgcccaacatgacctgccacggcatcgacttcatgagggacggcaaaagcatcatttcagcatggaacgacggtaaaatccgagccttcgccccagagacaggccgactgatgtatgtcattaacaatgctcacaggatcggcgtcaccgccatcgccaccaccagtgactgtaaaagggtcatcagtggcggtggggaaggggaggtgagggtatggcagataggctgtcagacccagaagctggaggaggccctgaaggaacacaagtcatcagtgtcctgcattagggtgaagaggaacaacgaggagtgtgtcaccgccagcaccgatgggacttgtatcatttgggaccttgtgcgtctcaggaggaatcagatgatactagccaacaccttattccagtgtgtgtgctatcaccctgaggagttccagatcatcaccagcggaacagacagaaagattgcttactgggaagtatttgatgggacagtaatcagagaattggaaggttccctgtctgggtcgataaatggcatggatatcacacaggaaggggtgcactttgtcacaggtggaaatgaccatctggtcaaagtttgggattataatgagggtgaagtgactcacgttggggtgggacacagtggcaacatcacacgcatccgcataagtccaggaaatcaatatattgttagtgtaagtgccgatggagccattttgcgatggaagtacccatatacctcctgaagctgatgagatgtctctgagccttggcgttgcacgcagtcctgttgaagactgagtttagataactccaacactagtcttcatttctcacagctctgtttttgttcttgagtcaatttttctctttttctttatagaatgcattttatattcttaaattgcatattaaaattgaagtatgttcaag

SEQ ID NO: 119713 - DNA, 579 bp, Homo sapiens
  Payload ID: 3476
  Gene Symbol: CFAP52
  Gene Name: cilia and flagella associated protein 52
  ENST ID: ENST00000572333
  CDS Start-End: 27-122
agcaaagtaatcagaacctcccaaggatggataacaaaatttcgccggaggcccaagtggcggagctggaacttgacgccgtgatcggcttcaatggcagacatcattttgtgggattataagaacagagagctgcttgctcggctgtcccttcacaaaggcaaaattgaagctctggccttttctccaaatgatttgtacttggtatcactaggaggcccagatgacggaagtgtggtggtgtggagcatagccaagagagatgccatctgtggcagccctgcagccggcctcaatgttggcaatgccaccaatgtgatcttctccaggtgccgggatgagatgtttatgactgctggaaatgggacaattcgagtatgggaattggatcttccaaatagaaaaatctggccaactgagtgccaaacaggacagttgaaaagaatagtcatgagtattggagtggatgatgatgatagctttttctaccttggcaccacgactggagatattctaaaaatgaaccccaggactaaactgctgacagatgttgggcctgcgaaggacaaattcagtttg

SEQ ID NO: 119714 - DNA, 541 bp, Homo sapiens
  Payload ID: 3476
  Gene Symbol: CFAP52
  Gene Name: cilia and flagella associated protein 52
  ENST ID: ENST00000574937
  CDS Start-End: 53-199
aagacgctgcagccactagggaggagagcaaagtaatcagaacctcccaaggatggataacaaaatttcgccggaggcccaagtggcggagctggaacttgacgccgtgatcggcttcaatgtgggacaattcgagtatgggaattggatcttccaaatagaaaaatctggccaactgagtgccaaacaggacagttgaaaagaatagtcatgagtattggagtggatgatgatgatagctttttctaccttggcaccacgactggagatattctaaaaatgaaccccaggactaaactgctgacagatgttgggcctgcgaaggacaaattcagtttgggagtgtcagctatcaggtgcctgaagatggggggtttgttggtgggctctggagccggactgctggtcttctgtaaaagccctggctacaaacccatcaatgtgtgtacattcccattatgatgaagataaactcaaagtaattatcaccaggaagattcagttacaaggcggcatcacttctatcacacttcgaggagaa

SEQ ID NO: 119715 - DNA, 581 bp, Homo sapiens
  Payload ID: 3476
  Gene Symbol: CFAP52
  Gene Name: cilia and flagella associated protein 52
  ENST ID: ENST00000575247
  CDS Start-End: 55-150
agaagacgctgcagccactagggaggagagcaaagtaatcagaacctcccaaggatggataacaaaatttcgccggaggcccaagtggcggagctggaacttgacgccgtgatcggcttcaatggcagacatcattttgtgggattataagaacagagagctgcttgctcggctgtcccttcacaaaggcaaaattgaagctctggccttttctccaaatgatttgtacttggtatcactaggaggcccagatgacggaagtgtggtggtgtggagcatagccaagagagatgccatctgtggcagccctgcagccggcctcaatgttggcaatgccaccaatgtgatcttctccaggtgccgggatgagatgtttatgactgctggaaaaaagaaaagaaggccaggcgttgtagcttatgcctgtaatcccagcactttgggaggctgaagcggatggatcacgaggtcaagagatggagaccatcctggccaacatgtgggacaattcgagtatgggaattggatcttccaaatagaaaaatctggccaactgagtgccaaacaggacagttgaaaag

SEQ ID NO: 119716 - DNA, 597 bp, Homo sapiens
  Payload ID: 3476
  Gene Symbol: CFAP52
  Gene Name: cilia and flagella associated protein 52
  ENST ID: ENST00000574097
  CDS Start-End: 1-280
gacccagaagctggaggaggccctgaaggaacacaagtcatcagtgtcctgcattagggtgaagaggaacaacgaggagtgtgtcaccgccagcaccgatgggacttgtatcatttgggaccttgtgcgtctcaggaggaatcagatgatactagccaacaccttattccagtgtgtgtgctatcaccctgaggagttccagatcatcaccagcggaacagacagaaaggtggaaatgaccatctggtcaaagtttgggattataatgagggtgaagtgactcacgttggggtgggacacagtggcaacatcacacgcatccgcataagtccaggaaatcaatatattgttagtgtaagtgccgatggagccattttgcgatggaagtacccatatacctcctgaagctgatgagatgtctctgagccttggcgttgcacgcagtcctgttgaagactgagtttagataactccaacactagtcttcatttctcacagctctgtttttgttcttgagtcaatttttctctttttctttatagaatgcattttatattcttaaattgcatattaaaattgaagtatgttcaagaataa

SEQ ID NO: 119717 - DNA, 711 bp, Homo sapiens
  Payload ID: 3476
  Gene Symbol: CFAP52
  Gene Name: cilia and flagella associated protein 52
  ENST ID: ENST00000576499
  CDS Start-End: 15-398
agaacctcccaaggatggataacaaaatttcgccggaggcccaagtggcggagctggaacttgacgccgtgatcggcttcaatggacatgtgcccactggtctcaaatgccatcctgaccaggagcatatgatttatcctcttggttgcacagtcctcattcaggcaataaatactaaagagcagaacttcctacagggtcatggcaacaacgtctcctgcttggccatctccaggtctggagagtacatcgcctccggacaagtcacattcatggggttcaagacatcattttgtgggattataagaacagagagctgcttgctcggctgtcccttcacaaaggcaaaattgaagctctggccttttctccaaatgatttgtacttggtatcactaggaggcccagatgacggaagtgtggtggtgtggagcatagccaagagagatgccatctgtggcagccctgcagccggcctcaatgttggcaatgccaccaatgtgatcttctccaggtgccgggatgagatgtttatgactgctggaaagtatgtgtctgcgttcggagttttcagaactcataaattgctatattttcttgcacagaaaacatggtcattctgatctgggggaacacgtctttagtcctggataaataccttacatcatagtttttgtgattttgtactcattaaaagttctcttcactggaa

SEQ ID NO: 119718 - DNA, 1851 bp, Homo sapiens
  Payload ID: 3477
  Gene Symbol: CFAP53
  Gene Name: cilia and flagella associated protein 53
  Uniprot ID: Q96M91
  ENST ID: ENST00000398545
  CDS Start-End: 119-1663
aatcccgcgaggcgcaccatggcaaccagacttctgcgtcgcggaagcgggtcccgcaggtcgccacggttgggggaaacgcggcggacgccgcccccgtcccgaaggggactcgaaaatgtacagccagcggtttggcaccgtacagcgggaggttaagggccccacccccaaagtggtgatcgtgagatccaagcctcctaaaggccaaggagctgagcaccatctagaaagaatccgacgcagccatcagaagcataatgctattttggcttccattaagtcaagtgagcgggatcgcttgaaagctgagtgggaccagcacaatgactgcaagattttggacagccttgtgcgagcaagaatcaaggatgctgtgcaagggtttatcattaacattgaagaaagacgaaataagctacgtgagcttttagcattagaagaaaatgagtattttacagaaatgcaattgaagaaagaaaccattgaggagaaaaaagataggatgagagagaaaactaaattactaaaagagaagaatgaaaaagagaggcaggattttgtggctgaaaagctagaccagcaattcagggaacgctgtgaggagctccgtgttgaattgttatctatccatcagaagaaggtgtgtgaggagcggaaagcacagattgcatttaatgaggagctgagcaggcaaaagctggtggaagagcagatgttctccaaactctgggaggaagaccgattagccaaggaaaagcgagaagcccaagaggcgaggagacagaaagagctgatggagaacacacgcctggggctgaatgcccagatcaccagcatcaaggcacaaaggcaggcgacacagctgctgaaggaagaggaggcacgccttgtggaaagtaacaacgcacagattaaacatgagaatgaacaggatatgctaaagaaacagaaggcaaagcaggaaactaggaccattttgcaaaaagccctacaagagaggatagaacatattcagcaggaatacagagacgaacaggacttgaacatgaagctcgtgcaaagggcccttcaagacttacaggaagaggcagataaaaagaaacaaaaaagagaagatatgataagagaacagaagatataccataaatatttggcacagagacgtgaggaagaaaaagctcaggagaaagaatttgacagaatattagaggaagacaaggcaaagaagttggctgagaaggacaaggagctgagacttgaaaaggaggcaaggagacagcttgtggatgaggtcatgtgtacaagaaaacttcaagttcaagaaaagttgcaacgagaagctaaagaacaggaagaacgtgctatggaacagaaacacataaatgaaagtcttaaagaacttaactgtgaagagaaggagaattttgcaagacgccaacgtttagcccaggagtacaggaagcaacttcagatgcaaatcgcctaccagcagcagtcccaagaagcagagaaggaagagaaacgccgagagtttgaagcaggtgtagcagcaaacaagatgtgtttggacaaggtccaggaggtcctgtccacccatcaagtgctgcctcaaaacattcatcccatgcgcaaggcatgccccagtaagcttccaccgtagttccgtgagcatcaatatatcttttcttggtcttttaatatttttaactacagtatgcttgtatgcttcttttaactcctggataaacttttcttttttccctgagtttgtgtaattaattgaacataattttcttcctttgaataaacctgtgcctattttggagttcacagacttacaaatccaaa

SEQ ID NO: 119719 - DNA, 4244 bp, Homo sapiens
  Payload ID: 3478
  Gene Symbol: CFAP57
  Gene Name: cilia and flagella associated protein 57
  Uniprot ID: Q96MR6
  ENST ID: ENST00000372492
  CDS Start-End: 325-4077
aagaaacggggtatcccgagacccaagcggctagcagagggcggccctggccgctgctgcctgccttcagccccctactcccacgccgtggctccacgtgccaccgaatcgctccagcgccagcaactcacagctactgctcaacttttgattgggacttccgcttccggcggcaaaccatacttccggtttgtcgttgctataggaaccgctacggcgtttgaaagtgtccgggttgcttaggatccctacaggtagcgcctctggatacatgcgtggtctgctgacccagagagaaacgaaagaactgtttggcgggagatcatgtcagccgtggtagctcagacgctgcatgtttttggtcttcgatcccacgtggccaacaatatcttctacttcgatgaacagatcattatatttccttcaggaaatcactgtgtgaagtacaatgtggatcagaaatggcaaaaattcattccaggctcagagaagagtcagggcatgttggccttgtccatcagtcccaatcggcggtacctcgctatctctgagactgtgcaagaaaaacctgccatcaccatttatgaattgtcatccatcccttgccggaagcgcaaagttcttaataattttgacttccaagttcagaaatttattagcatggctttttctccagactccaaatacctattggctcagacgtcacctccagagtcaaatcttgtctactggctgtgggaaaaacagaaagtaatggccattgttagaatcgacactcagaacaaccctgtctaccaggtgagcttcagtccacaggataacactcaggtgtgtgtcactggaaatgggatgtttaagcttctccgttttgctgagggaaccctgaagcaaaccagctttcagaggggagaaccccaaaactatctagctcacacctgggtggctgatgacaagattgtcgttggcactgacacaggcaaactcttcctctttgaatctggagatcagcgttgggagaccagcataatggtcaaggaacctaccaatggctcaaagagcctggatgtcattcaggaatcagagagcctgattgaatttccaccagtcagttctccactcccttcctatgaacagatggtggcggccagtagccatagccagatgtccatgccccaggtgtttgccattgcagcctattcaaagggatttgcctgttctgctgggccagggagagttctgctgtttgagaagatggaagaaaaggatttttaccgtgagagcagagaaatcaggattcctgtggacccgcagagcaatgatccaagtcagtctgacaaacaggacgttctctgcctgtgcttcagcccctcagaggaaactctggttgccagcaccagtaagaaccaactctacagcatcaccatgtccctgacagagatcagcaagggggagcctgctcactttgagtatttgatgtatccattgcactcagcacccatcaccggtctagctacctgcatccgcaaaccccttatagccacctgttctctggatcgatccatccgcctttggaattatgaaacaaacaccctggaactatttaaggaataccaagaagaggcatattccatcagccttcatccatctggacacttcattgtagtagggtttgctgacaaactacgcctcatgaatctactcattgatgatatacgttctttcaaagaatactctgttagaggatgcggagagtgttcctttagcaatggaggtcacctgtttgctgcagtcaatggaaatgtgattcacgtttacaccaccacgagcctagagaacatctcaagcctgaaaggacacacagggaagattcgctcaattgtgtggaatgcagatgatagcaaactgatttctggtggcacagatggtgctgtgtatgaatggaatctgtccacaggaaagagagagacagaatgcgtgctcaagtcttgcagctacaactgtgttactgtctcccccgatgccaaaattatctttgctgttggatcagaccacaccctcaaggagattgcagattccttgatccttcgagagatatcggcgtttgatgtcacctacaccgccattgtcatctcgcattctggacgcatgatgtttgtgggcacctcggtgggaaccattcgtgccatgaagtaccctctgcctctgcagaaggaattcaatgagtaccaggcccatgccggtcctatcaccaagatgttgcttacctttgatgatcagttcctgctgactgctgctgaggatggctgcctgttcacctggaaggtctttgataaggatggccggggaatcaagcgagagagggaggtgggctttgccgaagaggtgcttgtgactaaaacagacatggaagaaaaggctcaggttatgttggagctaaagactcgtgtggaggaattaaaaatggagaatgagtatcaactccgactaaaggacatgaactattctgagaagattaaggagctaacagacaagttcatccaggaaatggagtccttgaaaacaaaaaaccaggtcttaagaacagaaaaagagaagcaggatgtttatcaccatgagcacatagaagacctcctagacaagcaaagccgggaactgcaggacatggaatgttgcaacaaccaaaagttgcttctagaatatgagaagtaccaggagctgcagctcaagtcccagaggatgcaggaagagtatgaaaaacagctccgggataacgatgagaccaagagccaggccctggaggagctgactgagttttacgaggcaaaactgcaggagaaaaccacccttctggaagaggcacaggaagacgtcaggcagcagctgcgggagtttgaagagaccaagaagcagattgaggaagatgaagaccgagaaatccaagatatcaaaaccaagtatgagaaaaagcttcgggatgaaaaggaatcaaacctgcggctcaagggagaaacaggcatcatgaggaagaagttcagcagcctacagaaggagattgaagaacgaaccaatgacatcgagaccctaaaaggagagcagatgaagctgcaaggagtcattaagtctctggagaaggacatccaaggcctcaagcgagagatccaggaaagagacgagactattcaagacaaggagaagcgaatttatgatctgaaaaagaaaaatcaagaactagggaaattcaagtttgtgcttgactacaaaataaaggagctgaagaagcaaatagaacctcgagagaatgagatcagggtgatgaaggaacagattcaggagatggaagctgaactggagaatttccataagcagaacactcaactggagctgaacatcacagaattgtggcagaaactgagagccaccgatcaggagatgcgcagagagagacagaaggagcgagacttggaagcgctggtcaaaaggtttaaaacagacctccacaactgcgtagcctatattcaggaaccgcggctgctgaaggagaaggttcgaggtctctttgagaagtacgtgcagcgagcagacatggtggagatcgcagggctgaacacagacctgcagcaggagtacacccggcagcgggagcacctggagaggaacctggccactctcaagaagaaggtggtcaaggagggcgagctgcaccgcacagactacgtccgcatcatgcaggaaaatgtctctctgatcaaggaaattaatgagctccgcagggagctgaagttcactcggtcccaagtctatgaccttgaagcagctctgaaactgaccaagaaagtccgaccacaagaagtttcagagacagaacccagcagggacatgctcagcacagctcccaccgcaaggttgaatgagcaagaagaaactgggaggatcattgaaatgcagcgcctagaaatccagcgcctcagagaccagatccaagagcaagagcaggtcacagggttccacaccctcgctggagttcggcttccttccctctccaactccgaggtagacttagaggtgaagaccaactgaccccctctggtgagccatctccagccacagccagaagaaacacagcatgtctgtccccaagccagacttgcggttggagtctgtatggtccctgcagcactgaccccagcaacctctttctcttgccctggggaatttgggacacagaataaaggtgtttgcccaca

SEQ ID NO: 119720 - DNA, 579 bp, Homo sapiens
  Payload ID: 3478
  Gene Symbol: CFAP57
  Gene Name: cilia and flagella associated protein 57
  ENST ID: ENST00000428122
  CDS Start-End: 1-235
agagagggaggtgggctttgccgaagaggtgcttgtgactaaaacagacatggaagaaaaggctcaggttatgttggagctaaagactcgtgtggaggaattaaaaatggagaatgagtatcaactccgactaaaggacatgaactattctgagaagattaaggagctaacagacaagttcatccaggaaatggagtccttgaaaacaaaaaaccaggtctgtttaagagactgaccaacaagcacaaataacaagaaatttccactttcaagacaggactggcatatactgcccaagctatgctcaaacagtcttaagaacagaaaaagagaagcaggatgtttatcaccatgagcacatagaagacctcctagacaagcaaagccgggaactgcaggacatggaatgttgcaacaaccaaaagttgcttctagaatatgagaagtaccaggagctgcagctcaagtcccagaggatgcaggaagagtatgaaaaacagctccgggataacgatgagaccaagagccaggccctggaggagctgactgagttttacgaggcaaaactgcaggagaaaa

SEQ ID NO: 119721 - DNA, 2094 bp, Homo sapiens
  Payload ID: 3478
  Gene Symbol: CFAP57
  Gene Name: cilia and flagella associated protein 57
  ENST ID: ENST00000533339
  CDS Start-End: 52-243
gcgtggtctgctgacccagagagaaacgaaagaactgtttggcgggagatcatgtcagccgtggtagctcagacgctgcatgtttttggtcttcgatcccacgtggccaacaatatcttctacttcgatgaacagatcattatatttccttcaggaaatcactgtgtgaagtacaatgtggatcagaaatggcaaaaattcattccaggttcattctggctgctgtacagaggacagatttaaggaggagaaagaaaggaagcagggagaacagctgagggatgattgctgtaattcaggctcagagaagagtcagggcatgttggccttgtccatcagtcccaatcggcggtacctcgctatctctgagactgtgcaagaaaaacctgccatcaccatttatgaattgtcatccatcccttgccggaagcgcaaagttcttaataattttgacttccaagttcagaaatttattagcatggctttttctccagactccaaatacctattggctcagacgtcacctccagagtcaaatcttgtctactggctgtgggaaaaacagaaagtaatggccattgttagaatcgacactcagaacaaccctgtctaccaggtgagcttcagtccacaggataacactcaggtgtgtgtcactggaaatgggatgtttaagcttctccgttttgctgagggaaccctgaagcaaaccagctttcagaggggagaaccccaaaactatctagctcacacctgggtggctgatgacaagattgtcgttggcactgacacaggcaaactcttcctctttgaatctggagatcagcgttgggagaccagcataatggtcaaggaacctaccaatggctcaaagagcctggatgtcattcaggaatcagagagcctgattgaatttccaccagtcagttctccactcccttcctatgaacagatggtggcggccagtagccatagccagatgtccatgccccaggtgtttgccattgcagcctattcaaagggatttgcctgttctgctgggccagggagagttctgctgtttgagaagatggaagaaaaggatttttaccgtgagagcagagaaatcaggattcctgtggacccgcagagcaatgatccaagtcagtctgacaaacaggacgttctctgcctgtgcttcagcccctcagaggaaactctggttgccagcaccagtaagaaccaactctacagcatcaccatgtccctgacagagatcagcaagggggagcctgctcactttgagtatttgatgtatccattgcactcagcacccatcaccggtctagctacctgcatccgcaaaccccttatagccacctgttctctggatcgatccatccgcctttggaattatgaaacaaacaccctggaactatttaaggaataccaagaagaggcatattccatcagccttcatccatctggacacttcattgtagtagggtttgctgacaaactacgcctcatgaatctactcattgatgatatacgttctttcaaagaatactctgttagaggatgcggagagtgttcctttagcaatggaggtcacctgtttgctgcagtcaatggaaatgtgattcacgtttacaccaccacgagcctagagaacatctcaagcctgaaaggacacacagggaagattcgctcaattgtgtggaatgcagatgatagcaaactgatttctggtggcacagatggtgctgtgtatgaatggaatctgtccacaggaaagagagagacagaatgcgtgctcaagtcttgcagctacaactgtgttactgtctcccccgatgccaaaattatctttgctgttggatcagaccacaccctcaaggagattgcagattccttgatccttcgagagatatcggcgtttgatgtcacctacaccgccattgtcatctcgcattctggacgcatgatgtttgtgggcacctcggtgggaaccattcgtgccatgaagtaccctctgcctctgcagaaggaattcaatgagtaccaggcccatgccggtcctatcaccaaggaatttagcctaggaaatcatca

SEQ ID NO: 119722 - DNA, 576 bp, Homo sapiens
  Payload ID: 3478
  Gene Symbol: CFAP57
  Gene Name: cilia and flagella associated protein 57
  ENST ID: ENST00000529956
  CDS Start-End: 79-576
gttgctataggaaccgctacggcgtttgaaagtgtccgggttgcttaggatccctacagaactgtttggcgggagatcatgtcagccgtggtagctcagacgctgcatgtttttggtcttcgatcccacgtggccaacaatatcttctacttcgatgaacagatcattatatttccttcaggaaatcactgtgtgaagtacaatgtggatcagaaatggcaaaaattcattccaggctcagagaagagtcagggcatgttggccttgtccatcagtcccaatcggcggtacctcgctatctctgagactgtgcaagaaaaacctgccatcaccatttatgaattgtcatccatcccttgccggaagcgcaaagttcttaataattttgacttccaagttcagaaatttattagcatggctttttctccagactccaaatacctattggctcagacgtcacctccagagtcaaatcttgtctactggctgtgggaaaaacagaaagtaatggccattgttagaatcgacactcagaacaaccctgtctaccaggtgagcttcagtccacaggataac

SEQ ID NO: 119723 - DNA, 456 bp, Homo sapiens
  Payload ID: 3478
  Gene Symbol: CFAP57
  Gene Name: cilia and flagella associated protein 57
  ENST ID: ENST00000525227
  CDS Start-End: 63-254
ggatacatgcgtggtctgctgacccagagagaaacgaaagcagaactgtttggcgggagatcatgtcagccgtggtagctcagacgctgcatgtttttggtcttcgatcccacgtggccaacaatatcttctacttcgatgaacagatcattatatttccttcaggaaatcactgtgtgaagtacaatgtggatcagaaatggcaaaaattcattccaggttcattctggctgctgtacagaggacagatttaaggaggagaaagaaaggaagcagggagaacagctgagggatgattgctgtaattcaggctcagagaagagtcagggcatgttggccttgtccatcagtcccaatcggcggtacctcgctatctctgagactgtgcaagaaaaacctgccatcaccatttatgaattgtcatccatcccttgccggaagcgcaaagttcttaat

SEQ ID NO: 119724 - DNA, 3037 bp, Homo sapiens
  Payload ID: 3478
  Gene Symbol: CFAP57
  Gene Name: cilia and flagella associated protein 57
  Uniprot ID: Q96MR6
  ENST ID: ENST00000528956
  CDS Start-End: 147-2243
acttccggtttgtcgttgctataggaaccgctacggcgtttgaaagtgtccgggttgcttaggatccctacaggtagcgcctctggatacatgcgtggtctgctgacccagagagaaacgaaagcagaactgtttggcgggagatcatgtcagccgtggtagctcagacgctgcatgtttttggtcttcgatcccacgtggccaacaatatcttctacttcgatgaacagatcattatatttccttcaggaaatcactgtgtgaagtacaatgtggatcagaaatggcaaaaattcattccaggctcagagaagagtcagggcatgttggccttgtccatcagtcccaatcggcggtacctcgctatctctgagactgtgcaagaaaaacctgccatcaccatttatgaattgtcatccatcccttgccggaagcgcaaagttcttaataattttgacttccaagttcagaaatttattagcatggctttttctccagactccaaatacctattggctcagacgtcacctccagagtcaaatcttgtctactggctgtgggaaaaacagaaagtaatggccattgttagaatcgacactcagaacaaccctgtctaccaggtgagcttcagtccacaggataacactcaggtgtgtgtcactggaaatgggatgtttaagcttctccgttttgctgagggaaccctgaagcaaaccagctttcagaggggagaaccccaaaactatctagctcacacctgggtggctgatgacaagattgtcgttggcactgacacaggcaaactcttcctctttgaatctggagatcagcgttgggagaccagcataatggtcaaggaacctaccaatggctcaaagagcctggatgtcattcaggaatcagagagcctgattgaatttccaccagtcagttctccactcccttcctatgaacagatggtggcggccagtagccatagccagatgtccatgccccaggtgtttgccattgcagcctattcaaagggatttgcctgttctgctgggccagggagagttctgctgtttgagaagatggaagaaaaggatttttaccgtgagagcagagaaatcaggattcctgtggacccgcagagcaatgatccaagtcagtctgacaaacaggacgttctctgcctgtgcttcagcccctcagaggaaactctggttgccagcaccagtaagaaccaactctacagcatcaccatgtccctgacagagatcagcaagggggagcctgctcactttgagtatttgatgtatccattgcactcagcacccatcaccggtctagctacctgcatccgcaaaccccttatagccacctgttctctggatcgatccatccgcctttggaattatgaaacaaacaccctggaactatttaaggaataccaagaagaggcatattccatcagccttcatccatctggacacttcattgtagtagggtttgctgacaaactacgcctcatgaatctactcattgatgatatacgttctttcaaagaatactctgttagaggatgcggagagtgttcctttagcaatggaggtcacctgtttgctgcagtcaatggaaatgtgattcacgtttacaccaccacgagcctagagaacatctcaagcctgaaaggacacacagggaagattcgctcaattgtgtggaatgcagatgatagcaaactgatttctggtggcacagatggtgctgtgtatgaatggaatctgtccacaggaaagagagagacagaatgcgtgctcaagtcttgcagctacaactgtgttactgtctcccccgatgccaaaattatctttgctgttggatcagaccacaccctcaaggagattgcagattccttgatccttcgagagatatcggcgtttgatgtcacctacaccgccattgtcatctcgcattctggacgcatgatgtttgtgggcacctcggtgggaaccattcgtgccatgaagtaccctctgcctctgcagaaggaattcaatgagtaccaggcccatgccggtcctatcaccaaggtgagcagggccctctccccaggaacccagtcccacacctgcctgctacgtgccttgttcatcccttcaacctcccaatgtcttttctctctccttcttctctcttatttattcatccatcattcattgaatcaccatctattgactatgaatatactctttgtttaaactacttccaggaatttagcctaggaaatcatcagagatacacctaaaaatgtatgtacaacgttttcaccataatattatgcataataaggggccgtttggtggatgccgtagctgccgtgagtgtgggctgcacttgaccacagctgcctcctcctccagagaatgccccagactgaaaggagccatagccctgaagattggcccctacctctccctgagggtacaaaaggccaccccaggggcaataccatgagtacacatttgtaaattgtccttccattcacccttctcataaagtagtatctatgttcaacagtcaaaatgtggaagcaaccaagcatccatcgacagacgaatgcataagcaaaagatggtatatctatacaatggaacaataccctgcctaaaaaggaagggaattctgcaatgtgctaccacatggatgaaccttgaggatgttatgctaaattaaataaggccaaccacaaaaagataagtacagtgtgattccacttttaggagatacttggagcagtcagaatcacaaagacagagtggtggttggcaggggctgcaggaagggggaatgaggaatgattgtttcataggtatagagttttggttttacaagacaaaaggattatgggggtagttggtggcaatggctgcacaacattacaaatgtatttaataacatgaactgtacacttgaaaatggttaagatagcaaattttacagaatatgtattttacgacaattttaaaaatgaaataaaaaagaattatcttgc

SEQ ID NO: 119725 - DNA, 4162 bp, Homo sapiens
  Payload ID: 3478
  Gene Symbol: CFAP57
  Gene Name: cilia and flagella associated protein 57
  ENST ID: ENST00000610710
  CDS Start-End: 147-3998
acttccggtttgtcgttgctataggaaccgctacggcgtttgaaagtgtccgggttgcttaggatccctacaggtagcgcctctggatacatgcgtggtctgctgacccagagagaaacgaaagcagaactgtttggcgggagatcatgtcagccgtggtagctcagacgctgcatgtttttggtcttcgatcccacgtggccaacaatatcttctacttcgatgaacagatcattatatttccttcaggaaatcactgtgtgaagtacaatgtggatcagaaatggcaaaaattcattccaggctcagagaagagtcagggcatgttggccttgtccatcagtcccaatcggcggtacctcgctatctctgagactgtgcaagaaaaacctgccatcaccatttatgaattgtcatccatcccttgccggaagcgcaaagttcttaataattttgacttccaagttcagaaatttattagcatggctttttctccagactccaaatacctattggctcagacgtcacctccagagtcaaatcttgtctactggctgtgggaaaaacagaaagtaatggccattgttagaatcgacactcagaacaaccctgtctaccaggtgagcttcagtccacaggataacactcaggtgtgtgtcactggaaatgggatgtttaagcttctccgttttgctgagggaaccctgaagcaaaccagctttcagaggggagaaccccaaaactatctagctcacacctgggtggctgatgacaagattgtcgttggcactgacacaggcaaactcttcctctttgaatctggagatcagcgttgggagaccagcataatggtcaaggaacctaccaatggctcaaagagcctggatgtcattcaggaatcagagagcctgattgaatttccaccagtcagttctccactcccttcctatgaacagatggtggcggccagtagccatagccagatgtccatgccccaggtgtttgccattgcagcctattcaaagggatttgcctgttctgctgggccagggagagttctgctgtttgagaagatggaagaaaaggatttttaccgtgagagcagagaaatcaggattcctgtggacccgcagagcaatgatccaagtcagtctgacaaacaggacgttctctgcctgtgcttcagcccctcagaggaaactctggttgccagcaccagtaagaaccaactctacagcatcaccatgtccctgacagagatcagcaagggggagcctgctcactttgagtatttgatgtatccattgcactcagcacccatcaccggtctagctacctgcatccgcaaaccccttatagccacctgttctctggatcgatccatccgcctttggaattatgaaacaaacaccctggaactatttaaggaataccaagaagaggcatattccatcagccttcatccatctggacacttcattgtagtagggtttgctgacaaactacgcctcatgaatctactcattgatgatatacgttctttcaaagaatactctgttagaggatgcggagagtgttcctttagcaatggaggtcacctgtttgctgcagtcaatggaaatgtgattcacgtttacaccaccacgagcctagagaacatctcaagcctgaaaggacacacagggaagattcgctcaattgtgtggaatgcagatgatagcaaactgatttctggtggcacagatggtgctgtgtatgaatggaatctgtccacaggaaagagagagacagaatgcgtgctcaagtcttgcagctacaactgtgttactgtctcccccgatgccaaaattatctttgctgttggatcagaccacaccctcaaggagattgcagattccttgatccttcgagagatatcggcgtttgatgtcacctacaccgccattgtcatctcgcattctggacgcatgatgtttgtgggcacctcggtgggaaccattcgtgccatgaagtaccctctgcctctgcagaaggaattcaatgagtaccaggcccatgccggtcctatcaccaagatgttgcttacctttgatgatcagttcctgctgactgctgctgaggatggctgcctgttcacctggaaggtctttgataaggatggccggggaatcaagcgagagagggaggtgggctttgccgaagaggtgcttgtgactaaaacagacatggaagaaaaggctcaggttatgttggagctaaagactcgtgtggaggaattaaaaatggagaatgagtatcaactccgactaaaggacatgaactattctgagaagattaaggagctaacagacaagttcatccaggaaatggagtccttgaaaacaaaaaaccaggtcttaagaacagaaaaagagaagcaggatgtttatcaccatgagcacatagaagacctcctagacaagcaaagccgggaactgcaggacatggaatgttgcaacaaccaaaagttgcttctagaatatgagaagtaccaggagctgcagctcaagtcccagaggatgcaggaagagtatgaaaaacagctccgggataacgatgagaccaagagccaggccctggaggagctgactgagttttacgaggcaaaactgcaggagaaaaccacccttctggaagaggcacaggaagacgtcaggcagcagctgcgggagtttgaagagaccaagaagcagattgaggaagatgaagaccgagaaatccaagatatcaaaaccaagtatgagaaaaagcttcgggatgaaaaggaatcaaacctgcggctcaagggagaaacaggcatcatgaggaagaagttcagcagcctacagaaggagattgaagaacgaaccaatgacatcgagaccctaaaaggagagcagatgaagctgcaaggagtcattaagtctctggagaaggacatccaaggcctcaagcgagagatccaggaaagagacgagactattcaagacaaggagaagcgaatttatgatctgaaaaagaaaaatcaagaactagggaaattcaagtttgtgcttgactacaaaataaaggagctgaagaagcaaatagaacctcgagagaatgagatcagggtgatgaaggaacagattcaggagaatgaccccattctaaagtggccccagagggtcgagattcacttatacaacttcagaaagcaggtgaggaaggtgcttctctggggaaccctgcctcagatggaagctgaactggagaatttccataagcagaacactcaactggagctgaacatcacagaattgtggcagaaactgagagccaccgatcaggagatgcgcagagagagacagaaggagcgagacttggaagcgctggtcaaaaggtttaaaacagacctccacaactgcgtagcctatattcaggaaccgcggctgctgaaggagaaggttcgaggtctctttgagaagtacgtgcagcgagcagacatggtggagatcgcagggctgaacacagacctgcagcaggagtacacccggcagcgggagcacctggagaggaacctggccactctcaagaagaaggtggtcaaggagggcgagctgcaccgcacagactacgtccgcatcatgcaggaaaatgtctctctgatcaaggaaattaatgagctccgcagggagctgaagttcactcggtcccaagtctatgaccttgaagcagctctgaaactgaccaagaaagtccgaccacaagaagtttcagagacagaacccagcagggacatgctcagcacagctcccaccgcaaggttgaatgagcaagaagaaactgggaggatcattgaaatgcagcgcctagaaatccagcgcctcagagaccagatccaagagcaagagcaggtcacagggttccacaccctcgctggagttcggcttccttccctctccaactccgaggtagacttagaggtgaagaccaactgaccccctctggtgagccatctccagccacagccagaagaaacacagcatgtctgtccccaagccagacttgcggttggagtctgtatggtccctgcagcactgaccccagcaacctctttctcttgccctggggaatttgggacacagaataaaggtgtttgccc

SEQ ID NO: 119726 - DNA, 466 bp, Homo sapiens
  Payload ID: 3479
  Gene Symbol: CFAP58
  Gene Name: cilia and flagella associated protein 58
  ENST ID: ENST00000369703
  CDS Start-End: 1-279
atggacgagcttctaagagaaagggacatactaaataagaacatgcttaaggcggtcaatgcgacccagaagcagacagacttggtaaagctccatgaacaagccaagaggaacctggagggagaaatccagaactacaaggatgaggctcagaagcagagaaagatcatctttcatctggaaaaggagcgtgaccggtacatcaaccaagccagtgaccttacgcaaaaggctgactctgtcaggatgccctggcctctggacaaagggaaatggtgaaacagtggaccctcagggagcttctgagcctctgctgacaagggaagggcacagatcctacccactcatattccaccggccaaccaagtcacagggctgtgccggacatcctgggcaggagtgtggtcctccttagggaggggccctgtagggtgaggcagcaaatatatttgaacataaaatgtca

SEQ ID NO: 119727 - DNA, 3313 bp, Homo sapiens
  Payload ID: 3479
  Gene Symbol: CFAP58
  Gene Name: cilia and flagella associated protein 58
  Uniprot ID: Q5T655
  ENST ID: ENST00000369704
  CDS Start-End: 135-2753
gcgccgagcgcgggtttccgctcggggcgggcgatagagacagcgcgtcgcgcctttagcttctttcccagactccggcccagctcctgcgatctccacagcagcctctgaggccgcccccagagagcatcaggatggctgaggaaaagggtggaaagcaagtcctggaagaatctgcatttgaagaaatggaaagagattttcagggagttctccatgaactttctggagacaaaagtttggaaaaatttcggattgaatatgagaggcttcatgctgtcatgaaaaagtcttatgacaatgaaaagcgtctgatggccaaatgcagagagctaaatgcagagattgtagtgaattctgcgaaggtcgccactgcccttaagctctctcaggatgatcagaccaccattgcatccctaaagaaggaaattgaaaaggcctggaagatggtggactcagcctatgacaaagagcagaaggccaaggagacgattcttgctctgaaagaggaaatagtgaacctgaccaaactagtggagcaggggtctggactgtcaatggaccagcatagcaacatccgagatttactgaggttcaaagaagaagtgacaaaggagagagaccagctcttatcagaagtggtaaaattacgagaatccctagctcagaccactgaacagcagcaggaaacagagcgatcaaaagaggaggctgaacatgccatcagtcagttccaacaagaaatccagcaacgtcagaacgaagcttcccgggagttccggaagaaggaaaaactagagaaagagctcaagcagattcaggcagacatggacagcaggcagacagaaataaaagccctgcagcagtatgtgcagaagagcaaggaggagcttcagaagctggagcagcagctgaaggagcagaagatattgaatgagagagctgcaaaggaactcgagcaatttcagatgagaaatgctaaacttcagcaagagaatgaacagcacagtttggtctgtgagcagctatcccaggaaaaccaacagaaggcgttggagctcaaagccaaagaggaagaagtccatcaaatgcgccttgacatcgggaagctcaacaaaatcagagaacaaattcataagaaattgcaccacaccgaagatcaaaaggcagaagtcgaacagcacaaagaaaccctaaaaaatcagattgtgggattagagagagaggtagaggcttcaaagaaacaagcagaacttgacagaaaggcaatggacgagcttctaagagaaagggacatactaaataagaacatgcttaaggcggtcaatgcgacccagaagcagacagacttggtaaagctccatgaacaagccaagaggaacctggagggagaaatccagaactacaaggatgaggctcagaagcagagaaagatcatctttcatctggaaaaggagcgtgaccggtacatcaaccaagccagtgaccttacgcaaaaggtccttatgaacatggaagacataaaagttcgtgaaacacagatttttgactacaggaaaaaaatagctgaatcagagattaaattaaaacagcaacagaacctatatgaagctgtgagatcagacagaaatctgtatagcaaaaatctggttgaggctcaggatgaaataacagatatgaagagaaagttaaagattatgatccatcaggtagatgagctgaaagaagacatctctgccaaagagtccgcacttgtgaagctgcacctggaacagcagcgaatagaaaaggaaaaggaaacattgaaggctgagctgcagaagctgagacaacaagccctggagacaaaacactttattgaaaagcaagaagctgaagagagaaaactcctgcgaataattgctgaggctgacggggagaggttgagacagaagaaggaattagaccaggtcatcagtgagagagatatcctggggtctcagcttgttcggcgcaatgatgagttagctttgctctatgagaagatcaagatccaacagtctgtgctgaataaaggggagagccagtacaaccagaggttggaggacatgagaatcctcagacttgagatcaagaagcttcgccgggaaaaggggattcttgccaggagtatggctaatgttgaagaactcagacaggagttttttcacatgcaaagagaattgttgaaggagaggacacgctgccgagccctggaggaggagctggagaatcccctgaatgtgcacagatggaggaagctcgaggccagcgaccccaatgcatatgagctgatacagaaaattcacaccctgcagaagcgtctcatcagcaagactgaagaggtggttgaaaaagagctgctcctccaggaaaaggagaaactctacatggaactaaagcacgtcttggcccgccagcctggacctgaggctgcggaacagctgaagctgtaccgacgcacgctgcatgacaagaagcagcagctgaaagttttgtcttcagaattgaatatgtatgaagtacagagcaaagaatataaatatgaggtagagaaacttaccaatgagctccagaatttaaagaagaaatacctcgctcagaaacgtaaagaacaacttcaaaaaaacaaggacacagcacccatggataacaccttcttaatggtcaaaccaaatggtcctggttttactgggggcggatttcctctcaggtcaaccaaaatgacgttctaacctgaagctgctggctgtttccagttgaacaactcatgaaatctgctctgggacattttgggggaatctcaaagtccttggatcatagaactgagtgctgagaatccaggatggaaagaaatgcagaactatcatagtcacatacatataagagggatggtgttttgtctggttcacgttgatattaacagatcataattctctctgttcagttaggctgacctattgcatgaagcaaatcttttgttgctaccccattgattgaaatgtactagaccttaatttctttattacagacattggtgtacttgaaggttttatatttaaaagtatttttgaaatgcaatgtgtcccctctcaccttattaacaataatctattttaattattcctcattaacaagtcattgcatgagatgagaaagaaggacaaactcttaagaatttaaaaagtgttttgagaatgatttctatatggaatttcttttcaggcccggaatgggaaaatctattccaaagagacacactaataaatacttcattataaaaaataaaaaagaa

SEQ ID NO: 119728 - DNA, 4082 bp, Homo sapiens
  Payload ID: 3480
  Gene Symbol: CFAP61
  Gene Name: cilia and flagella associated protein 61
  Uniprot ID: Q8NHU2
  ENST ID: ENST00000245957
  CDS Start-End: 77-3790
ggcagcgcgtggagtgcggcgtcctggagctgcggatgagtggacttttttctctcttttggggacaggataaaaaatgtcagtactcacttctccaagaggaaaggtagaagttgttcattgccgaagaacagaatcacaggatgtttattgtatcaaaagccttattagaaaatttacctgcaagctgtttgggaagctaaatatcatctatcttctagaaaaggccaaccttgctgttaccctctgcaatgacaaggaggagatcatggcccaggccaccttcctggactaccccaactggaatgttgccaagcaggatgactgggtgtcagtgttccgggagctcgacagtgacatcccatgcacacccctgaatacgttgttcatgcacctctttgtggccgtggatgagtattctgttggctgttgcaaagagattcttcgaaccgtgtataaggcagtgccagagctgcacttcatatttctcatcgtgccatcctacatgagcctaggctcaactctcataactgtttttgaccaagtggggaacatcccgtgtctgacgtatgaggaagactttgcagtgcatatatgtcacaggcacagccactatcctcagctgcacgttcgcaaagccagggtggaagaccatgacgatctcatgccaatatttatgcgctatgacacaattctgaaggaaacttacggtgaatacttcctggccgaactaatagaggcccaagatgaagagaatcatgctgttgtgtgtgaggtggaaggcacagctgttgggttcatgagtgtgtgctcaagagtgaacatgcaactgctgcatgagtgctttgacttgggccctttccacggactctgtttcccacatcctgatgacgttctggaatcaccacaagacctaagtgtccgaagaagtcaagatgctgagctcaggagtagcagccaaggttcccaaaaaatagtcgaggagttgcaggaacctgtctctccagataccatggaaaacatccagggaaatattgccagagaagctgcatccgaggaagctttaacagcagtccaaagtggaaatgttagtgaaccggaggacatagaaaaactcagtgacatctccactggatatgcacagtatcaccatgtcagcagtaggagcttggcatcgctcgtactgcctgaagagcccgtccacttccgccccatctacaggggagcctcagctgctttttgtattcagctgttttgtattgatgagaaatatgaagcaaggtcgctggattttatgaattttgttttcagtcttttttctgataagaacttctgtgtaatttctctgccccatctcacccccgagttcttcctcatccagaacttcgtgaaaatggtccctttcaacacctgcaccctcgagcaggacctctacgtcttccaccgggctggattgctcaagtccattaatataagatttgccactctcttggatactcctggtgtggaaaatcttgtcagcaccctcatgttgaataaaagcatattggaggacttagaccgttacaacaaggctcgcaaagaccctgatggaacactgctgcaggcatttgtagctgaagttgcagaacaaatagttggtattgcagtgatcagaaatgaaatggacattgagtacatacggtcccattacaacattgaagatttcatctacttcagtcaccaccagcgcgaagaacacgggcacatgcatcactttgccctcaaccccattttccggcactacaccaagttctttctgaaggagatcctgcgtttaggctttaaatcctgtctctactaccgtgtttacccaaaatccagagaaggcaagttccagaacccctacgcccactccctgacatctgcccttcattacttggttcccgtgcgaccacgacgacagattgtctatcctctggaaaagcttggcataaacgctccatcaaaggcggtctccaaggatccgatgagttatgctttaaaccatacaaacagaaaactaacattggaacctaaaattactgtcaatgccaagatcattgtggttggtgcatccagtgttggaatttccttcctagagacattggtattttgctctcacatgaagtttaataatcttaccctgatttcaactcatggactcccaggaaaaaaacttctggacactgaacaaaggaaatttttagccagcgaccactgttttaatgataaagattatgcactgatgtcactgtgctcctgggttaatgtcgtggtgggtagaatgaccggcatagaccgagcagccaagcacgttgtgctttccacggacgagatcgtgccctacgaccacctcatcctctgcaccgggcagcagtaccaggtcccatgccctacagaggctgatattagtcaacacctgacaaacagggaggttcccaacagcagtcagcggcggtacacggggaaagttccttgcaaccatttcactctcaacgaggaagaggattgctttaaggcactgatttggataaggaataactccatcaccacagaagggaatatcattgtctatgggaatacaattgatacttacaccaccgtggagacgctcttaaaccttggcgtgagcggcagccgcatccacctcgtgcagcccccgcccgcctccaccatcacctgcatcaacaactactcggtggagagcgccgtggcggacgcgctaggagccgccggagtcactatgtaccgggatgcgatcctggcccagtggaatgacggcctgcacccagaccccatctacagcgcctccttcaccacacccaccaagcctttcagactccagtgctctatgttcttcagcttctgtgagaagaatgtggattatgaaacgtttaaagccctcaatgatgcatgtcttgtgtatgacagtcgacttgtgattgataccaacttccacaccaacgacatagccatcagagctgctggctccctcaccaaattctccaatagatactactcaaatgagtggactcacagcaacttcagttccaaagaaattggctttcagctggcagcagctatgctacatctctttgatccaacccttgagcctgtgaccgagccaccagctaatcttgaccggctcatccccatgtacaagggagccaagattcaagggggcattcttcctgggtcttaccattatctgcatattgccaagcctgccattccaactcccttggaggtacaaatggcacagcctaattatggtttagaactagtaaccggcagtgcgaaaaatgggacttacttccgaattcatattaacaagtataaaatggtggaaaccatcacgtgcctttctagggagcccttccccgcctccaactacatccgcttgtttggccagcacgagcaactcctcaacaacctgtgtgctcggtacgatgaaaacctgatcacagatctctatagctacttcaccgagccgtggtgcctggccctgttccacgatcgttttattgatctcaggaaagagttacgccaaatcttagcctccaaggaggaggaagatcttccttccatagagcagttagcccatcaaatagaagatgaggaaatcaacccgactgagaagcccaggcaatacctcaaaagagtttttgaggaatccatctacaaaaccctggtggagagaagcactcttgactacctgcactataaccgctaccacctgcccatgtacgcgtggccaggcatcgtttagttgtaggcagggtctcccctttatggttttcatttatttagttcctggaaacgcgctctgtagaaatagaaaagttctctgcagcctggtttgacagcgaagccagcccctggtggttttgttcattcctttccttccctgacttatgcctgtagttttctatcatcccagtaggtggcacacggccgtgtgcctctcttctggggcaggctcgctttacaaatcccaggcatgttcctgtgcagaataatccatttcagcaataaaatgagatcatagtgtgtaaaacttg

SEQ ID NO: 119729 - DNA, 1185 bp, Homo sapiens
  Payload ID: 3480
  Gene Symbol: CFAP61
  Gene Name: cilia and flagella associated protein 61
  ENST ID: ENST00000340348
  CDS Start-End: 74-1185
accgtttccatggtgaccaggctgcgcgtcctccttgcggcagcgcgtggagtgcggcgtcctggagctgcggatgagagaaaaggccaaccttgctgttaccctctgcaatgacaaggaggagatcatggcccaggccaccttcctggactaccccaactggaatgttgccaagcaggatgactgggtgtcagtgttccgggagctcgacagtgacatcccatgcacacccctgaatacgttgttcatgcacctctttgtggccgtggatgagtattctgttggctgttgcaaagagattcttcgaaccgtgtataaggcagtgccagagctgcacttcatatttctcatcgtgccatcctacatgagcctaggctcaactctcataactgtttttgaccaagtggggaacatcccgtgtctgacgtatgaggaagactttgcagtgcatatatgtcacaggcacagccactatcctcagctgcacgttcgcaaagccagggtggaagaccatgacgatctcatgccaatatttatgcgctatgacacaattctgaaggaaacttacggtgaatacttcctggccgaactaatagaggcccaagatgaagagaatcatgctgttgtgtgtgaggtggaaggcacagctgttgggttcatgagtgtgtgctcaagagtgaacatgcaactgctgcatgagtgctttgacttgggccctttccacggactctgtttcccacatcctgatgacgttctggaatcaccacaagacctaagtgtccgaagaagtcaagatgctgagctcaggagtagcagccaaggttcccaaaaaatagtcgaggagttgcaggaacctgtctctccagataccatggaaaacatccagggaaatattgccagagaagctgcatccgaggaagctttaacagcagtccaaagtggaaatgttagtgaaccggaggacatagaaaaactcagtgacatctccactggatatgcacagtatcaccatgtcagcagtaggagcttggcatcgctcgtactgcctgaagagcccgtccacttccgccccatctacaggggagcctcagctgctttttgtattcagctgttttgtattgatgagaaatatgaagcaaggtcgctggattttatgaattttgttttcagtcttttttctgtaag

SEQ ID NO: 119730 - DNA, 1059 bp, Homo sapiens
  Payload ID: 3480
  Gene Symbol: CFAP61
  Gene Name: cilia and flagella associated protein 61
  Uniprot ID: Q8NHU2
  ENST ID: ENST00000377293
  CDS Start-End: 70-672
tgcgtataatgcacatgactctcttgaagtgatgacaatgaacagccatggccaagcacccatgcacagatgagttatgctttaaaccatacaaacagaaaactaacattggaacctaaaattactgtcaatgccaagatcattgtggttggtgcatccagtgttggaatttccttcctagagacattggtattttgctctcacatgaagtttaataatcttaccctgatttcaactcatggactcccaggaaaaaaacttctggacactgaacaaaggaaatttttagccagcgaccactgttttaatgataaagattatgcactgatgtcactgtgctcctgggttaatgtcgtggtgggtagaatgaccggcatagaccgagcagccaagcacgttgtgctttccacggacgagatcgtgccctacgaccacctcatcctctgcaccgggcagcagtaccaggtcccatgccctacagaggctgatattagtcaacacctgacaaacagggaggttcccaacagcagtcagcggcggtacacggggaaagttccttgcaaccatttcactctcaacgaggaagaggattgctttaaggcactgatttggataaggaataactccatcaccacagaagatggaggaagagcatcagtgttattctgctgacttgcccagttgtcagggatggtgatgctgtggtgcccccttaaagggaaatgttttttcaagatttaagactgactcccagcagccagtgcataaagccatttggagtgcctgcttttgtccaccaaatagccaggataagaagtatgtggaaattagtttcctgtcttacatgtaggtgattttctccaggtctggtgcttaatgactcccccaggcacctctcaggtaggtgctcttaacactgaaatgctaggaccaagctctgggagccttcagggaaacctgacctggccaagttcatttaactctgtgtagaggcccttttcaagtaaattctcaagtaaaaaaagttaagaaaaaatgttaacatcttgccttaaaaaa

SEQ ID NO: 119731 - DNA, 679 bp, Homo sapiens
  Payload ID: 3480
  Gene Symbol: CFAP61
  Gene Name: cilia and flagella associated protein 61
  ENST ID: ENST00000377303
  CDS Start-End: 113-679
gcgtggagtgcggcgtcctggagctgcggatgaggtgggtaacgccgtgctgactagcagcgacgcaaggactgcggtgcagggcgtccagggcgcatccccaggataaaaaatgtcagtactcacttctccaagaggaaaggtagaagttgttcattgccgaagaacagaatcacaggatgtttattgtatcaaaagccttattagaaaatttacctgcaagctgtttgggaagctaaatatcatctatcttctagaaaaggccaaccttgctgttaccctctgcaatgacaaggaggagatcatggcccaggccaccttcctggactaccccaactggaatgttgccaagcaggatgactgggtgtcagtgttccgggagctcgacagtgacatcccatgcacacccctgaatacgttgttcatgcacctctttgtggccgtggatgagtattctgttggctgttgcaaagagattcttcgaaccgtgtataaggcagtgccagagctgcacttcatatttctcatcgtgccatcctacatgagcctaggctcaactctcataactgtttttgaccaagtggggaacatcccgtgtctgacgtatgaggaagactttgcagtgcatatatgtcacaggcacagccactatcctcagctgcacgttcgcaaagccagg

SEQ ID NO: 119732 - DNA, 2017 bp, Homo sapiens
  Payload ID: 3480
  Gene Symbol: CFAP61
  Gene Name: cilia and flagella associated protein 61
  Uniprot ID: Q8NHU2
  ENST ID: ENST00000377306
  CDS Start-End: 77-1489
ggcagcgcgtggagtgcggcgtcctggagctgcggatgagtggacttttttctctcttttggggacaggataaaaaatgtcagtactcacttctccaagaggaaaggtagaagttgttcattgccgaagaacagaatcacaggatgtttattgtatcaaaagccttattagaaaatttacctgcaagctgtttgggaagctaaatatcatctatcttctagaaaaggccaaccttgctgttaccctctgcaatgacaaggaggagatcatggcccaggccaccttcctggactaccccaactggaatgttgccaagcaggatgactgggtgtcagtgttccgggagctcgacagtgacatcccatgcacacccctgaatacgttgttcatgcacctctttgtggccgtggatgagtattctgttggctgttgcaaagagattcttcgaaccgtgtataaggcagtgccagagctgcacttcatatttctcatcgtgccatcctacatgagcctaggctcaactctcataactgtttttgaccaagtggggaacatcccgtgtctgacgtatgaggaagactttgcagtgcatatatgtcacaggcacagccactatcctcagctgcacgttcgcaaagccagggtggaagaccatgacgatctcatgccaatatttatgcgctatgacacaattctgaaggaaacttacggtgaatacttcctggccgaactaatagaggcccaagatgaagagaatcatgctgttgtgtgtgaggtggaaggcacagctgttgggttcatgagtgtgtgctcaagagtgaacatgcaactgctgcatgagtgctttgacttgggccctttccacggactctgtttcccacatcctgatgacgttctggaatcaccacaagacctaagtgtccgaagaagtcaagatgctgagctcaggagtagcagccaaggttcccaaaaaatagtcgaggagttgcaggaacctgtctctccagataccatggaaaacatccagggaaatattgccagagaagctgcatccgaggaagctttaacagcagtccaaagtggaaatgttagtgaaccggaggacatagaaaaactcagtgacatctccactggatatgcacagtatcaccatgtcagcagtaggagcttggcatcgctcgtactgcctgaagagcccgtccacttccgccccatctacaggggagcctcagctgctttttgtattcagctgttttgtattgatgagaaatatgaagcaaggtcgctggattttatgaattttgttttcagtcttttttctgataagaacttctgtgtaatttctctgccccatctcacccccgagttcttcctcatccagaacttcgtgaaaatggtccctttcaacacctgcaccctcgagcaggacctctacgtcttccaccgggctggattgctcaaaaacatttgtctgggaaggagttcatagcatcaccagagtgtcaaagggctctgtggcatgcaagagtttcagacccacggccagagtggacttttcttccttgtgctcagagctagctcggagcaccgtagccacattgcagcccacagggaagggtggaatgagaaatggaagaggggaagcactttcctcttaggggacatgaatcacctctgttcatattatgtgatcaggaacttggttgcatggccctacttagctgcaagggagcctggaagatatgttgctggtaggttgggcatgtgtccagtaaaaaactcagttgattccttaattaaaaagaagaggaaaaaggatactatgggaacattatatctagtttttatcttgtgtatgtatagaagttctaaaaagttacacaggatttcagtaaccttatatgcctctgggaaacaggactgggaattgtaggtgaagatggtgactgactttgcattatgtctatctgttatgtttgatttttttgttttaattaataaacttttttttttttga

SEQ ID NO: 119733 - DNA, 1871 bp, Homo sapiens
  Payload ID: 3480
  Gene Symbol: CFAP61
  Gene Name: cilia and flagella associated protein 61
  Uniprot ID: Q8NHU2
  ENST ID: ENST00000377308
  CDS Start-End: 130-1092
ttagaaaggtgatgtgtgaggcccggcagctgttggtgttacagctattgtgtgggaaacaaaagccattctgttctgttccccagcctgcctttgtatcacggatagaggagctgtttcataaatgagatgagttatgctttaaaccatacaaacagaaaactaacattggaacctaaaattactgtcaatgccaagatcattgtggttggtgcatccagtgttggaatttccttcctagagacattggtattttgctctcacatgaagtttaataatcttaccctgatttcaactcatggactcccaggaaaaaaacttctggacactgaacaaaggaaatttttagccagcgaccactgttttaatgataaagattatgcactgatgtcactgtgctcctgggttaatgtcgtggtgggtagaatgaccggcatagaccgagcagccaagcacgttgtgctttccacggacgagatcgtgccctacgaccacctcatcctctgcaccgggcagcagtaccaggtcccatgccctacagaggctgatattagtcaacacctgacaaacagggaggttcccaacagcagtcagcggcggtacacggggaaagttccttgcaaccatttcactctcaacgaggaagaggattgctttaaggcactgatttggataaggaataactccatcaccacagaagggaatatcattgtctatgggaatacaattgatacttacaccaccgtggagacgctcttaaaccttggcgtgagcggcagccgcatccacctcgtgcagcccccgcccgcctccaccatcacctgcatcaacaactactcggtggagagcgccgtggcggacgcgctaggagccgccggagtcactatgtaccgggatgcgatcctggcccagtggaatgacggcctgcacccagaccccatctacagcgcctccttcaccacacccaccaagcctttcagactccagtgctctggggcattcttcctgggtcttaccattatctgcatattgccaagcctgccattccaactcccttggaggtacaaatggcacagcctaattatggtttagaactagtaaccggcagtgcgaaaaatgggacttacttccgaattcatattaacaagtataaaatggtggaaaccatcacgtgcctttctagggagcccttccccgcctccaactacatccgcttgtttggccagcacgagcaactcctcaacaacctgtgtgctcggtacgatgaaaacctgatcacagatctctatagctacttcaccgagccgtggtgcctggccctgttccacgatcgttttattgatctcaggaaagagttacgccaaatcttagcctccaaggaggaggaagatcttccttccatagagcagttagcccatcaaatagaagatgaggaaatcaacccgactgagaagcccaggcaatacctcaaaagagtttttgaggaatccatctacaaaaccctggtggagagaagcactcttgactacctgcactataaccgctaccacctgcccatgtacgcgtggccaggcatcgtttagttgtaggcagggtctcccctttatggttttcatttatttagttcctggaaacgcgctctgtagaaatagaaaagttctctgcagcctggtttgacagcgaagccagcccctggtggttttgttcattcctttccttccctgacttatgcctgtagttttctatcatcccagtaggtggcacacggccgtgtgcctctcttctggggcaggctcgctttacaaatcccaggcatgttcctgtgcagaataatccatttcagcaataaaatgagatcatagtgtgtaaaa

SEQ ID NO: 119734 - DNA, 776 bp, Homo sapiens
  Payload ID: 3480
  Gene Symbol: CFAP61
  Gene Name: cilia and flagella associated protein 61
  Uniprot ID: Q8NHU2
  ENST ID: ENST00000389656
  CDS Start-End: 4-606
cagatgagttatgctttaaaccatacaaacagaaaactaacattggaacctaaaattactgtcaatgccaagatcattgtggttggtgcatccagtgttggaatttccttcctagagacattggtattttgctctcacatgaagtttaataatcttaccctgatttcaactcatggactcccaggaaaaaaacttctggacactgaacaaaggaaatttttagccagcgaccactgttttaatgataaagattatgcactgatgtcactgtgctcctgggttaatgtcgtggtgggtagaatgaccggcatagaccgagcagccaagcacgttgtgctttccacggacgagatcgtgccctacgaccacctcatcctctgcaccgggcagcagtaccaggtcccatgccctacagaggctgatattagtcaacacctgacaaacagggaggttcccaacagcagtcagcggcggtacacggggaaagttccttgcaaccatttcactctcaacgaggaagaggattgctttaaggcactgatttggataaggaataactccatcaccacagaagatggaggaagagcatcagtgttattctgctgacttgcccagttgtcagggatggtgatgctgtggtgcccccttaaagggaaatgttttttcaagatttaagactgactcccagcagccagtgcataaagccatttggagtgcctgcttttgtccaccaaatagccaggataagaagtatgtggaaattagtttcctgtctt

SEQ ID NO: 119735 - DNA, 750 bp, Homo sapiens
  Payload ID: 3480
  Gene Symbol: CFAP61
  Gene Name: cilia and flagella associated protein 61
  ENST ID: ENST00000431753
  CDS Start-End: 1-683
agaacttcgtgaaaatggtccctttcaacacctgcaccctcgagcaggacctctacgtcttccaccgggctggattgctcaagtccattaatataagatttgccactctcttggatactcctggtgtggaaaatcttgtcagcaccctcatgttgaataaaagcatattggaggacttagaccgttacaacaaggctcgcaaagaccctgacattgagtacatacggtcccattacaacattgaagatttcatctacttcagtcaccaccagcgcgaagaacacgggcacatgcatcactttgccctcaaccccattttccggcactacaccaagttctttctgaaggagatcctgcgtttaggctttaaatcctgtctctactaccgtgtttacccaaaatccagagaaggcaagttccagaacccctacgcccactccctgacatctgcccttcattacttggttcccgtgcgaccacgacgacagattgtctatcctctggaaaagcttggcataaacgctccatcaaaggcggtctccaaggatccgatgagttatgctttaaaccatacaaacagaaaactaacattggaacctaaaattactgtcaatgccaagatcattgtggttggtgcatccagtgttggaatttccttcctagagacattggtattttggtgagttgtttcactctattgattgattggtttttaaataataaaaattatcttcctacatctgaagagaa

SEQ ID NO: 119736 - DNA, 559 bp, Homo sapiens
  Payload ID: 3480
  Gene Symbol: CFAP61
  Gene Name: cilia and flagella associated protein 61
  ENST ID: ENST00000442372
  CDS Start-End: 100-303
ggcttaagagagagcctcttcagaactccaagatttggatgtttttctatttttcccagaagaattcgtgttgaggtggaaggcacagctgttgggttcatgagtgtgtgctcaagagtgaacatgcaactgctgcatgagtgctttgacttgggccctttccacggactctgtttcccacatcctgatgacgttctggaatcaccacaagacctaagtgtccgaagaagtcaagagacaaggtctcattttgttgcccaggctggggtacagtggtgcaagtatggctcactgcagccttgaactctttctgggctcaagtgatcctcctacttcagcttcctgagtagctggactatagatgctgagctcaggagtagcagccaaggttcccaaaaaatagtcgaggagttgcaggaacctgtctctccagataccatggaaaacatccagggaaatattgccagagaagctgcatccgaggaagctttaacagcagtccaaagtggaaatgttagtgaaccggagtcgctggattttatgaattttgttttcagtc

SEQ ID NO: 119737 - DNA, 1946 bp, Homo sapiens
  Payload ID: 3480
  Gene Symbol: CFAP61
  Gene Name: cilia and flagella associated protein 61
  Uniprot ID: Q8NHU2
  ENST ID: ENST00000451767
  CDS Start-End: 9-1421
gataaaaaatgtcagtactcacttctccaagaggaaaggtagaagttgttcattgccgaagaacagaatcacaggatgtttattgtatcaaaagccttattagaaaatttacctgcaagctgtttgggaagctaaatatcatctatcttctagaaaaggccaaccttgctgttaccctctgcaatgacaaggaggagatcatggcccaggccaccttcctggactaccccaactggaatgttgccaagcaggatgactgggtgtcagtgttccgggagctcgacagtgacatcccatgcacacccctgaatacgttgttcatgcacctctttgtggccgtggatgagtattctgttggctgttgcaaagagattcttcgaaccgtgtataaggcagtgccagagctgcacttcatatttctcatcgtgccatcctacatgagcctaggctcaactctcataactgtttttgaccaagtggggaacatcccgtgtctgacgtatgaggaagactttgcagtgcatatatgtcacaggcacagccactatcctcagctgcacgttcgcaaagccagggtggaagaccatgacgatctcatgccaatatttatgcgctatgacacaattctgaaggaaacttacggtgaatacttcctggccgaactaatagaggcccaagatgaagagaatcatgctgttgtgtgtgaggtggaaggcacagctgttgggttcatgagtgtgtgctcaagagtgaacatgcaactgctgcatgagtgctttgacttgggccctttccacggactctgtttcccacatcctgatgacgttctggaatcaccacaagacctaagtgtccgaagaagtcaagatgctgagctcaggagtagcagccaaggttcccaaaaaatagtcgaggagttgcaggaacctgtctctccagataccatggaaaacatccagggaaatattgccagagaagctgcatccgaggaagctttaacagcagtccaaagtggaaatgttagtgaaccggaggacatagaaaaactcagtgacatctccactggatatgcacagtatcaccatgtcagcagtaggagcttggcatcgctcgtactgcctgaagagcccgtccacttccgccccatctacaggggagcctcagctgctttttgtattcagctgttttgtattgatgagaaatatgaagcaaggtcgctggattttatgaattttgttttcagtcttttttctgataagaacttctgtgtaatttctctgccccatctcacccccgagttcttcctcatccagaacttcgtgaaaatggtccctttcaacacctgcaccctcgagcaggacctctacgtcttccaccgggctggattgctcaaaaacatttgtctgggaaggagttcatagcatcaccagagtgtcaaagggctctgtggcatgcaagagtttcagacccacggccagagtggacttttcttccttgtgctcagagctagctcggagcaccgtagccacattgcagcccacagggaagggtggaatgagaaatggaagaggggaagcactttcctcttaggggacatgaatcacctctgttcatattatgtgatcaggaacttggttgcatggccctacttagctgcaagggagcctggaagatatgttgctggtaggttgggcatgtgtccagtaaaaaactcagttgattccttaattaaaaagaagaggaaaaaggatactatgggaacattatatctagtttttatcttgtgtatgtatagaagttctaaaaagttacacaggatttcagtaaccttatatgcctctgggaaacaggactgggaattgtaggtgaagatggtgactgactttgcattatgtctatctgttatgtttgatttttttgttttaattaataaacttttttttttt

SEQ ID NO: 119738 - DNA, 569 bp, Homo sapiens
  Payload ID: 3480
  Gene Symbol: CFAP61
  Gene Name: cilia and flagella associated protein 61
  ENST ID: ENST00000475466
  CDS Start-End: 163-569
agctgcggatgaggtgggtaacgccgtgctgactagcagcgacgcaaggactgcggtgcagggcgtccagggcgcatccccaggtcagcctccggaactgggatgaccaggcgaggacgagtggctctgtcgagccgtggcgccctgcaagggagataaaaaatgtcagtactcacttctccaagaggaaaggtagaagttgttcattgccgaagaacagaatcacaggatgtttattgtatcaaaagccttattagaaaatttacctgcaagctgtttgggaagctaaatatcatctatcttctagaaaaggccaaccttgctgttaccctctgcaatgacaaggaggagatcatggcccaggccaccttcctggactaccccaactggaatgttgccaagcaggatgactgggtgtcagtgttccgggagctcgacagtgacatcccatgcacacccctgaatacgttgttcatgcacctctttgtggccgtggatgagtattctgttggctgttgcaaagagattcttcgaaccgtgtataaggcagtgccagagctgcacttcat

SEQ ID NO: 119739 - DNA, 570 bp, Homo sapiens
  Payload ID: 3480
  Gene Symbol: CFAP61
  Gene Name: cilia and flagella associated protein 61
  ENST ID: ENST00000494029
  CDS Start-End: 43-210
gcgtggagtgcggcgtcctggagctgcggatgaggataaaaaatgtcagtactcacttctccaagaggaaaggtagaagttgttcattgccgaagaacagaatcacaggatgtttattgtatcaaaagccttattagaaaatttacctgcaagctgtttgggaagctaaatatcatctatcttctattttctcgttcttgtctgcactgacagtgtattccttctgtgataaaaacataactggaaagcccatgtcactttctgtcctcctgtcatctcctctccgcctcttcctccagttacatgcttgcttcttcctgttctcctcaagaaggaacatggagaaaaggccaaccttgctgttaccctctgcaatgacaaggaggagatcatggcccaggccaccttcctggactaccccaactggaatgttgccaagcaggatgactgggtgtcagtgttccgggagctcgacagtgacatcccatgcacacccctgaatacgttgttcatgcacctctttgtggccgtggatgagtattctgttggctgttgcaaagagattcttcg

SEQ ID NO: 119740 - DNA, 542 bp, Homo sapiens
  Payload ID: 3480
  Gene Symbol: CFAP61
  Gene Name: cilia and flagella associated protein 61
  ENST ID: ENST00000472660
  CDS Start-End: 61-542
gaatagagcagcagctgctgactcaagagcgccgggaaaaggcccctgaatacgttgttcatgcacctctttgtggccgtggatgagtattctgttggctgttgcaaagagattcttcgaaccgtgtataaggcagtgccagagctgcacttcatatttctcatcgtgccatcctacatgagcctaggctcaactctcataactgtttttgaccaagtggggaacatcccgtgtctgacgtatgaggaagactttgcagtgcatatatgtcacaggcacagccactatcctcagctgcacgttcgcaaagccagggtggaagaccatgacgatctcatgccaatatttatgcgctatgacacaattctgaaggaaacttacggtgaatacttcctggccgaactaatagaggcccaagatgaagagaatcatgctgttgtgtgtgaggtggaaggcacagctgttgggttcatgagtgtgtgctcaagagtgaacatgcaactgctgcatgagtgctttgacttgggccctttccacggact

SEQ ID NO: 119741 - DNA, 3902 bp, Homo sapiens
  Payload ID: 3481
  Gene Symbol: CFAP69
  Gene Name: cilia and flagella associated protein 69
  Uniprot ID: A5D8W1
  ENST ID: ENST00000389297
  CDS Start-End: 252-3077
agcaacgcgctggcttgtgttaacaaccggcccgggatcagaggtctgggtcaactggggggcggcagcggcgctaagcggactgtatggcggtggcctaggcccctggcggaattttgggacctttcgcgactctagcgactctcaggctgccttcccttctcggtggcggggcctctttgggcccagcggctgcgggcgcactgtaggacaggaagatccccccactctccaccccgccgccaccggccatgtggacagaggaagccggggcgaccgccgaggcccaggaatccggcatcaggaacaagtctagcagttccagtcaaatcccggtggttggggtggtgacggaggacgatgaggcgcaggatgttttcaagcctatggaccttaatcgtgtcatcaaactcctcgaagagactgataaagatggcttggaagaaaaacaacttaaatttgtcaagaaactggtacagtgttatcagaatggacttccattaagggatttagcacagatatttaaaattctgaatctgtgttcaggaaaaataaaaaaccagcctcgttttatagaatctgcatatgatatcataaaactgtgtggcttgccatttttgaaaaagaaagtgtcggatgaaataacttatgctgaagatactgctaattcaattgcacttctgggtgacttaatgaaaataccaagttctgaattgaggatacaaatttgtaagtgtattgttgatttttatcatgcagaaccaccaaagaagcatattccaggttaccagcaagcgagttcatcatacaagattcaaatggctgaagttggaggattagcaaaaacaatggtccagtcaatgaccttgcttgaaaatcaacttgttgagaaactttgggtacttaaagttctgcagcatctctcaacttctgaagttaattgtactataatgatgaaagcacaagcagccagtggaatctgtactcacctcaatgacccagatccctctggacagcttttatttcgttcatcagaaatactttggaacttgctggaaaaatcttcaaaagaagaagtcatacaacagcttagtaacttggaatgtttgctggctttgaaggaagtatttaaaaatctgtttatgagaggtttcagtcattatgaccgtcagcttagaaatgacatattagtgatcactacaattatagctcaaaatcctgaagcaccaatgattgaatgtggctttaccaaggatttgatactgtttgccacctttaatgaagttaaaagtcaaaatcttttggtaaaaggacttaagctttctaattcctatgaagattttgagttgaagaaattactattcaacgtaattgtgatcttatgtaaagatttacctactgtacagctattaattgatggcaaagttattttggctttgtttacctatgttaagaagcctgagaagcaaaaaataattgactggtctgcagcacagcatgaagaattacaactgcatgcaattgccactttgtcatcagtggctcctttattaatagaagaatacatgtcatgccagggaaatgctcgagtccttgcatttctagaatggtgtgagagtgaagatccgtttttcagtcatggtaacagttttcatggtacaggtggccgaggcaacaagtttgcccagatgcgttacagtttaagactcctgagagccgtggtctaccttgaagatgagactgtaaacaaagatctttgtgaaaagggaacaattcagcaaatgataggaatctttaaaaatataataagcaagcctaatgaaaaggaagaagccattgttttggaaatccagtctgatatattacttatcctatctggcctttgtgagaatcacattcaaaggaaggaaattttcggaactgaaggagtagatatcgttcttcatgtgatgaaaacagaccccaggaagttacagagtggcttaggctataatgtacttctttttagtacattggacagcatttggtgctgtattttgggatgttatccctcagaggattattttcttgaaaaggaaggcatttttctccttttggatttgttagcattgaaccaaaaaaaattctgtaatctaatacttggaataatggttgaattttgtgataatcccaaaactgcagctcatgtcaatgcttggcaagggaagaaggatcagacagctgctagtcttttaattaaattgtggagaaaggaggaaaaagaactaggagtaaaacgtgataaaaatgggaagatcattgatacaaaaaaacctctatttactagctttcaagaagagcaaaaaatcatcccactgcctgctaactgcccatctattgcggttatggatgtttctgagaatattagagcaaaaatttatgctatattgggcaaactagattttgaaaatttacctggcctatctgctgaagattttgtcaccctttgtatcatacatagatatcttgattttaaaattggagaaatatggaatgaaatatatgaagaaataaaattagaaaaattaagaccagtcactacagataaaaaagctttggaagctattacaacagcatcagaaaatattggaaagatggttgcttctctgcaaagtgatataattgaaagccaagcatgccaagacatgcaaaatgaacaaaaagtatatgcaaaaatacaggccacgcacaagcaaagagagctggctaataaatcatgggaagatttcttggctagaacatcaaacgctaaaacgttaaagaaagcaaaaagccttcaagaaaaagctatagaagcctccagataccataaacgaccacaaaatgcaatatttcaccaaacacatattaaaggccttaacacaacggtgccctctggtggagtagtaacagtggaaagcactcctgcccgattagtaggaggacctctggttgatacggatattgctcttaaaaaactgcccattcgaggaggagccttgcagagggtgaaagcagttaaaattgtggatgcaccaaaaaagagtattcctacgtaatatactatagagactttttgaaataaagtcagcttataattttttagctgaatatatctttatacatatgtaaagccaatattttagaataagtattttagtataaatattttagtaaaatactataaaaataaaaggacatataatttatttttatggaaaacatcaacatgtaatatcagaagagttgtcatcagtttctttggaaaggctaccaattttactaagtgaaattgtaaaacatagtacatcagttaggactctgttggttgcatgtgaactattctaactagtttaagtcagaaaaaaaatttcttacaggctctatacctatcaaatctaggaggaatttagactacaggcattgctgaatctaaggactaaaactatatgagtaggatcttctccttccctagcagctcctggcttacattctcttaggttcatgcctgtgtctctgtggtttctgcagctgcctatgcatctcaggacccctgattgcccacatgcctacggtagtcctgagccattcaccatgactttggccatggctgagtactgcctattcctggagccagaagcagggcaactccatccaaaacatatggatagagtggggaatcagggtactattatcagaagcaagtatatatgaatattgggcagcaagataaacaataactctgcaacaagtatgttggtcaaaataaaattatgttttctctgctataaaagcaaatgttagtcatgagccaaatggtaaaaaagaaaaaaaaatgcagctggttttactcttaatatataaatatacaaagcaaactctaa

SEQ ID NO: 119742 - DNA, 1489 bp, Homo sapiens
  Payload ID: 3481
  Gene Symbol: CFAP69
  Gene Name: cilia and flagella associated protein 69
  ENST ID: ENST00000449577
  CDS Start-End: 1-1437
gaattacaactgcatgcaattgccactttgtcatcagtggctcctttattaatagaagaatacatgtcatgccagggaaatgctcgagtccttgcatttctagaatggtgtgagagtgaagatccgtttttcagtcatggtaacagttttcatggtacaggtggccgaggcaacaagtttgcccagatgcgttacagtttaagactcctgagagccgtggtctaccttgaagatgagactgtaaacaaagatctttgtgaaaagggaacaattcagcaaatgataggaatctttaaaaatataataagcaagcctaatgaaaaggaagaagccattgttttggaaatccagtctgatatattacttatcctatctggcctttgtgagaatcacattcaaaggaaggaaattttcggaactgaaggagtagatatcgttcttcatgtgatgaaaacagaccccaggaagttacagagtggcttaggctataatgtacttctttttagtacattggacagcatttggtgctgtattttgggatgttatccctcagaggattattttcttgaaaaggaaggcatttttctccttttggatttgttagcattgaaccaaaaaaaattctgtaatctaatacttggaataatggttgaattttgtgataatcccaaaactgcagctcatgtcaatgcttggcaagggaagaaggatcagacagctgctagtcttttaattaaattgtggagaaaggaggaaaaagaactaggagtaaaacgtgataaaaatgggaagatcattgattttgaaaatttacctggcctatctgctgaagattttgtcaccctttgtatcatacatagatatcttgattttaaaattggagaaatatggaatgaaatatatgaagaaataaaattagaaaaattaagaccagtcactacagataaaaaagctttggaagctattacaacagcatcagaaaatattggaaagatggttgcttctctgcaaagtgatataattgaaagccaagcatgccaagacatgcaaaatgaacaaaaagtatatgcaaaaatacaggccacgcacaagcaaagagagctggctaataaatcatgggaagatttcttggctagaacatcaaacgctaaaacgttaaagaaagcaaaaagccttcaagaaaaagctatagaagcctccagataccataaacgaccacaaaatgcaatatttcaccaaacacatattaaaggccttaacacaacggtgccctctggtggagtagtaacagtggaaagcactcctgcccgattagtaggaggacctctggttgatacggatattgctcttaaaaaactgcccattcgaggaggagccttgcagagggtgaaagcagttaaaattgtggatgcaccaaaaaagagtattcctacgtaatatactatagagactttttgaaataaagtcagcttataattttttagctgaa

SEQ ID NO: 119743 - DNA, 1545 bp, Homo sapiens
  Payload ID: 3481
  Gene Symbol: CFAP69
  Gene Name: cilia and flagella associated protein 69
  ENST ID: ENST00000457170
  CDS Start-End: 1-1545
gatggcttggaagaaaaacaacttaaatttgtcaagaaactggtacagtgttatcagaatggacttccattaagggatttagcacagatatttaaaattctgaatctgtgttcaggaaaaataaaaaaccagcctcgttttatagaatctgcatatgatatcataaaactgtgtggcttgccatttttgaaaaagaaagtgtcggatgaaataacttatgctgaagatactgctaattcaattgcacttctgggtgacttaatgaaaataccaagttctgaattgaggatacaaatttgtaagtgtattgttgatttttatcatgcagaaccaccaaagaagcatattccaggttaccagcaagcgagttcatcatacaagattcaaatggctgaagttggaggattagcaaaaacaatggtccagtcaatgaccttgcttgaaaatcaacttgttgagaaactttgggtacttaaagttctgcagcatctctcaacttctgaagttaattgtactataatgatgaaagcacaagcagccagtggaatctgtactcacctcaatgacccagatccctctggacagcttttatttcgttcatcagaaatactttggaacttgctggaaaaatcttcaaaagaagaagtcatacaacagcttagtaacttggaatgtttgctggctttgaaggaagtatttaaaaatctgtttatgagaggtttcagtcattatgaccgtcagcttagaaatgacatattagtgatcactacaattatagctcaaaatcctgaagcaccaatgattctattaattgatggcaaagttattttggctttgtttacctatgttaagaagcctgagaagcaaaaaataattgactggtctgcagcacagcatgaagaattacaactgcatgcaattgccactttgtcatcagtggctcctttattaatagaagaatacatgtcatgccagggaaatgctcgagtccttgcatttctagaatggtgtgagagtgaagatccgtttttcagtcatggtaacagttttcatggtacaggtggccgaggcaacaagtttgcccagatgcgttacagtttaagactcctgagagccgtggtctaccttgaagatgagactgtaaacaaagatctttgtgaaaagggaacaattcagcaaatgataggaatctttaaaaatataataagcaagcctaatgaaaaggaagaagccattgttttggaaatccagtctgatatattacttatcctatctggcctttgtgagaatcacattcaaaggaaggaaattttcggaactgaaggagtagatatcgttcttcatgtgatgaaaacagaccccaggaagttacagagtggcttaggctataatgtacttctttttagtacattggacagcatttggtgctgtattttgggatgttatccctcagaggattattttcttgaaaaggaaggcatttttctccttttggatttgttagcaaaggatcagacagctgctagtcttttaattaaattgtgg

SEQ ID NO: 119744 - DNA, 526 bp, Homo sapiens
  Payload ID: 3481
  Gene Symbol: CFAP69
  Gene Name: cilia and flagella associated protein 69
  ENST ID: ENST00000418199
  CDS Start-End: 1-269
caatggtccagtcaatgaccttgcttgaaaatcaacttgttgagaaactttgggtacttaaagttctgcagcatctctcaacttctgaagttaattgtactataatgatgaaagcacaagcagccagtggaatctgtactcacctcaatgacccagatccctctggacagcttttatttcgttcatcagaaatactttggaacttgctggaaaaatcttcaaaagaagaagtcatacaacagcttagtaacttggaatgtttgctgtaagcgtatgtggttagataggaatgttcttttaatcttaaaatgacagccagtgacataactaacatctttgtttgaatctgtgttcaattatgttttagattcatgtaatggctatgtttcaggacatcttttttgttccatggtataaatgaatctgcacaataacaagccacacttttctatgtggaaggctcttgaagtagcttcttaacactaaaatataacttggaatatagataaagtaaaattagacttta

SEQ ID NO: 119745 - DNA, 2299 bp, Homo sapiens
  Payload ID: 3481
  Gene Symbol: CFAP69
  Gene Name: cilia and flagella associated protein 69
  ENST ID: ENST00000427396
  CDS Start-End: 231-590
aacaaccggcccgggatcagaggtctgggtcaactggggggcggcagcggcgctaagcggactgtatggcggtggcctaggcccctggcggaattttgggacctttcgcgactctagcgactctcaggctgccttcccttctcggtggcggggcctctttgggcccagcggctgcgggcgcactgtaggacaggaagatccccccactctccaccccgccgccaccggccatgtggacagaggaagccggggcgaccgccgaggcccaggaatccggcatcaggaacaagtctagcagttccagtcaaatcccggtggttggggtggtgacggaggacgatgaggcgcaggatgttttcaagcctatggaccttaatcgtgtcatcaaactcctcgaagagactgataaagatggcttggaagaaaaacaacttaaatttgtcaagaaactggtacagtgttatcagaatggacttccattaagggatttagcacagatatttaaaattctgaatctgtgttcaggaaaaataaaaaaccagcctcgttttatagaatctgcatatgatatcataaaactgtgtgggtgacttaatgaaaataccaagttctgaattgaggatacaaatttgtaagtgtattgttgatttttatcatgcagaaccaccaaagaagcatattccaggttaccagcaagcgagttcatcatacaagattcaaatggctgaagttggaggattagcaaaaacaatggtccagtcaatgaccttgcttgaaaatcaacttgttgagaaactttgggtacttaaagttctgcagcatctctcaacttctgaagttaattgtactataatgatgaaagcacaagcagccagtggaatctgtactcacctcaatgacccagatccctctggacagcttttatttcgttcatcagaaatactttggaacttgctggaaaaatcttcaaaagaagaagtcatacaacagcttagtaacttggaatgtttgctgaatgtggctttaccaaggatttgatactgtttgccacctttaatgaagttaaaagtcaaaatcttttggtaaaaggacttaagctttctaattcctatgaagattttgagttgaagaaattactattcaacgtaattgtgatcttatgtaaagatttacctactgtacagctattaattgatggcaaagttattttggctttgtttacctatgttaagaagcctgagaagcaaaaaataattgactggtctgcagcacagcatgaagaattacaactgcatgcaattgccactttgtcatcagtggctcctttattaatagaagaatacatgtcatgccagggaaatgctcgagtccttgcatttctagaatggtgtgagagtgaagatccgtttttcagtcatggtaacagttttcatggtacaggtggccgaggcaacaagtttgcccagatgcgttacagtttaagactcctgagagccgtggtctaccttgaagatgagactgtaaacaaagatctttgtgaaaagggaacaattcagcaaatgataggaatctttaaaaatataataagcaagcctaatgaaaaggaagaagccattgttttggaaatccagtctgatatattacttatcctatctggcctttgtgagaatcacattcaaaggaaggaaattttcggaactgaaggagtagatatcgttcttcatgtgatgaaaacagaccccaggaagttacagagtggcttaggctataatgtacttctttttagtacattggacagcatttggtgctgtattttgggatgttatccctcagaggattattttcttgaaaaggaaggcatttttctccttttggatttgttagcattgaaccaaaaaaaattctgtaatctaatacttggaataatggttgaattttgtgataatcccaaaactgcagctcatgtcaatgcttggcaagggaagaaggatcagacagctgctagtcttttaattaaattgtggagaaaggaggaaaaagaactaggagtaaaacgtgataaaaatgggaagatcattgatacaaaaaaacctctatttactagctttcaagaagagcaaaaaatcatcccactgcctgctaactgcccatctattgcggttatggatgtttctgagaatattagagcaaaaatttatgctatattgggcaaactagattttgaaaatttacctggcctatctgctgaagattttgtcaccctttgtatcatacatagatatcttgattttaaaattgg

SEQ ID NO: 119746 - DNA, 2614 bp, Homo sapiens
  Payload ID: 3481
  Gene Symbol: CFAP69
  Gene Name: cilia and flagella associated protein 69
  Uniprot ID: A5D8W1
  ENST ID: ENST00000451029
  CDS Start-End: 215-904
tcagaggtctgggtcaactggggggcggcagcggcgctaagcggactgtatggcggtggcctaggcccctggcggaattttgggacctttcgcgactctagcgactctcaggctgccttcccttctcggtggcggggcctctttgggcccagcggctgcgggcgcactgtaggacaggaagatccccccactctccaccccgccgccaccggccatgtggacagaggaagccggggcgaccgccgaggcccaggaatccggcatcaggaacaagtctagcagttccagtcaaatcccggtggttggggtggtgacggaggacgatgaggcgcaggatgttttcaagcctatggaccttaatcgtgtcatcaaactcctcgaagagactgataaagatggcttggaagaaaaacaacttaaatttgtcaagaaactggtacagtgttatcagaatggacttccattaagggatttagcacagatatttaaaattctgaatctgtgttcaggaaaaataaaaaaccagcctcgttttatagaatctgcatatgatatcataaaactgtgtggcttgccatttttgaaaaagaaagtgtcggatgaaataacttatgctgaagatactgctaattcaattgcacttctgggtgacttaatgaaaataccaagttctgaattgaggatacaaatttgtaagtgtattgttgatttttatcatgcagaaccaccaaagaagcatattccaggttaccagcaagcgagttcatcatacaagattcaaatggctgaagttggaggattagcaaaaacaatggtccagtcaatgaccttgcttgaaaatcaacttgttgagaaactttgggtacttaaagttctgcagcatctctcaacttctgggctttgaaggaagtatttaaaaatctgtttatgagaggtttcagtcattatgaccgtcagcttagaaatgacatattagtgatcactacaattatagctcaaaatcctgaagcaccaatgattgagaatttctctcggagctactactcatctgtaccagaagctgagccttcacatattttataattaaaaatcattgaatgattgaaattatttaatagagatccttggcaacaatattcacaagtcagtcacgaatgtggctttaccaaggatttgatactgtttgccacctttaatgaagttaaaagtcaaaatcttttggtaaaaggacttaagctttctaattcctatgaagattttgagttgaagaaattactattcaacgtaattgtgatcttatgtaaagatttacctactgtacagctattaattgatggcaaagttattttggctttgtttacctatgttaagaagcctgagaagcaaaaaataattgactggtctgcagcacagcatgaagaattacaactgcatgcaattgccactttgtcatcagtggctcctttattaatagaagaatacatgtcatgccagggaaatgctcgagtccttgcatttctagaatggtgtgagagtgaagatccgtttttcagtcatggtaacagttttcatggtacaggtggccgaggcaacaagtttgcccagatgcgttacagtttaagactcctgagagccgtggtctaccttgaagatgagactgtaaacaaagatctttgtgaaaagggaacaattcagcaaatgataggaatctttaaaaatataataagcaagcctaatgaaaaggaagaagccattgttttggaaatccagtctgatatattacttatcctatctggcctttgtgagaatcacattcaaaggaagctccatagtgaactctgagtctcagagattgataatttaaatgttaaatagcaagggatggaattggaaagataaaaacaaaaaaatgatggtttcaatagatagattttaagtgaacgcctgtttagctccaagctttgatgcaatttctcatcatattctaccaccctgtgcctgggctcctctggaaaaataatcataatcttgcttactgggaaccagaactgaacagcaaggcaataagaaaggaaattttcggaactgaaggagtagatatcgttcttcatgtgatgaaaacagaccccaggaagttacagagtggcttaggctataatgtacttctttttagtacattggacagcatttggtgctgtattttgggatgttatccctcagaggattattttcttgaaaaggaaggcatttttctccttttggatttgttagcattgaaccaaaaaaaattctgtaatctaatacttggaataatggttgaattttgtgataatcccaaaactgcagctcatgtcaatgcttggcaagggaagaaggatcagacagctgctagtcttttaattaaattgtggagaaaggaggaaaaagaactaggagtaaaacgtgataaaaatgggaagatcattgatacaaaaaaacctctatttactagctttcaagaagagcaaaaaatcatcccactgcctgctaactgcccatctattgcggttatggatgtttctgagaatattagagcaaaaatttatgctatattgggcaaactagattttgaaaa

SEQ ID NO: 119747 - DNA, 611 bp, Homo sapiens
  Payload ID: 3481
  Gene Symbol: CFAP69
  Gene Name: cilia and flagella associated protein 69
  ENST ID: ENST00000445156
  CDS Start-End: 1-280
tgaacaaaaagtatatgcaaaaatacaggccacgcacaagcaaagagagctggctaataaatcatgggaagatttcttggctagaacatcaaacgctaaaacgttaaaggtgccctctggtggagtagtaacagtggaaagcactcctgcccgattagtaggaggacctctggttgatacggatattgctcttaaaaaactgcccattcgaggaggagccttgcagagggtgaaagcagttaaaattgtggatgcaccaaaaaagagtattcctacgtaatatactatagagactttttgaaataaagtcagcttataattttttagctgaatatatctttatacatatgtaaagccaatattttagaataagtattttagtataaatattttagtaaaatactataaaaataaaaggacatataatttatttttatggaaaacatcaacatgtaatatcagaagagttgtcatcagtttctttggaaaggctaccaattttactaagtgaaattgtaaaacatagtacatcagttaggactctgttggttgcatgtgaactattctaactagtttaagtcagaaaaaaaatttcttacaggctctatacc

SEQ ID NO: 119748 - DNA, 573 bp, Homo sapiens
  Payload ID: 3481
  Gene Symbol: CFAP69
  Gene Name: cilia and flagella associated protein 69
  ENST ID: ENST00000412839
  CDS Start-End: 1-511
cccatctattgcggttatggatgtttctgagaatattagagcaaaaatttatgctatattgggcaaactagattttgaaaatttacctggcctatctgctgaagattttgtcaccctttgtatcatacatagatatcttgattttaaaatacaggccacgcacaagcaaagagagctggctaataaatcatgggaagatttcttggctagaacatcaaacgctaaaacgttaaagaaagcaaaaagccttcaagaaaaagctatagaagcctccagataccataaacgaccacaaaatgcaatatttcaccaaacacatattaaaggccttaacacaacggtgccctctggtggagtagtaacagtggaaagcactcctgcccgattagtaggaggacctctggttgatacggatattgctcttaaaaaactgcccattcgaggaggagccttgcagagggtgaaagcagttaaaattgtggatgcaccaaaaaagagtattcctacgtaatatactatagagactttttgaaataaagtcagcttataattttttagctgaatatatcttta

SEQ ID NO: 119749 - DNA, 3032 bp, Homo sapiens
  Payload ID: 3481
  Gene Symbol: CFAP69
  Gene Name: cilia and flagella associated protein 69
  Uniprot ID: A5D8W1
  ENST ID: ENST00000497910
  CDS Start-End: 211-2982
aggtctgggtcaactggggggcggcagcggcgctaagcggactgtatggcggtggcctaggcccctggcggaattttgggacctttcgcgactctagcgactctcaggctgccttcccttctcggtggcggggcctctttgggcccagcggctgcgggcgcactgtaggacaggaagatccccccactctccaccccgccgccaccggccatgtggacagaggaagccggggcgaccgccgaggcccaggaatccggcatcaggaacaagtctagcagttccagtcaaatcccggtggttggggtggtgacggaggacgatgaggcgcaggatgttttcaagcctatggaccttaatcgtgtcatcaaactcctcgaagagactgataaagatggcttggaagaaaaacaacttaaatttgtcaagaaactggtacagtgttatcagaatggacttccattaagggatttagcacagatatttaaaattctgaatctgtgttcaggaaaaataaaaaaccagcctcgttttatagaatctgcatatgatatcataaaactgtgtggcttgccatttttgaaaaagaaagtgtcggatgaaataacttatgctgaagatactgctaattcaattgcacttctgggtgacttaatgaaaataccaagttctgaattgaggatacaaatttgttaccagcaagcgagttcatcatacaagattcaaatggctgaagttggaggattagcaaaaacaatggtccagtcaatgaccttgcttgaaaatcaacttgttgagaaactttgggtacttaaagttctgcagcatctctcaacttctgaagttaattgtactataatgatgaaagcacaagcagccagtggaatctgtactcacctcaatgacccagatccctctggacagcttttatttcgttcatcagaaatactttggaacttgctggaaaaatcttcaaaagaagaagtcatacaacagcttagtaacttggaatgtttgctggctttgaaggaagtatttaaaaatctgtttatgagaggtttcagtcattatgaccgtcagcttagaaatgacatattagtgatcactacaattatagctcaaaatcctgaagcaccaatgattgaatgtggctttaccaaggatttgatactgtttgccacctttaatgaagttaaaagtcaaaatcttttggtaaaaggacttaagctttctaattcctatgaagattttgagttgaagaaattactattcaacgtaattgtgatcttatgtaaagatttacctactgtacagctattaattgatggcaaagttattttggctttgtttacctatgttaagaagcctgagaagcaaaaaataattgactggtctgcagcacagcatgaagaattacaactgcatgcaattgccactttgtcatcagtggctcctttattaatagaagaatacatgtcatgccagggaaatgctcgagtccttgcatttctagaatggtgtgagagtgaagatccgtttttcagtcatggtaacagttttcatggtacaggtggccgaggcaacaagtttgcccagatgcgttacagtttaagactcctgagagccgtggtctaccttgaagatgagactgtaaacaaagatctttgtgaaaagggaacaattcagcaaatgataggaatctttaaaaatataataagcaagcctaatgaaaaggaagaagccattgttttggaaatccagtctgatatattacttatcctatctggcctttgtgagaatcacattcaaaggaaggaaattttcggaactgaaggagtagatatcgttcttcatgtgatgaaaacagaccccaggaagttacagagtggcttaggctataatgtacttctttttagtacattggacagcatttggtgctgtattttgggatgttatccctcagaggattattttcttgaaaaggaaggcatttttctccttttggatttgttagcattgaaccaaaaaaaattctgtaatctaatacttggaataatggttgaattttgtgataatcccaaaactgcagctcatgtcaatgcttggcaagggaagaaggatcagacagctgctagtcttttaattaaattgtggagaaaggaggaaaaagaactaggagtaaaacgtgataaaaatgggaagatcattgatacaaaaaaacctctatttactagctttcaagaagagcaaaaaatcatcccactgcctgctaactgcccatctattgcggttatggatgtttctgagaatattagagcaaaaatttatgctatattgggcaaactagattttgaaaatttacctggcctatctgctgaagattttgtcaccctttgtatcatacatagatatcttgattttaaaattggagaaatatggaatgaaatatatgaagaaataaaattagaaaaattaagaccagtcactacagataaaaaagctttggaagctattacaacagcatcagaaaatattggaaagatggttgcttctctgcaaagtgatataattgaaagccaagcatgccaagacatgcaaaatgaacaaaaagtatatgcaaaaatacaggccacgcacaagcaaagagagctggctaataaatcatgggaagatttcttggctagaacatcaaacgctaaaacgttaaagaaagcaaaaagccttcaagaaaaagctatagaagcctccagataccataaacgaccacaaaatgcaatatttcaccaaacacatattaaaggccttaacacaacggtgccctctggtggagtagtaacagtggaaagcactcctgcccgattagtaggaggacctctggttgatacggatattgctcttaaaaaactgcccattcgaggaggagccttgcagagggtgaaagcagttaaaattgtggatgcaccaaaaaagagtattcctacgtaatatactatagagactttttgaaataaagtcagcttataattttttagctg

SEQ ID NO: 119750 - DNA, 3703 bp, Homo sapiens
  Payload ID: 3482
  Gene Symbol: CFAP70
  Gene Name: cilia and flagella associated protein 70
  Uniprot ID: Q5T0N1
  ENST ID: ENST00000310715
  CDS Start-End: 122-3487
agctcagcgtctcgctccctgctcccggccccagagggttatcgcgagtcttggaataaacttgctcgtgcgatggccaaaaagaccaaagaaaacagagggacttttcccagttggtgatatggagcaagtgccatcagcaggcagactcgtgcagatcaccgtgacagagggatatgatttgaaaggttttaaaggagatactccagttacctttattcgagcagaattcaatcaagtggttctgggagactctgcaaaaattactgtttctccagaaggaagtgcaaaatacaacttcactagcagttttgagtttaatcctgaaggaggaatcacttcagatgacctcgctcacaaacctgtgttcttaactgtgactgaagttttaccaaaggaaaagaaacagaaagaagagaagaccttaattcttggtcaggctgtggtggaccttcttcccttactggaaggacagagttcatttcaaacaacagttccattgcaccctgtgcaaggctcacccttagaaactcctagatcaagtgctaagcagtgcagtcttgaagttaaagtattagtggcagagcctttactgaccacagcccagatctcagggggcaatctactgaaggtcacgttggaggctgcttactctgtgcctgaatccttcattccaacaggtcctgggcagaactacatggtcggtctgcaagttccatcacttggagagaaggactatcccattttatttaagaatggaactctgaagcttggaggggaaagggaacctgttccccggcccaaaaagtggccaattgccaacattctggctccaggagctaataacattcctgatgcattcattgttggtggtccctatgaagaagaagaaggagaactcaaccatcctgaggacagcgaatttaggaatcaagcagagtgcataaagaaaaggattatttgggacttggaaagtcgctgctaccttgatccttctgcagtggtcagttttcagaagcgaattgccgattgccggctttggcctgtagagatcacaagagttcctctggtcactatacccaaagggaaagctggcaaaactgaaaagactgatgaagaagctcagctttcgtttcatggtgtggcttatgttaatatggtcccattgttgtatccaggtgtgaagagaattcggggagcttttcatgtttacccttacctagacagtgtagtccatgaaaagaccaaatgtttattgagcttgttccgggatattggccatcacttgattcataataataaaataggaggaattaattctctgctgtccaaacaagctgtttctaagaatctgaaagaagataaaccagtgaaagaaaaggatatagatggaaggcctaggcctggggatgtgcaggcacctagtataaaatctcagagctcagatactcctttggaaggtgaaccccctctaagtcacaatcctgaaggacagcaatatgtagaagcagggacatacattgtgttggaaattcagctggacaaagccttggttccaaagcgaatgccagaggagctagccagaagggtcaaggaaatgattcctccaaggcctcctcttacccgtcggacaggaggagctcagaaggcaatgagtgactaccacatacagatcaagaatatttctagagccattctagatgaatactacagaatgtttggaaaacaggtggccaaactggagagtgatatggatagtgaaaccttggaggagcagaagtgccagctcagctatgaacttaattgctctggaaaatactttgctttcaaagaacaactcaagcatgctgtggtaaagattgtgagagataaatacttgaagacaacatcatttgaaagccaggaggaacttcagacatttatcagtgagctctatgtgttcttagtagatcagatgcatgtagccctaaaccagaccatgccagatgatgtccaaggcactgttgcaaccatttatacaagcagtgaacagcttcaactctttgcatttgaagcagaagtcaatgagaactttgagatggcagcagcatattataaagagagattggtccgtgagccccagaatctggatcactggttggactatggtgccttctgcctcctaactgaagacaacatcaaagcacaagagtgttttcagaaagccctttccctcaaccagagtcatatccacagcttgttgctgtgtggtgtcctggctgtcctgttggagaactatgagcaagcagaaattttctttgaggatgctacttgcttggaaccaactaatgttgtagcctggactttacttggtttgtactatgaaattcaaaacaatgatattcgaatggaaatggcatttcatgaggcctccaaacagcttcaggcacggatgcttcaggcacaagtaacaaagcaaaagagcactggtgtagaagacactgaggaaagagggaagagagaatctagtttaggcccttggggaatcacaaatggttctgcaacagcaatcaaggtggaagccccagcaggaccaggagctgcattatctattctagacaaatttcttgaagaatcctccaaactgcagtctgattcacaagaacccattttgactacacaaacttgggatccaagtataagccaaaaaccatctaacacatttatcaaggagataccaacaaagaaagaagcatcaaaatgtcaagattcatcagctcttctgcatcccggccttcattatggtgtttctcaaactaccaccatcttcatggagaccatacatttcttgatgaaagtcaaggctgtgcagtatgtgcacagagtgcttgcacatgagctgttatgccctcaaggaggccccagctgtgaatattacttggtgctggcccaaacacacattcttaagaagaactttgccaaggcagaggaataccttcaacaagcagcccagatggactacctgaaccccaatgtctggggcctgaagggccatctctattttctgagtggaaatcattctgaggccaaggcatgctatgaacgaaccattagctttgtagtggatgcttctgagatgcacttcatcttcctgagactggggctcatctatctggaagagaaagagtatgaaaaggcaaagaaaacctatatgcaagcctgtaagagatcaccttcatgccttacctggctaggactgggaatcgcctgctatcggctggaggagctcacagaggctgaggatgctctttctgaagccaatgcattgaacaactacaatgctgaagtatgggcatatctggctctggtctgcctgaaagttggacggcaattagaagctgagcaggcctacaagtacatgatcaagctgaaattgaaagatgaggctctgcttgcagagatccacacactacaggaaacagttggctttggaaatccatctttctgatacccctccagctgaacaattttctgcatgggactctgagttcctttccttcccagagagttttaccgtatgaagcctggagctggagaacgaaagaatcttcactataaacagagacccattcatttatttccattggctgtgttactggatgttttactggttgacgagaaactgggtcacaataaaaaaatggagatatgaaactcaaaattc

SEQ ID NO: 119751 - DNA, 1403 bp, Homo sapiens
  Payload ID: 3482
  Gene Symbol: CFAP70
  Gene Name: cilia and flagella associated protein 70
  ENST ID: ENST00000340329
  CDS Start-End: 105-1190
agtaagttctcgcgagaggtagttggttgctatagttgtcaaaaacataactgaggctgctgcagagaccaaagaaaacagagggacttttcccagttggtgatatggagcaagtgccatcagcaggcagactcgtgcagatcaccgtgacagagggatatgatttgaaaggttttaaaggagatactccagttacctttattcgagcagaattcaatcaagtggttctgggagactctgcaaaaattactgtttctccagaaggaagtgcaaaatacaacttcactagcagttttgagtttaatcctgaaggaggaatcacttcagatgacctcgctcacaaacctgtgttcttaactgtgactgaagttttaccaaaggaaaagaaacagaaagaagagaagaccttaattcttggtcaggctgtggtggaccttcttcccttactggaaggacagagttcatttcaaacaacagttccattgcaccctgtgcaaggctcacccttagaaactcctagatcaagtgctaagcagtgcagtcttgaagttaaagtattagtggcagagcctttactgaccacagcccagatctcagggggcaatctactgaaggtcacgttggaggctgcttactctgtgcctgaatccttcattccaacaggtcctgggcagaactacatggtcggtctgcaagttccatcacttggagagaaggactatcccattttatttaagaatggaactctgaatggaaatcattctgaggccaaggcatgctatgaacgaaccattagctttgtagtggatgcttctgagatgcacttcatcttcctgagactggggctcatctatctggaagagaaagagtatgaaaaggcaaagaaaacctatatgcaagcctgtaagagatcaccttcatgccttacctggctaggactgggaatcgcctgctatcggctggaggagctcacagaggctgaggatgctctttctgaagccaatgcattgaacaactacaatgctgaagtatgggcatatctggctctggtctgcctgaaagttggacggcaattagaagctgagcaggcctacaagtacatgatcaagctgaaattgaaagatgaggctctgcttgcagagatccacacactacaggaaacagttggctttggaaatccatctttctgatacccctccagctgaacaattttctgcatgggactctgagttcctttccttcccagagagttttaccgtatgaagcctggagctggagaacgaaagaatcttcactataaacagagacccattcatttatttccattggctgtgttactggatgttttactggttgacgagaaactgggtcacaataaaaaaatggagatatgaaactcaaaa

SEQ ID NO: 119752 - DNA, 3691 bp, Homo sapiens
  Payload ID: 3482
  Gene Symbol: CFAP70
  Gene Name: cilia and flagella associated protein 70
  ENST ID: ENST00000355577
  CDS Start-End: 1706-3478
agcgtctcgctccctgctcccggccccagagggttatcgcgagtcttggaataaacttgctcgtgcgatggccaaaaagaccaaagaaaacagagggacttttcccagttggtgatatggagcaagtgccatcagcaggcagactcgtgcagatcaccgtgacagagggatatgatttgaaaggttttaaaggagatactccagttacctttattcgagcagaattcaatcaagtggttctgggagactctgcaaaaattactgtttctccagaaggaagtgcaaaatacaacttcactagcagttttgagtttaatcctgaaggaggaatcacttcagatgacctcgctcacaaacctgtgttcttaactgtgactgaagttttaccaaaggaaaagaaacagaaagaagagaagaccttaattcttggtcaggctgtggtggaccttcttcccttactggaaggacagagttcatttcaaacaacagttccattgcaccctgtgcaaggctcacccttagaaactcctagatcaagtgctaagcagtgcagtcttgaagttaaagtattagtggcagagcctttactgaccacagcccagatctcagggggcaatctactgaaggtcacgttggaggctgcttactctgtgcctgaatccttcattccaacaggtcctgggcagaactacatggtcggtctgcaagttccatcacttggagagaaggactatcccattttatttaagaatggaactctgaagcttggaggggaaagggaacctgttccccggcccaaaaagtggccaattgccaacattctggctccaggagctaataacattcctgatgcattcattgttggtggtccctatgaagaagaagaaggagaactcaaccatcctgaggacagcgaatttaggaatcaagcagagtgcataaagaaaaggattatttgggacttggaaagtcgctgctaccttgatccttctgcagtggtcagttttcagaagcgaattgccgattgccggctttggcctgtagagatcacaagagttcctctggtcactatacccaaagggaaagctggcaaaactgaaaagactgatgaagaagctcagctttcgtttcatggtgtggcttatgttaatatggtcccattgttgtatccaggtgtgaagagaattcggggagcttttcatgtttacccttacctagacagtgtagtccatgaaaagaccaaatgtttattgagcttgttccgggatattggccatcacttgattcataataataaaataggaggaattaattctctgctgtccaaacaagctgtttctaagaatctgaaagaagataaaccagtgaaagaaaaggatatagatggaaggcctaggcctggggatgtgcaggcacctagtataaaatctcagagctcagatactcctttggaaggtgaaccccctctaagtcacaatcctgaaggacagcaatatgtagaagcagggacatacattgtgttggaaattcagctggacaaagccttggttccaaagcgaatgccagaggagctagccagaagggtcaaggaaatgattcctccaaggcctcctcttacccgtcggacaggaggagctcagaagtgagtgactaccacatacagatcaagaatatttctagagccattctagatgaatactacagaatgtttggaaaacaggtggccaaactggagagtgatatggatagtgaaaccttggaggagcagaagtgccagctcagctatgaacttaattgctctggaaaatactttgctttcaaagaacaactcaagcatgctgtggtaaagattgtgagagataaatacttgaagacaacatcatttgaaagccaggaggaacttcagacatttatcagtgagctctatgtgttcttagtagatcagatgcatgtagccctaaaccagaccatgccagatgatgtccaaggcactgttgcaaccatttatacaagcagtgaacagcttcaactctttgcatttgaagcagaagtcaatgagaactttgagatggcagcagcatattataaagagagattggtccgtgagccccagaatctggatcactggttggactatggtgccttctgcctcctaactgaagacaacatcaaagcacaagagtgttttcagaaagccctttccctcaaccagagtcatatccacagcttgttgctgtgtggtgtcctggctgtcctgttggagaactatgagcaagcagaaattttctttgaggatgctacttgcttggaaccaactaatgttgtagcctggactttacttggtttgtactatgaaattcaaaacaatgatattcgaatggaaatggcatttcatgaggcctccaaacagcttcaggcacggatgcttcaggcacaagtaacaaagcaaaagagcactggtgtagaagacactgaggaaagagggaagagagaatctagtttaggcccttggggaatcacaaatggttctgcaacagcaatcaaggtggaagccccagcaggaccaggagctgcattatctattctagacaaatttcttgaagaatcctccaaactgcagtctgattcacaagaacccattttgactacacaaacttgggatccaagtataagccaaaaaccatctaacacatttatcaaggagataccaacaaagaaagaagcatcaaaatgtcaagattcatcagctcttctgcatcccggccttcattatggtgtttctcaaactaccaccatcttcatggagaccatacatttcttgatgaaagtcaaggctgtgcagtatgtgcacagagtgcttgcacatgagctgttatgccctcaaggaggccccagctgtgaatattacttggtgctggcccaaacacacattcttaagaagaactttgccaaggcagaggaataccttcaacaagcagcccagatggactacctgaaccccaatgtctggggcctgaagggccatctctattttctgagtggaaatcattctgaggccaaggcatgctatgaacgaaccattagctttgtagtggatgcttctgagatgcacttcatcttcctgagactggggctcatctatctggaagagaaagagtatgaaaaggcaaagaaaacctatatgcaagcctgtaagagatcaccttcatgccttacctggctaggactgggaatcgcctgctatcggctggaggagctcacagaggctgaggatgctctttctgaagccaatgcattgaacaactacaatgctgaagtatgggcatatctggctctggtctgcctgaaagttggacggcaattagaagctgagcaggcctacaagtacatgatcaagctgaaattgaaagatgaggctctgcttgcagagatccacacactacaggaaacagttggctttggaaatccatctttctgatacccctccagctgaacaattttctgcatgggactctgagttcctttccttcccagagagttttaccgtatgaagcctggagctggagaacgaaagaatcttcactataaacagagacccattcatttatttccattggctgtgttactggatgttttactggttgacgagaaactgggtcacaataaaaaaatggagatatgaaactcaaaa

SEQ ID NO: 119753 - DNA, 1222 bp, Homo sapiens
  Payload ID: 3482
  Gene Symbol: CFAP70
  Gene Name: cilia and flagella associated protein 70
  ENST ID: ENST00000394865
  CDS Start-End: 474-1013
tggctgtcctgttggagaactatgagcaagcagaaattttctttgaggatgctacttgcttggaaccaactaatgttgtagcctggactttacttggtttgtactatgaaattcaaaacaatgatattcgaatggaaatggcatttcatgaggcctccaaacagcttcaggcacggatgcttcaggcacaagaccaggagctgcattatctattctagacaaatttcttgaagaatcctccaaactgcagtctgattcacaagaacccattttgactacacaaacttgggatccaagtataagccaaaaaccatctaacacatttatcaaggagataccaacaaagaaagaagcatcaaaatgtcaagattcatcagctcttctgcatcccggccttcattatggtgtttctcaaactaccaccatcttcatggagaccatacatttcttgatgaaagtcaaggctgtgcaggtcagagttgcttgcacatgagctgttatgccctcaaggaggccccagctgtgaatattacttggtgctggcccaaacacacattcttaagaagaactttgccaaggcagaggaataccttcaacaagcagcccagatggactacctgaaccccaatgtctggggcctgaagggccatctctattttctgagtggaaatcattctgaggccaaggcatgctatgaacgaaccattagctttgtagtggatgcttctgagatgcacttcatcttcctgagactggggctcatctatctggaagagaaagagctggaggagctcacagaggctgaggatgctctttctgaagccaatgcattgaacaactacaatgctgaagtatgggcatatctggctctggtctgcctgaaagttggacggcaattagaagctgagcaggcctacaagtacatgatcaagctgaaattgaaagatgaggctctgcttgcagagatccacacactacaggaaacagttggctttggaaatccatctttctgatacccctccagctgaacaattttctgcatgggactctgagttcctttccttcccagagagttttaccgtatgaagcctggagctggagaacgaaagaatcttcactataaacagagacccattcatttatttccattggctgtgttactggatgttttactggttgacgagaaactgggtcacaataaaaaaatggagatatgaaactc

SEQ ID NO: 119754 - DNA, 1710 bp, Homo sapiens
  Payload ID: 3482
  Gene Symbol: CFAP70
  Gene Name: cilia and flagella associated protein 70
  ENST ID: ENST00000433268
  CDS Start-End: 1-1497
caggaggaacttcagacatttatcagtgagctctatgtgttcttagtagatcagatgcatgtagccctaaaccagaccatgccagatgatgtccaaggcactgttgcaaccatttatacaagcagtgaacagcttcaactctttgcatttgaagcagaagtcaatgagaactttgagatggcagcagcatattataaagagagattggtccgtgagccccagaatctggatcactggttggactatggtgccttctgcctcctaactgaagacaacatcaaagcacaagagtgttttcagaaagccctttccctcaaccagagtcatatccacagcttgttgctgtgtggtgtcctggctgtcctgttggagaactatgagcaagcagaaattttctttgaggatgctacttgcttggaaccaactaatgttgtagcctggactttacttggtttgtactatgaaattcaaaacaatgatattcgaatggaaatggcatttcatgaggcctccaaacagcttcaggcacggatgcttcaggcacaagtaacaaagcaaaagagcactggtgtagaagacactgaggaaagagggaagagagaatctagtttaggcccttggggaatcacaaatggttctgcaacagcaatcaaggtggaagccccagcaggaccaggagctgcattatctattctagacaaatttcttgaagaatcctccaaactgcagtctgattcacaagaacccattttgactacacaaacttgggatccaagtataagccaaaaaccatctaacacatttatcaaggagataccaacaaagaaagaagcatcaaaatgtcaagattcatcagctcttctgcatcccggccttcattatggtgtttctcaaactaccaccatcttcatggagaccatacatttcttgatgaaagtcaaggctgtgcagtatgtgcacagagtgcttgcacatgagctgttatgccctcaaggaggccccagctgtgaatattacttggtgctggcccaaacacacattcttaagaagaactttgccaaggcagaggaataccttcaacaagcagcccagatggactacctgaaccccaatgtctggggcctgaagggccatctctattttctgagtggaaatcattctgaggccaaggcatgctatgaacgaaccattagctttgtagtggatgcttctgagatgcacttcatcttcctgagactggggctcatctatctggaagagaaagagctggaggagctcacagaggctgaggatgctctttctgaagccaatgcattgaacaactacaatgctgaagtatgggcatatctggctctggtctgcctgaaagttggacggcaattagaagctgagcaggcctacaagtacatgatcaagctgaaattgaaagatgaggctctgcttgcagagatccacacactacaggaaacagttggctttggaaatccatctttctgatacccctccagctgaacaattttctgcatgggactctgagttcctttccttcccagagagttttaccgtatgaagcctggagctggagaacgaaagaatcttcactataaacagagacccattcatttatttccattggctgtgttactggatgttttactggttgacgagaaactgggtcacaataaaaaaatggagatatgaaactcaaaa

SEQ ID NO: 119755 - DNA, 1514 bp, Homo sapiens
  Payload ID: 3483
  Gene Symbol: CFAP73
  Gene Name: cilia and flagella associated protein 73
  Uniprot ID: A6NFT4
  ENST ID: ENST00000335621
  CDS Start-End: 1-927
atggcggtgccctgggaggaatatttccgactggctttgcaagagaaactgtctacaaagctgccagagcaggctgaggatcatgtcccaccagtactgcgtctcctggagaagaggcaagagctggtagatgcagaccaggccctgcaggcccagaaggaggtgttccgcaccaagacggcagccctgaaacagcgttgggaacagctggaacaaaaggagcgggagctaaagggatcgttcatccgctttgacaagtttttgcaggactccgaggcccggcgcaatcgcgcgctgcggagggcggcggaggagaggcaccaggcgggccgtcgggaggtggaggcgctgcgtctgtggacccagctccaggagctacggcgggaacacgcgcggctgcagcgccggcttaagcgcctggagccctgcgcgcgcctgctggagcaagcgctggagctgctgcccgggttccaagaggttccggagctggtggcgcgcttcgacggcctggccgagacgcaggcggcgctgaggctcagggagcgcgagcagctcgcggagctggaggcggcgcgagcgcggctgcagcagctgcgggacgcctggccggacgaggtgctcgcacagggccagcggcgggcacagctgcaggagcgcctggaggctgccagggagcgtacgctgcagtgggaatccaagtggattcagattcagaacacagcagcggagaagactctgctcctgggacgcagcaggatggctgtgctcaacctgttccagctagtgtgccagcatcaggggcagcctcccaccctggacatcgaggacacggagggacagctagagcacgtgaagctgttcatgcaggacctctctgccatgctggccggcctgggtcaggctgagcctgcagcccctgcctcctagccctgacacaggctgacgcagctgctgcccttctgtggccatacagtgctccttttcacagatgatggctcctgcagggagtgcccccagtgcccagcacagggccaggcacacagtggtgcacgggaacgtctgctgatgcccaccctaaggccaatcaaggagccacggggctgggtcctggtcctcacatcctcttccgcatcttgcccttcttggagcgggcaccccggccgaaggcgccctgctgcagctcctggacgcggcggcggttgcgggcagagagctgcttgaggccaccacgctgcaggaagtgcagcttctgggcccggcgccgctgcttcaggatctgctgcttggtcttgagttccgggcggactcggcctgcaggggtgcctggggcgtggggccgggatgcacctgctgggacagggattcagggagctcagctgttgggatcactcccaagatcccctcctcccagaagcttgcagactcctcccctgcccctactcctgttctgtgcttattgctgtggcccagtgtctgtacacagtaggtggctaataaagttttaggcagcctca

SEQ ID NO: 119756 - DNA, 372 bp, Homo sapiens
  Payload ID: 3483
  Gene Symbol: CFAP73
  Gene Name: cilia and flagella associated protein 73
  ENST ID: ENST00000550918
  CDS Start-End: 1-372
gcgcgctgcggagggcggcggaggagaggcaccaggcgggccgtcgggaggtggaggcgctgcgtctgtggacccagctccaggagctacggcgggaacacgcgcggctgcagcgccggcttaagcgcctggagccctgcgcgcgcctgctggagcaagcgctggagctgctgcccggggaatccaagtggattcagattcagaacacagcagcggagaagactctgctcctgggacgcagcaggatggctgtgctcaacctgttccagctagtgtgccagcatcaggggcagcctcccaccctggacatcgaggacacggagggacagctagagcacgtgaagctgttcatgcaggacctctctgccatgc

SEQ ID NO: 119757 - DNA, 441 bp, Homo sapiens
  Payload ID: 3484
  Gene Symbol: CFAP74
  Gene Name: cilia and flagella associated protein 74
  ENST ID: ENST00000378590
  CDS Start-End: 1-279
gaggacgagcttttggccgatgcccttcttttggaagatgaaagagatgaattagaggatccggagtttgacatcaaatgtcttctacaggaagctgaggatgacgtggacccgggacacagcagctcagtgaaagaactagatactgatgctgataaattgaagaagaaaacagctgaggacagaacgcaggcatttcacctgcggcagaacctgagcgccctggataagatgcatgaggagcaagagcttttcactgagaagatgagcgtctcctaaaaactaaaaacattcagcggagagtggtggcgcacgcctgtggtcccagtgacttgggaggctgaggccagaggatggcttgagcccaggaggtcaaggctgcagcaagcctgggtgacagagcaagaccctgtctctaaaaataaaaaactgaaagacaaa

SEQ ID NO: 119758 - DNA, 5247 bp, Homo sapiens
  Payload ID: 3484
  Gene Symbol: CFAP74
  Gene Name: cilia and flagella associated protein 74
  Uniprot ID: Q9C0B2
  ENST ID: ENST00000493964
  CDS Start-End: 157-4911
gttgccatggagctgcccgccccaaaccacgccgccggcgccgcggagggcaatcgccaaggaccgccgcctgcctgagcagcccggggtgtctgtgcctccggagcccgagaacctgggacccaggccagccagagctaatttctatctcccagcatggaggatgacggcagcctgctccctgaggacgagcttttggccgatgcccttcttttggaagatgaaagagatgaattagaggatccggagtttgacatcaaatgtcttctacaggaagctgaggatgacgtggacccgggacacagcagctcagtgaaagaactagatactgatgctgataaattgaagaagaaaacagctgaggacagaacgcaggcatttcacctgcggcagaacctgagcgccctggataagatgcatgaggagcaagagcttttcactgagaagatgagaggggagctgcgcgcctgtcggcagaggcgggacctgatcgacaagcagcaggaggctgtggcagccgagatcgccacagaggaagaggcgggcaacatggccgctgtgggccgcctccaggccgtgtccagacgcctgtttgcagagctggagaacgagagagacctgcagtcgaggactgaggccgtgctgaaggagagcgagaacaccatgtggcacatcgagatccaggaggggcgactcgaggccttccggacagctgaccgtgaggaggtggaggccacggggcggcggctccaggtgcgcgcagccgagcagctctgcagagagcaggaggccctggggaaggtggagcggaaccgactgctgaggatcaggaagtccctgaacacccagaaggagctcgggctcaggcaccagaagctgctggaggacgcccggaagaaccacaaggttgccgtgcggttcctgaaggcctccctgggaagaatccgagagcaagagaagaaggaggagatggagtgccacgagtacatgaggcgacgcatggatgcggtggtggcgctgaagggcagcatctccgcgaaccgggacacactgcggaagttccaagcatgggaccgtgccaaggcagagctggcggagcagagggtccaggctgagaagaaggcgattctggcccagggcagggatgcattcaggcaccttgtccaccagcgccggcgccaggagctggaggcccagaagagggcctttgaggaggagcagaagctcagaaagcaggagatcatcagtcggattctgaaagaggaggctgaggaggaaaagaggaagaaacagcatccccccaccagtgccaggcaccggctgaccctgagggacaagacctggaactacatttctgacttttgcaagaagaccacagtcccaaccaacacgtacacactggactacgaggctgctgcaggccccgggccctctcggttgctggaagtcgtttccagtgagcttatccagggggaccccggggccagctcagaggaggaaacgttagctgagcccgagatctctgggctttggaatgaagactacaagccataccaggtgcccaaggaggacgtggaccgaaagcccgtgggcgggacaaagatggacaaggacatcctggagcgcacggtggagcggctgcggagcagggtggtccacaagcaggtggtgtgggggcgtgagttccaaggacgccccttcaacagcaaaccggagctcctccacttccaggactttgatattggcaaagtgtacaagaaaaagatcacgttggtaaacaccacctacacgatcaactactgcaagctggtgggcgtggaggagcacctccgggacttcatccacgttgactttgacccccctggccccctgtcagccggaatgtcctgtgaagtgcttgtcaccttcaagccgatgataaacaaggatctagaaggaaatatctcatttttggctcagacgggcgagttttcagttccactgaaatgttcaacaaagaaatgttcgctgtccctcgacaaggagctcattgacttcggcagctacgtggtaggagagaccacgtctcggaccatcacgctgaccaacgttgggggcttgggcacgactttcaagttcctgccagcttcagagccctgtgagatggacgactcccagtctgccctgaaattaagcagtctcctgacctacgaagataaaagcttgtatgacaaagccgccaccagcttctctgagcagcagctagagggcacggagtcctcccaggcggacatgcagagccggaaggagctggagaagctggacaaggagcaggaggaggagcagcccgcagaaccagagagattaaccacagtgatacctcccagcgaagagcagacggagatcacgctgggggaggtaacagaaggggaaattggccccttcagctccatcaaggtgcccatcgtcttcactccggtcgtcccaggcgacgtccaagccaggttcaaagtcacgtttaagaacccccagtgccccacgctgcatttcagggtcgtgggcgtggccatcgatgtgccggtctgggtgccgaagcccagcgtggacctgaagatctgcatgtatgaccggctctaccaggactctgtgctcgtgcacacgcggtcgaaagctgccctgcgcctgaagttcgaggtgtgcaaggagctgagggcccacctggagctcctgcccaagacaggctatatccaggcacagtcgtcctactccgtgcagctcaagttcctgccgcgacactccctcccggaggacgcagggaggtattttgacaaggagacccgagtcctggaggccccgatgaccatatgggttgccgaccagaacaagccagtgggattcaccgtgcatgccattgtcaccacctcggacctggagctcagtccctcggaggtggattttggctactgcaccatctatgaggccatcaggacggaaatcagcctccacaaccactcgctcctgccccaggagttcgggttcgtcaggcttcccaagtttgtggacgtccaacccaacgatgggtttgggacgatcctgcccctggaaacgctgcagttctgtgtgatcttccagcccaccaaggccgaggaacacagattccaactgacctgcaagtctgagatcaaccggtgcttcaagctgtcttgccgggctgtaggcgtccacccacccctggagctgtcccactaccagatcaagtttgccgccacggccctatacgacacctccgtggctacagtgtacgtcatcaactctcacctgagcatgagctcaccgacccactccaagccccgcattggctcagaggacgcctctcccatggggcccacgtctttcgagttcctgctgcccccagactcgcctatcaccatctcgccctcagtggggaccgtgtggccaggaaagaggtgcctggtccaggtggccttccggccagtgctgcccgagaagctgatccgccaggaagccctcccactcctgaacaaagaaatggagaccaaatctttccgaaagaatatggccccccagaggaaggacctgcatggactgtcattctccgttcttcgagcacagaaccgcgacaagctgttcaaagtctctgtcccccacgtcctggagatgcggaagcgggagctgaggcccagttccgacgagtaccaggccgcccgagccaccctgctcagagcgttccaggcgaagtttgacacatttgtagttccctgtgttgttgccagtggcgacatcaaagacaggaaggggtcagaacccctgagcttcagcccccacaacaccctgtacctggagctgtggtgcccgacggtggcaccatctgttgtggtgacgtcccataaaggcaagaccatctttaacttcggcgacgtcgctgtggggcaccgcagtatcaagaagatctccatccagaacgtctctcccgaggatctggccctggacttctccctgctgaaccccaacggcccctttgtcctgctgaaccactccagcctgctgcgtgcaggtgggacccaggtcctggtgctttccttctctccccacgagagcatcctggctcaagaaacactggacatcatcaccaagagaggcacgctcaccctcaccctcatgggcactggcgtggcgtccatgatcacgtgctccattgaaggcagcgtcctcaacatgggctatgtgattgccggagagtctgtgtcctcaggcttcaagctgcagaacaactctctgctccccatcaagttctccatgcacctggacagcctctccagcacccggggccggggccagcagcagctgccgcagttcctcagctcgccctcccagaggacggaggtggtcgggacgcagaatctcaacggtcagagcgtgttcagcgtggcccccgtcaagggcgtcatggaccccgggaagacacaagacttcactgtcaccttcagccccgaccacgaaagcctctacttctccgacaagctccaggtggtgctctttgaaaagaaaatctcccaccagatcctgctgaagggtgccgcctgtcagcacatgatgttcgtggagggcggcgaccccctggacgtgcccgtggagtctctgacagcgatccctgtatttgaccccaggcacagagaggaagctgaggagctgaggcccatcctggtgaccctggactacatccagtttgacacagacacgccagccccacctgccacccgagagctgcaggtgggctgtatccggaccacccagccatctccaaagaagccagaccacccactcatggtgtcggccctgctgcagctaaggggggatgtgaaggagacctacaaggtcatctttgtagcccaggtgttgactggcccctaagcctctgcacagagcaccctcgggccctcctgtccaccctcaaagccctccccaggctgagggccaggtcatactaccctagagcctgggacctggccatcctctgccagattccaataggccgccctccacatggcgccacggccacttcctgctgccctggaccccgcaagcccagggacatccaagagcacccctcctgagaccccagactcagaagcagcgagaaggccaggccagccctcagccatcctagccagaccccctcagagcccccagcccccaggagagccctccacagcctgtcaataaattttttgtaggccaacacatgca

SEQ ID NO: 119759 - DNA, 1818 bp, Homo sapiens
  Payload ID: 3485
  Gene Symbol: CFAP77
  Gene Name: cilia and flagella associated protein 77
  Uniprot ID: Q6ZQR2
  ENST ID: ENST00000343036
  CDS Start-End: 49-1011
aagcgcgcccaaaccagcccgcgggccggctccccggcgacctcaaggatgccagaggccaggagctccggcccggacctcacgcgatggaggaagcagcagcagcctgtgcgccgcacggtcagccaggtctgcccgcccccgcggcggcccctgaccgtggcggacatccgttccggcatggagaacgagcggctgggggtcgtgcgggactccatgtttcagaaccctctcatcgtcaaggctgccggcccggcctcggtgggaacctcttattctgtttatgactcctcagcggtgcagaaagttattccttcccttgctggacaccacatcaaaggaggcccacaggctgaactcggcaagccccgggaaagaagctacagtctgcccggcattaattttaattatggactctacatccgagggcttgacggaggagtccctgaagccatcggacgctggaacgtgttcaagcagcagcccacctgcccccacgagctgacccggaattatatcgcaatgaaccgcggggcggtgaaagccggcctggtgactgcccgggagaacttgctctaccgtcagctcaatgacatccgcatcagtgaccaggatgaccggcgcatgaagaaagagccgccccctctccctccaaacatgacatttgggatccgggcacggccttccacacccttctttgatctgctgcagcaccggtacctgcagctgtgggtacaggaacaaaaggccacccagaaagccatcaaactggagaagaagcagaaggtggtccttgggaagctgtatgagacccggagcagtcagctgaggaagtacaagccgcccgtgaagctggacaccctctggcacatgcctcacttccagaaggtgggccgccaccttgatacgttccccacggaggccgatcgccagagagcattaaaagcccaccgggaagagtgtgccgtgcgccaggggaccctgcggatgggcaactacacccacccctagcccctccctcccctgccacaagaagccatcttgacatagtggaaaattcccagaaggactccctatcttgccccaaccctgacattcccccatttttatgcaggttctgcttcaaggagctcagattcaagtcttaggctaattgtttttggtaaaagtccccccttttaggttagccaacattagtctccacttagccccagtgaccctctacctggagcctcctcctctcctcctccttctcctcctagggcaggctcaccctgcctcttctcaagccctcacctgccaagacaagcccaaattacaagacaattttttagactccaggctaagggtcgattccatggctctgcccattaagtgttaagaacgacctgtgtatttgctgcagaaagcatgacagtgacgtgctttgaaagccctcattttctattccaaacatgagttttaattgctctttttgggatgcctgatgtctcatcacggcagtattatctctctgggacctctgacagcaggaagagccaatggttcattactcgagcctgcccccgcctcctcagtgctggggccccgtcaatcaagcaggccaagttggactcctcccccaggactgactttggaaggtcaacccactctggaaaaagccttccaggccagcgggtagactgctgaacacaggctgctgagcttctcagccgaattcctggacacttcctcactcggtctttccgtgtgttctttggattctctctgaaaattttatgctgatctattttaaattaaaaatgctatttgtcatcc

SEQ ID NO: 119760 - DNA, 901 bp, Homo sapiens
  Payload ID: 3485
  Gene Symbol: CFAP77
  Gene Name: cilia and flagella associated protein 77
  ENST ID: ENST00000393215
  CDS Start-End: 230-826
tgaggatcccgcggggctcctgcattgctccggggctctttgcgatgaggggccggcgcgagcggggcgcgcctggctccggaggggtcctggcatctgagtttccccctcaggatcccggtggtgcggcccgggccgcccggcaggcccttcggagctccaggctgtgcccgacgtggggaagcgcgcccaaaccagcccgcgggccggctccccggcgacctcaaggatgccagaggccaggagctccggcccggacctcacgcgatggaggaagcagcagcagcctgtgcgccgcacggtcagccaggtctgcccgcccccgcggcggcccctgaccgtggcggacatccgttccggcatggagaacgagcggctgggggtcgtgcgggactccatgtttcagaaccctctcatcgtcaaggctgaactcggcaagccccgggaaagaagctacagtctgcccggcattaattttaattatggactctacatccgagggcttgacggaggagtccctgaagccatcggacgctggaacgtgttcaagcagcagcccacctgcccccacgagctgacccggaattatatcgcaatgaaccgcggggcggtgaaagccggcctggtgactgcccgggagaacttgctctaccgtcagctcaatgacatccgcatcagtgaccaggatgaccggcgcatgaagaaagagccgccccctctccctccaaacatgacatttgggatccgggcacgaaaactttccaaacaaatagaaaagttcagaagcaacataactaactcccgtgaacccactacctggatttagcacgctaaccatctggccgctttcgcttctgatcctttcctttaatattgaagaaataaaacgtgtcaaacacaa

SEQ ID NO: 119761 - DNA, 1638 bp, Homo sapiens
  Payload ID: 3485
  Gene Symbol: CFAP77
  Gene Name: cilia and flagella associated protein 77
  Uniprot ID: Q6ZQR2
  ENST ID: ENST00000393216
  CDS Start-End: 45-899
gcgcccaaaccagcccgcgggccggctccccggcgacctcaaggatgccagaggccaggagctccggcccggacctcacgcgatggaggaagcagcagcagcctgtgcgccgcacggtcagccaggtctgcccgcccccgcggcggcccctgaccgtggcggacatccgttccggcatggagaacgagcggctgggggtcgtgcgggactccatgtttcagaaccctctcatcgtcaaggctgaactcggcaagccccgggaaagaagctacagtctgcccggcattaattttaattatggactctacatccgagggcttgacggaggagtccctgaagccatcggacgctggaacgtgttcaagcagcagcccacctgcccccacgagctgacccggaattatatcgcaatgaaccgcggggcggtgaaagccggcctggtgactgcccgggagaacttgctctaccgtcagctcaatgacatccgcatcagtgaccaggatgaccggcgcatgaagaaagagccgccccctctccctccaaacatgacatttgggatccgggcacggccttccacacccttctttgatctgctgcagcaccggtacctgcagctgtgggtacaggaacaaaaggccacccagaaagccatcaaactggagaagaagcagaaggtggtccttgggaagctgtatgagacccggagcagtcagctgaggaagtacaagccgcccgtgaagctggacaccctctggcacatgcctcacttccagaaggtgggccgccaccttgatacgttccccacggaggccgatcgccagagagcattaaaagcccaccgggaagagtgtgccgtgcgccaggggaccctgcggatgggcaactacacccacccctagcccctccctcccctgccacaagaagccatcttgacatagtggaaaattcccagaaggactccctatcttgccccaaccctgacattcccccatttttatgcaggttctgcttcaaggagctcagattcaagtcttaggctaattgtttttggtaaaagtccccccttttaggttagccaacattagtctccacttagccccagtgaccctctacctggagcctcctcctctcctcctccttctcctcctagggcaggctcaccctgcctcttctcaagccctcacctgccaagacaagcccaaattacaagacaattttttagactccaggctaagggtcgattccatggctctgcccattaagtgttaagaacgacctgtgtatttgctgcagaaagcatgacagtgacgtgctttgaaagccctcattttctattccaaacatgagttttaattgctctttttgggatgcctgatgtctcatcacggcagtattatctctctgggacctctgacagcaggaagagccaatggttcattactcgagcctgcccccgcctcctcagtgctggggccccgtcaatcaagcaggccaagttggactcctcccccaggactgactttggaaggtcaacccactctggaaaaagccttccaggccagcgggtagactgctgaacacaggctgctgagcttctcagccgaattcctggacacttcctcactcggtctttccgtg

SEQ ID NO: 119762 - DNA, 903 bp, Homo sapiens
  Payload ID: 3486
  Gene Symbol: CFAP97
  Gene Name: cilia and flagella associated protein 97
  ENST ID: ENST00000296775
  CDS Start-End: 85-279
ggagcccgttcagggccgcgggagtgcgccagcgccgcgcgtggggctgtggtggccgcggctctcagatatatttttgccatcatggatcagtttggagatatattagaaggtgaagtggaccattctttctttgacagtgactttgaagaaggaaagaaatgtgaaactaactcagtttttgacaagcaaaatgatgacccaaaggaaagaatagataaagatacaaaatgtaaattcgaacactggaatgcaaacaacagaaaattatcttactgagaagggaaatgaaagaaacgtgaaatttcccccagaacaccccgtagagaatgatgttacacaaactgtaagttctttctcattgccagcctcttcaagatcaaaaaaattgtgtgatgttacaacaggacttaaaatacacgtgtccattccaaatagaattcccaaaattgtaaaagaaggtgaagatgattactacacagatggagaggaaagcagtgatgatgggaagaaataccatgtgaagtccaagtccgctaaaccatctactaacgttaaaaaaagcataaggaaaaagtattgcaaagttagctcctcttcctcctcctctttatcttcctcatcttcaggttcaggtacagattgtttagatgcagggtctgatagccatctatctgattcgtctccgtcatctaagtcatctaagaaacatgtatctggtataaccctcctgtcaccaaaacacaagtataaatcaggaataaaatcgacagaaacacagccttcaagtactacaccaaaatgtggccactaccctgaggagtctgaagatactgtgactgacgtaagtcccttatcaactccagacattagccctcttcagtcttttgaactgggcatagc

SEQ ID NO: 119763 - DNA, 4852 bp, Homo sapiens
  Payload ID: 3486
  Gene Symbol: CFAP97
  Gene Name: cilia and flagella associated protein 97
  Uniprot ID: Q9P2B7
  ENST ID: ENST00000458385
  CDS Start-End: 121-1719
tctctccgcctccggaagcgcgggcgcgcggcgccgggagcccgttcagggccgcgggagtgcgccagcgccgcgcgtggggctgtggtggccgcggctctcagatatatttttgccatcatggatcagtttggagatatattagaaggtgaagtggaccattctttctttgacagtgactttgaagaaggaaagaaatgtgaaactaactcagtttttgacaagcaaaatgatgacccaaaggaaagaatagataaagatacaaaaaatgtaaattcgaacactggaatgcaaacaacagaaaattatcttactgagaagggaaatgaaagaaacgtgaaatttcccccagaacaccccgtagagaatgatgttacacaaactgtaagttctttctcattgccagcctcttcaagatcaaaaaaattgtgtgatgttacaacaggacttaaaatacacgtgtccattccaaatagaattcccaaaattgtaaaagaaggtgaagatgattactacacagatggagaggaaagcagtgatgatgggaagaaataccatgtgaagtccaagtccgctaaaccatctactaacgttaaaaaaagcataaggaaaaagtattgcaaagttagctcctcttcctcctcctctttatcttcctcatcttcaggttcaggtacagattgtttagatgcagggtctgatagccatctatctgattcgtctccgtcatctaagtcatctaagaaacatgtatctggtataaccctcctgtcaccaaaacacaagtataaatcaggaataaaatcgacagaaacacagccttcaagtactacaccaaaatgtggccactaccctgaggagtctgaagatactgtgactgacgtaagtcccttatcaactccagacattagccctcttcagtcttttgaactgggcatagcaaatgatcaaaaagtgaaaattaaaaagcaagaaaatgtgagccaagaaatatatgaagatgttgaggatttgaaaaataattcaaaatatttgaaagcagccaaaaaagggaaagaaaaacatgagcctgatgtctcctcaaagtcgtcttcagtgttagactccagtttagaccacagacataaacagaaagtcttacatgacacaatggatctgaatcatctcttgaaagcttttctgcaattagataaaaaaggaccacaaaaacatcactttgatcagccttcagtagcacccgggaaaaactactctttcacaagagaagaggtgagacagatcgatcgggaaaatcagaggcttttgaaagaactgtcaagacaggcggaaaagccgggaagcaaaagtacaattcctagatcggctgatcatcccccaaagttatatcacagtgctctcaacagacagaaggaacaacaaaggattgagagagaaaacttggctttattgaaaaggcttgaggccgtgaaaccaacagttggtatgaaacgttcagaacaactgatggactatcatcgcaatatgggctatctcaactcatcaccattgtcaagacgggccagatccactcttggccaatatagcccattaagagcttccaggacatccagtgctacgagtggtctcagttgtaggagtgagcgatcagcggttgacccctccagtggccaccctcgaagaagacctaaaccccctaatgtccgtacagcttggttataaaacacttttttactttaaacattgttcacacaacttttcttgaagtgctcgtgcatattcctataattctctgtgtaaacatctagaataccgttttagcaattgaaggtgtacaacagtgagttgtaatgtattgttattcagtgcaaaattattgtcaaaaaacgatttaatgtaaaaagtgtttcctgaggatgtatttatatgagatgtatgtgttcttaatagagaaatagtggtatgcatgtgtatcttctaattattcagttgtcatgctgtcaaaatagtagtgatagtatcattgcatgtcgtacccaagatggtcactatagttttcaatttgtgttattttcatttctttataagtgttataccatgagctcagctcctaaatttggctggctttgtttttcatttgctttagaacttatgtggcatgacatagctcgattgtatgagatttaacacttattatgaaacaaatcttgaaatttgttttcactggtagagctgatctagatttgatgagcagattgagagacgcttctattggagcaattcttgtaattcaccagaggtatctagttgttgtataagtgcactgagttagatcttaaaagtttgatcaatcattccaaaccatttcaaatatgaatattagaaagttcaacttagaagcttcccttttgtgttttcatgcattcaggtaaagtcctatttatgactcttagaaatgaggtaggttttagagctagtcttctaactcgtgaatagtttaaggaccacatcagttgcaaaccaagtatttgttgaatcagtaaaatggcactatcagcatgaagagccgagaagcagatcctgaggtgtgtcggacagtgttttaggtaattcagtatttattatgttattagagaagacttagcgtaagaaagaaatgctttagaaattccagcaagtatttataaggcctgaaaaaactaaaatttgaacaaaaagggaaataaatcacacatttgttgaggctgctgctttaagtattagctaattttcttgttttggtttactttgatttatttgattgaaccctggaagtattatttttaccagtcccacatttaaagacctagtaatcttgatggaattggtaatggcagatagggtttaatgttgttgacttttcaaattagaattttttttctatgaaacttaggcttttatataacaaagtatgttatctcattgttaccgccgtttttcactactagccttttcagtatgcccttaaaatgtattggaaaggttccatgttaaatgacaaatatctttttcagtatgaatttttgatctgtagccacaataagattttcatttttcagtgctcaggctctgtagcatgtatgctgaatgcttttttccttagcacctttaacagtaaggtgttactgcattttacaaaacatcaattcaacatgtcttggatttagtttgtattcatagattttgttaaggatcaggcctgtgaacatgggcacagtgaggttaaataattcacctggccacaacctggctttgaggttctgcttttgggggccataattttcattcaatgttattcgatgctctgttctggtgaacaagttactatacctgctgtgtatataagcttgagctatactaaaccaaggctttattttcttttgttttttaacttactgtacttttactgtttatataacctatatttcaagagagagaagataatgctgaattttaaatttagcatttgaacatctgtccaatagtgaattaatcagtttttttaaaattgatttttaagttgttccagaaaaaaatatatatatatgttttatatatataatctttttatatatataaaaaatcttttttataaattttattttaaaaatcttttaaaaaagatttttatatatatataaagattatatatttatatatagtcttttctgttcataatggcattagtctctgagtacattttatattatctttgttgccacatgtcaggatacaacacaatagttttataaataacaactgtactttgattttaggtactaatttaatgctttagtttttactactttgaaaggggaggttcatctaagtattactgataacagggatccaacttaaagtaaaagttggaaagggcaagagtcttttaagcggaacttcaattctgttgtcatggttacttatatataatgaatataaatagacaaataggacttggaaaatgtggtatattctaagtcaagatgctatgaagttgttatagtttaagggacattcttaagaaggaattacttaagtacattactcttctcatttcaaggacatgaaaaagtaaaggatggtctggcactattttattttattttttttttgacttgtactgaatatatgtactttgaagatttacatctataactagaaagtatgctaatccgaggtctggttattaggccagattcttgttcagttattttttaaactaatgttgcctcctttttagtaagattctacgaaagttttttaactattaaagttatttcttaaggggtagctcttatacttcctctgctctctttttcagtttccataaaaagctgttttcttagctattactccaaataaagttctttggtttgcttaaaaatgtagtgtaatgcagttgttttctctccgctaacctgagtgtccacagtagatatcgagacagctttaggaaggtgacggtcatgggtaagtgacggctgtgcctgtcatcttcagattcttcaaatactgcaaactatgaaacatgttaagaccaatataaacccaaagatgtgagttgattatactttaataattacattcataaaaagtttactatcttcaatgccaaaaaagtcttaacctataaatgattatatacaatcttagaaaatgtgcttaacagttatggcttctttatttctatgaggaaagattagtaagaaacttaaaattaacatccttttaagattttctgttccattttaatgtattttaggcatttagaactagcctggcataatgaagaaagaaataaaagaattaaagataa

SEQ ID NO: 119764 - DNA, 682 bp, Homo sapiens
  Payload ID: 3486
  Gene Symbol: CFAP97
  Gene Name: cilia and flagella associated protein 97
  ENST ID: ENST00000503223
  CDS Start-End: 254-682
gggaggcgcccacccacagcgcgggggcggggtccgggccggggccccacggggagagggcgcgacccagcgcggtgcacacctctctttcccacgctcccctcctcctctacaggatgccgtctgttcatggaaaattttgctgcaggtgtcagcggcgctggtaattcctgagctcagcaaccccgatggataccattatctccatctacacagcggggaactgaagcacaggagatatatttttgccatcatggatcagtttggagatatattagaaggtgaagtggaccattctttctttgacagtgactttgaagaaggaaagaaatgtgaaactaactcagtttttgacaagcaaaatgatgacccaaaggaaagaatagataaagatacaaaaaatgtaaattcgaacactggaatgcaaacaacagaaaattatcttactgagaagggaaatgaaagaaacgtgaaatttcccccagaacaccccgtagagaatgatgttacacaaactgtaagttctttctcattgccagcctcttcaagatcaaaaaaattgtgtgatgttacaacaggacttaaaatacacgtgtccattccaaatagaattcccaaaattgtaaaagaaggtgaagatgattactacacagatggagaggaaagcagtgatgatgggaag

SEQ ID NO: 119765 - DNA, 2895 bp, Homo sapiens
  Payload ID: 3486
  Gene Symbol: CFAP97
  Gene Name: cilia and flagella associated protein 97
  Uniprot ID: Q9P2B7
  ENST ID: ENST00000514798
  CDS Start-End: 261-1622
cacgccgcccctcctttccctttccgctctctccgcctccggaagcgcgggcgcgcggcgccgggagcccgttcagggccgcgggagtgcgccagcgccgcgcgtggggctgtggtggccgcggctctcaggtgaggggcgcgcgagcggctcctggctccctgctcgcggggcgcccgccacgctcctttccgttcgcatccgtctccccgctccggagcccaggcggcggcgagtactcgggatatatttttgccatcatggatcagtttggagatatattagaaggtgaagtggaccattctttctttgacagtgactttgaagaaggaaagaaatgtgaaactaactcagtttttgacaagcaaaatgatgacccaaaggaaagaatagataaagatacaaaaaatgtaaattcgaacactggaatgcaaacaacagaaaattatcttactgagaagggaaatgaaagaaacgtgaaatttcccccagaacaccccgtagagaatgatgttacacaaactgtaagttctttctcattgccagcctcttcaagatcaaaaaaattgtgtgatgttacaacaggacttaaaatacacgtgtccattccaaatagaattcccaaaattgtaaaagaaggtgaagatgattactacacagatggagaggaaagcagtgatgatgggaagaaataccatgtgaagtccaagtccgctaaaccatctactaacgttaaaaaaagcataaggaaaaagtattgcaaagttagctcctcttcctcctcctctttatcttcctcatcttcaggttcaggtacagattgtttagatgcagggtctgatagccatctatctgattcgtctccgtcatctaagtcatctaagaaacatgtatctggtataaccctcctgtcaccaaaacacaagtataaatcaggaataaaatcgacagaaacacagccttcaagtactacaccaaaatgtggccactaccctgaggagtctgaagatactgtgactgacgtaagtcccttatcaactccagacattagccctcttcagtcttttgaactgggcatagcaaatgatcaaaaagtgaaaattaaaaagcaagaaaatgtgagccaagaaatatatgaagatgttgaggatttgaaaaataattcaaaatatttgaaagcagccaaaaaagggaaagaaaaacatgagcctgatgtctcctcaaagtcgtcttcagtgttagactccagtttagaccacagacataaacagaaagtcttacatgacacaatggatctgaatcatctcttgaaagcttttctgcaattagataaaaaaggaccacaaaaacatcactttgatcagccttcagtagcacccgggaaaaactactctttcacaagagaagaggtgagacagatcgatcgggaaaatcagaggcttttgaaagaactgtcaagacaggcggaaaagccgggaagcaaaagtacaattcctagatcggctgatcatcccccaaagttatatcacagtgctctcaacagacagaaggaacaacaaaggattgagagagaaaacttgactatctcgctctgtcacccaggctggagtgcagtgacgtgatcttggctccttgcagcctccatctcctgggttcaagtgattctcctgcctcggcctcccaagtaactggaactacaggcttacaccaccacacccagctaatttttgtatttttagtggagatggtattgccatgttagccaggctggtctcaaactcctgacctcaagtgatccatctgcctcagcttcccaaagagcaaggattacaggtgtgagccactgtgcctggcctgtaggagtaacttcagaactcttatgtggaataattaaagggagattgtgataaattgtcacaaaaatgatttatagcaagtctcatacctactatgaatattaatctgttgattaacagtacttttgttctaagatcttgaaataatgtatactttacttcattggggtttccttcttgtctggttaaggtctgttatctccttccgttgaagaaagcaagctaatgataactcagtgtgactcccactgttgaaatgtagagagcagtcgtcttgattctgcctgtgtgggggacagttgttactttttagtgtccttacaaggtctttgcttcatcgctctagaaacactaaagcaactctcctctgctaacggctgcagaaatcattaagacatttatttgtttacatttgtttaaacatcaaaagatgggctaggttaattttttttccaaagagaataattcctggatataaaataaatgtttggacaagtgtattagtccattttcatactgctgtaaagatactacctgagactgggtaatttataaacaaaagagttttaattgacttacagttctgcaaggctggagaagcctcaggaaacttagaatcatgctggaaggcgaagcagaagcaaggcatgtcttacatggtggcaggatagagagagaacacaggggaaactgccacttttaagtaactcagatctcatgagaactccctcactatcacgagaacagcatgggggaaccacccccatgatccaatcaccttccaccaagtccctccctccatacgtggggattacaattcgagatgagatttgggtggggacacagagtcagaccgtatcaataggtatataacacagtattgttaactatagtcaacatgctgtacattagatctccagaacttactcatcttgcatgactggaactttgtaccttgggtacttgacatttgctaagagactagatcttaggtgttctcaccacacacataaataaaaatggtaactctgtgagatga

SEQ ID NO: 119766 - DNA, 1941 bp, Homo sapiens
  Payload ID: 3487
  Gene Symbol: CFAP99
  Gene Name: cilia and flagella associated protein 99
  ENST ID: ENST00000616117
  CDS Start-End: 1-1941
atggcctactatggaaaatgcattgaaactgtgatcgagcaactcgacaaatttacacccaagagggacaaccctgagcagttcctggaggctgcggccacctccctgcaggctctgagcccccagaagcagagctttgttttggaggttctgtctgggtgcctcgagtaccggaagctgctgaccgtcgtggtggatgccttctacgtggaggatggccgactctgcctgcgggttgaccacagccgcttcgaggtgatctgctacctagccacattcctgctggaggaactcggcttccagctattctgtaacatcatcaagtcccagcccgtggataagatgtgcaagttcctcaggttcttcttcaaccccctgcacctgtgctcatggatcaaggatgagtggagcctcatctacgagccagcccacgtgaaggagaactggatcgaccccctgatgagatggcagccagaggtccaggagctgatcaaccacctggagggcgtgtctgccagtcaatcctctcctttaaagaccaaggccaaggtcacagagcccaaggaattcaacctgactgcccccaggccccgcaccattccagcgcccgaaccagtcccggtcgtggccaagccgagacccgtcccccagagcacctaccagccacccaaggagcagcagcagctggagacagtcaagaggtacaaccgccgaaaggccgaggagctgctgctgagggcaaacatcgaggaactgcgctgcgccatgcccaggtcctgcagggagcgagtgcagggctccaagcagcagctgcggcttcagttcccaccccgaatccgaaagactccgaagctgaccttctataggcctgacaacatcctggtcaagctgaacaccacagccatcctgcgagaaggggccttgtaccagcggcaggtggagcaggagctgcagagggttgataagctcgtggatggggctggggacttctctgagttcttcgagtggcagaagaagatgcaggcgaaggaccgggaggagcagctggctgcaagcgagtgccggcggttgcaagggaagcttagccatgaggaggccgtcctagcccggcagagcctcatgcaggagaacaagcagagggtggagcagcagaaggagcagatggccaagctgatgctgcagcgtgcagagagacggctccgggaggacaggtccaggaaggagctggtggagcaggtgatagaggggcagaagaacgccaaggcggcccagacgaagctcgcgaagggccgacagcagacagttcaggaggcgatcgaggagagcagggggctgctgcagcgcagggcgcaggcagcccaggaggagcagcggcgccgttgtgaactcatctcccagctgcgcgcactcgagacacagcccacgcgcaagggcaagctcgtggacctgacccagatccccggctacggcctggaaggagagatgtccatagtggagctgcgagagcggctggccctgctcaaagagaatcagcggcgcaaggaggaagaaaagcgggatcaaatcattcagggcaagcacaccaagagccaggaactgcagaacatggtggagcagatctcgctgtgccgtgcagccatggggagatccgcagccttgaggtgggaggaaaagaaggcccttgcggcggccccggcggcgccctcgcaggacgagcgcgtgcagcagctgcggcgcaggatctcggagagggcggccgagcgcagcaggcaggcggccttgctgcacgtgtcggcgccgcggaccgcgcgccccaagccccgggcgcagctagaggcgcagcactggctggagctggagcggagccgcgagcgcaggctgcaggcgctgcagcagggaggctcaggacccgggcccgcgcgccgcctggaggccgcctga

SEQ ID NO: 119767 - DNA, 1398 bp, Homo sapiens
  Payload ID: 3488
  Gene Symbol:
  Gene Name: Cilia- and flagella-associated protein 99 [Source:UniProtKB/Swiss-Prot
  Acc:D6REC4]
  Uniprot ID: D6REC4
  ENST ID: ENST00000506607
  CDS Start-End: 4-1383
gccatgcccaggtcctgcagggagcgagtgcagggctccaagcagcagctgcggcttcagttcccaccccgaatccgaaagactccgaagctgaccttctataggcctgacaacatcctggtcaagctgaacaccacagccatcctgcgagaaggggccttgtaccagcggcaggtggagcaggagctgcagagggttgataagctcgtggatggggctggggacttctctgagttcttcgagtggcagaagaagatgcaggcgaaggaccgggaggagcagctggctgcaagcgagtgccggcggttgcaagggaagcttagccatgaggaggccgtcctagcccggcagagcctcatgcaggagaacaagcagagggtggagcagcagaaggagcagatggccaagctgatgctgcagcgtgcagagagacggctccgggaggacaggtccaggaaggagctggtggagcaggtgatagaggggcagaagaacgccaaggcggcccagacgaagctcgcgaagggccgacagcagacagttcaggaggcgatcgaggagagcagggggctgctgcagcgcagggcgcaggcagcccaggaggagcagcggcgccgttgtgaactcatctcccagctgcgcgcactcgagacacagcccacgcgcaagggcaagctcgtggacctgacccagatccccggctacggcctggaaggagagatgtccatagtggagctgcgagagcggctggccctgctcaaagagaatcagcggcgcaaggaggaagaaaagcgggatcaaatcattcagggcaagcacaccaagagccaggaactgcagaacatggtggagcagatctcgctgtgccgtgcagccatggggagatccgcagccttgaggtgggaggaaaagaaggcccttgcggcggccccggcggcgccctcgcaggacgagcgcgtgcagcagctgcggcgcaggatctcggagagggcggccgagcgcagcaggcaggcggccttgctgcacgtgtcggcgccgcggaccgcgcgccccaagccccgggtgagtccggattggtgggaggagcccgggcgactgaaagccggggccgggtggggatggcgggcgcggcgcgcagggaccggcgtcccggggcggggatggcggggagatcgggtccggtccgcggccgggagatacgcagcggcgggcgcgggaggcggtgggggcgtccctgcccgcgccgacgcgttccccggcctgcaggcgcagctagaggcgcagcactggctggagctggagcggagccgcgagcgcaggctgcaggcgctgcagcagggaggctcaggacccgggcccgcgcgccgcctggaggccgcctgagccgggccgagcgcg

SEQ ID NO: 119768 - DNA, 2298 bp, Homo sapiens
  Payload ID: 3488
  Gene Symbol:
  Gene Name: Cilia- and flagella-associated protein 99 [Source:UniProtKB/Swiss-Prot
  Acc:D6REC4]
  ENST ID: ENST00000635017
  CDS Start-End: 138-2282
ctgcctaccgggagctgacggacgacgactgccaacaccttagccccagctggcccaggaaactgctgcggtggcaggtggcggcggcaggagggctcggctgccccgagcgcccgccaggcttctgccctaagaagatggcctactatggaaaatgcattgaaactgtgatcgagcaactcgacaaatttacacccaagagggacaaccctgagcagttcctggaggctgcggccacctccctgcaggctctgagcccccagaagcagagctttgttttggaggttctgtctgggtgcctcgagtaccggaagctgctgaccgtcgtggtggatgccttctacgtggaggatggccgactctgcctgcgggttgaccacagccgcttcgaggtgatctgctacctagccacattcctgctggaggaactcggcttccagctattctgtaacatcatcaagtcccagcccgtggataagatgtgcaagttcctcaggttcttcttcaaccccctgcacctgtgctcatggatcaaggatgagtggagcctcatctacgagccagcccacgtgaaggagaactggatcgaccccctgatgagatggcagccagaggtccaggagctgatcaaccacctggagggcgtgtctgccagtcaatcctctcctttaaagaccaaggccaaggtcacagagcccaaggaattcaacctgactgcccccaggccccgcaccattccagcgcccgaaccagtcccggtcgtggccaagccgagacccgtcccccagagcacctaccagccacccaaggagcagcagcagctggagacagtcaagaggtacaaccgccgaaaggccgaggagctgctgctgagggcaaacatcgaggaactgcgctgcgccatgcccaggtcctgcagggagcgagtgcagggctccaagcagcagctgcggcttcagttcccaccccgaatccgaaagactccgaagctgaccttctataggcctgacaacatcctggtcaagctgaacaccacagccatcctgcgagaaggggccttgtaccagcggcaggtggagcaggagctgcagagggttgataagctcgtggatggggctggggacttctctgagttcttcgagtggcagaagaagatgcaggcgaaggaccgggaggagcagctggctgcaagcgagtgccggcggttgcaagggaagcttagccatgaggaggccgtcctagcccggcagagcctcatgcaggagaacaagcagagggtggagcagcagaaggagcagatggccaagctgatgctgcagcgtgcagagagacggctccgggaggacaggtccaggaaggagctggtggagcaggtgatagaggggcagaagaacgccaaggcggcccagacgaagctcgcgaagggccgacagcagacagttcaggaggcgatcgaggagagcagggggctgctgcagcgcagggcgcaggcagcccaggaggagcagcggcgccgttgtgaactcatctcccagctgcgcgcactcgagacacagcccacgcgcaagggcaagctcgtggacctgacccagatccccggctacggcctggaaggagagatgtccatagtggagctgcgagagcggctggccctgctcaaagagaatcagcggcgcaaggaggaagaaaagcgggatcaaatcattcagggcaagcacaccaagagccaggaactgcagaacatggtggagcagatctcgctgtgccgtgcagccatggggagatccgcagccttgaggtgggaggaaaagaaggcccttgcggcggccccggcggcgccctcgcaggacgagcgcgtgcagcagctgcggcgcaggatctcggagagggcggccgagcgcagcaggcaggcggccttgctgcacgtgtcggcgccgcggaccgcgcgccccaagccccgggtgagtccggattggtgggaggagcccgggcgactgaaagccggggccgggtggggatggcgggcgcggcgcgcagggaccggcgtcccggggcggggatggcggggagatcgggtccggtccgcggccgggagatacgcagcggcgggcgcgggaggcggtgggggcgtccctgcccgcgccgacgcgttccccggcctgcaggcgcagctagaggcgcagcactggctggagctggagcggagccgcgagcgcaggctgcaggcgctgcagcagggaggctcaggacccgggcccgcgcgccgcctggaggccgcctgagccgggccgagcgcgc

SEQ ID NO: 119769 - DNA, 1894 bp, Homo sapiens
  Payload ID: 3489
  Gene Symbol: CNTF
  Gene Name: ciliary neurotrophic factor
  Uniprot ID: P26441
  ENST ID: ENST00000361987
  CDS Start-End: 81-683
agagtcacatctcttatttggaccagtatagacagaagtaaacccagctgacttgtttcctgggacagttgagttaagggatggctttcacagagcattcaccgctgacccctcaccgtcgggacctctgtagccgctctatctggctagcaaggaagattcgttcagacctgactgctcttacggaatcctatgtgaagcatcagggcctgaacaagaacatcaacctggactctgcggatgggatgccagtggcaagcactgatcagtggagtgagctgaccgaggcagagcgactccaagagaaccttcaagcttatcgtaccttccatgttttgttggccaggctcttagaagaccagcaggtgcattttaccccaaccgaaggtgacttccatcaagctatacatacccttcttctccaagtcgctgcctttgcataccagatagaggagttaatgatactcctggaatacaagatcccccgcaatgaggctgatgggatgcctattaatgttggagatggtggtctctttgagaagaagctgtggggcctaaaggtgctgcaggagctttcacagtggacagtaaggtccatccatgaccttcgtttcatttcttctcatcagactgggatcccagcacgtgggagccattatattgctaacaacaagaaaatgtagcagttagtcccttctctcttccttgctttctcttctaatggaatatgcgtagttccctggggcctcgctttcccatcttaaatttctaaaaacagttaagacaacaggcattttctttcttttttctctgaccacctgcagcctgttgaaggactacaggtattttcatcaagtagcgttggagacatacacaaatgggcatacaagtttagcctggggggtgtgatttgtgtgcgtgcttgcatgtgctgcaggtgtaagagagtgggagcagggacaacgtccttccacttcagggttctaacctttctaacccactaagtaacctctacaggcatttaactgccttacagacagaatatacatatgttaattctagtcctggatgactcggtctgagaagattcaatttaaaatcagactctttagttgatttaaactcttagagaataagaataataatggctaacttttattatcttctatattaaggcagtatgccaagggtctttatgtatattatgtacagcgtttacaaccttgtgagcaaggtggtgttactcccattaggtagatgagaaaacaggctcacagagatttggttaagctcacacagctaacaagtagcacactgagtttgaacacagatcattctccttgtaaaagcctatgtgcctttcactttagaggcttgatcatgaatcactgcacctctttgtcacagggtgttggaagatgcatccatgtaatctattcccatcgctggaaaacagctgctgttagatgtcctcagaagtcagttgcaaattttagcgttaaagtcaggatttattgttcatacttggcggtgaggagggcagctggagatcttaagattccattttggaaaatgattaggcccgccaaacttctgaactttggaagctggggatgtttagtaatacagcctggtttttaagtactcactaaaagttctcaaatattgggttgggcacggcttataccaggttacctcacttttaattagtgatgcaggcagtgtaacccaagcatttgtggacaatgagtggaatactaaagttaaaaagtcaaactttcacctcagattttctggacttagtcatgaggagagggtgaggcccactctgttcctactggagataccagagactctgaaactatagaataaagcctctgtgctgcacaacaaa

SEQ ID NO: 119770 - DNA, 1910 bp, Homo sapiens
  Payload ID: 3490
  Gene Symbol: CNTFR
  Gene Name: ciliary neurotrophic factor receptor
  Uniprot ID: P26992
  ENST ID: ENST00000351266
  CDS Start-End: 153-1271
gcggcggcagcggaggcggcggctccagccggcgcggcgcgaggctcggcggtgggatccggcgggcggtgctagctccgcgctccctgcctcgctcgctgccgggggcggtcggaaggcgcggcgcgaagcccgggtggcccgagggcgcgatggctgctcctgtcccgtgggcctgctgtgctgtgcttgccgccgccgccgcagttgtctacgcccagagacacagtccacaggaggcaccccatgtgcagtacgagcgcctgggctctgacgtgacactgccatgtgggacagcaaactgggatgctgcggtgacgtggcgggtaaatgggacagacctggcccctgacctgctcaacggctctcagctggtgctccatggcctggaactgggccacagtggcctctacgcctgcttccaccgtgactcctggcacctgcgccaccaagtcctgctgcatgtgggcttgccgccgcgggagcctgtgctcagctgccgctccaacacttaccccaagggcttctactgcagctggcatctgcccacccccacctacattcccaacaccttcaatgtgactgtgctgcatggctccaaaattatggtctgtgagaaggacccagccctcaagaaccgctgccacattcgctacatgcacctgttctccaccatcaagtacaaggtctccataagtgtcagcaatgccctgggccacaatgccacagctatcacctttgacgagttcaccattgtgaagcctgatcctccagaaaatgtggtagcccggccagtgcccagcaaccctcgccggctggaggtgacgtggcagaccccctcgacctggcctgaccctgagtcttttcctctcaagttctttctgcgctaccgacccctcatcctggaccagtggcagcatgtggagctgtccgacggcacagcacacaccatcacagatgcctacgccgggaaggagtacattatccaggtggcagccaaggacaatgagattgggacatggagtgactggagcgtagccgcccacgctacgccctggactgaggaaccgcgacacctcaccacggaggcccaggctgcggagaccacgaccagcaccaccagctccctggcacccccacctaccacgaagatctgtgaccctggggagctgggcagcggcgggggaccctcggcacccttcttggtcagcgtccccatcactctggccctggctgccgctgccgccactgccagcagtctcttgatctgagcccggcaccccatgaggacatgcagagcacctgcagaggagcaggaggccggagctgagcctgcagaccccggtttctattttgcacacgggcaggaggaccttttgcattctcttcagacacaatttgtggagaccccggcgggcccgggcctgccgccccccagccctgccgcaccaagctggccctccttcctccctcaggggaggtgggccatgcagctaacccacccaccaaagaccccctcaccctggccccttgggctggaccctccaatgccagcgactcccaggagcccttgggggacgtgaggggagcctctcacatccgatttctcctcctgccccagcctcctgtctatcccagggtctctgttgccaccatcagattataagctcctgatgctgggggggcccagccatccccctccccccagcacccacaattttcagtcccctcccctctgccctgttttgtatacccctcccctgaccctgctcctatcccacagtatttaatgccctgtcagtcccttctagtctgactcaatggtaacttgctgtatttgaattttttatagatgtatatacagggtggggggagtgggcggttctcattaaacgtcaccatttcatgag

SEQ ID NO: 119771 - DNA, 2052 bp, Homo sapiens
  Payload ID: 3490
  Gene Symbol: CNTFR
  Gene Name: ciliary neurotrophic factor receptor
  Uniprot ID: P26992
  ENST ID: ENST00000378980
  CDS Start-End: 295-1413
ctgaagagccggtgcagagcgggcggcggcggcggcggcagcggaggcggcggctccagccggcgcggcgcgaggctcggcggtgggatccggcgggcggtgctagctccgcgctccctgcctcgctcgctgccgggggcggtcggaaggcgcggcgcgaagcccgggtggcccgagggcgcgactctagccttgtcacctcatcttgcccccttggttttggaagtcctgaagagttggtctggaggaggaggaggacattgatgtgcttggtgtgtggccagtggtgaagagatggctgctcctgtcccgtgggcctgctgtgctgtgcttgccgccgccgccgcagttgtctacgcccagagacacagtccacaggaggcaccccatgtgcagtacgagcgcctgggctctgacgtgacactgccatgtgggacagcaaactgggatgctgcggtgacgtggcgggtaaatgggacagacctggcccctgacctgctcaacggctctcagctggtgctccatggcctggaactgggccacagtggcctctacgcctgcttccaccgtgactcctggcacctgcgccaccaagtcctgctgcatgtgggcttgccgccgcgggagcctgtgctcagctgccgctccaacacttaccccaagggcttctactgcagctggcatctgcccacccccacctacattcccaacaccttcaatgtgactgtgctgcatggctccaaaattatggtctgtgagaaggacccagccctcaagaaccgctgccacattcgctacatgcacctgttctccaccatcaagtacaaggtctccataagtgtcagcaatgccctgggccacaatgccacagctatcacctttgacgagttcaccattgtgaagcctgatcctccagaaaatgtggtagcccggccagtgcccagcaaccctcgccggctggaggtgacgtggcagaccccctcgacctggcctgaccctgagtcttttcctctcaagttctttctgcgctaccgacccctcatcctggaccagtggcagcatgtggagctgtccgacggcacagcacacaccatcacagatgcctacgccgggaaggagtacattatccaggtggcagccaaggacaatgagattgggacatggagtgactggagcgtagccgcccacgctacgccctggactgaggaaccgcgacacctcaccacggaggcccaggctgcggagaccacgaccagcaccaccagctccctggcacccccacctaccacgaagatctgtgaccctggggagctgggcagcggcgggggaccctcggcacccttcttggtcagcgtccccatcactctggccctggctgccgctgccgccactgccagcagtctcttgatctgagcccggcaccccatgaggacatgcagagcacctgcagaggagcaggaggccggagctgagcctgcagaccccggtttctattttgcacacgggcaggaggaccttttgcattctcttcagacacaatttgtggagaccccggcgggcccgggcctgccgccccccagccctgccgcaccaagctggccctccttcctccctcaggggaggtgggccatgcagctaacccacccaccaaagaccccctcaccctggccccttgggctggaccctccaatgccagcgactcccaggagcccttgggggacgtgaggggagcctctcacatccgatttctcctcctgccccagcctcctgtctatcccagggtctctgttgccaccatcagattataagctcctgatgctgggggggcccagccatccccctccccccagcacccacaattttcagtcccctcccctctgccctgttttgtatacccctcccctgaccctgctcctatcccacagtatttaatgccctgtcagtcccttctagtctgactcaatggtaacttgctgtatttgaattttttatagatgtatatacagggtggggggagtgggcggttctcattaaacgtcaccatttcatgag

SEQ ID NO: 119772 - DNA, 921 bp, Homo sapiens
  Payload ID: 3490
  Gene Symbol: CNTFR
  Gene Name: ciliary neurotrophic factor receptor
  ENST ID: ENST00000417345
  CDS Start-End: 154-921
gcacggggaccacagccgtcttgagggcgcgcccgagaaaggactctagccttgtcacctcatcttgcccccttggttttggaagtcctgaagagttggtctggaggaggaggaggacattgatgtgcttggtgtgtggccagtggtgaagagatggctgctcctgtcccgtgggcctgctgtgctgtgcttgccgccgccgccgcagttgtctacgcccagagacacagtccacaggaggcaccccatgtgcagtacgagcgcctgggctctgacgtgacactgccatgtgggacagcaaactgggatgctgcggtgacgtggcgggtaaatgggacagacctggcccctgacctgctcaacggctctcagctggtgctccatggcctggaactgggccacagtggcctctacgcctgcttccaccgtgactcctggcacctgcgccaccaagtcctgctgcatgtgggcttgccgccgcgggagcctgtgctcagctgccgctccaacacttaccccaagggcttctactgcagctggcatctgcccacccccacctacattcccaacaccttcaatgtgactgtgctgcatggctccaaaattatggtctgtgagaaggacccagccctcaagaaccgctgccacattcgctacatgcacctgttctccaccatcaagtacaaggtctccataagtgtcagcaatgccctgggccacaatgccacagctatcacctttgacgagttcaccattgtgaagcctgatcctccagaaaatgtggtagcccggccagtgcccagcaaccctcgccggctggaggtgacgtggcagaccccctcgacctggcctgaccctgagtcttttcctctcaagttctttctgcgctaccgacccctcatcctggaccagtggcagcat

SEQ ID NO: 119773 - DNA, 1926 bp, Homo sapiens
  Payload ID: 3490
  Gene Symbol: CNTFR
  Gene Name: ciliary neurotrophic factor receptor
  Uniprot ID: P26992
  ENST ID: ENST00000610543
  CDS Start-End: 171-1289
ccggggctgcgcgtgaagcacggggaccacagccgtcttgagggcgcgcccgagaaaggactctagccttgtcacctcatcttgcccccttggttttggaagtcctgaagagttggtctggaggaggaggaggacattgatgtgcttggtgtgtggccagtggtgaagagatggctgctcctgtcccgtgggcctgctgtgctgtgcttgccgccgccgccgcagttgtctacgcccagagacacagtccacaggaggcaccccatgtgcagtacgagcgcctgggctctgacgtgacactgccatgtgggacagcaaactgggatgctgcggtgacgtggcgggtaaatgggacagacctggcccctgacctgctcaacggctctcagctggtgctccatggcctggaactgggccacagtggcctctacgcctgcttccaccgtgactcctggcacctgcgccaccaagtcctgctgcatgtgggcttgccgccgcgggagcctgtgctcagctgccgctccaacacttaccccaagggcttctactgcagctggcatctgcccacccccacctacattcccaacaccttcaatgtgactgtgctgcatggctccaaaattatggtctgtgagaaggacccagccctcaagaaccgctgccacattcgctacatgcacctgttctccaccatcaagtacaaggtctccataagtgtcagcaatgccctgggccacaatgccacagctatcacctttgacgagttcaccattgtgaagcctgatcctccagaaaatgtggtagcccggccagtgcccagcaaccctcgccggctggaggtgacgtggcagaccccctcgacctggcctgaccctgagtcttttcctctcaagttctttctgcgctaccgacccctcatcctggaccagtggcagcatgtggagctgtccgacggcacagcacacaccatcacagatgcctacgccgggaaggagtacattatccaggtggcagccaaggacaatgagattgggacatggagtgactggagcgtagccgcccacgctacgccctggactgaggaaccgcgacacctcaccacggaggcccaggctgcggagaccacgaccagcaccaccagctccctggcacccccacctaccacgaagatctgtgaccctggggagctgggcagcggcgggggaccctcggcacccttcttggtcagcgtccccatcactctggccctggctgccgctgccgccactgccagcagtctcttgatctgagcccggcaccccatgaggacatgcagagcacctgcagaggagcaggaggccggagctgagcctgcagaccccggtttctattttgcacacgggcaggaggaccttttgcattctcttcagacacaatttgtggagaccccggcgggcccgggcctgccgccccccagccctgccgcaccaagctggccctccttcctccctcaggggaggtgggccatgcagctaacccacccaccaaagaccccctcaccctggccccttgggctggaccctccaatgccagcgactcccaggagcccttgggggacgtgaggggagcctctcacatccgatttctcctcctgccccagcctcctgtctatcccagggtctctgttgccaccatcagattataagctcctgatgctgggggggcccagccatccccctccccccagcacccacaattttcagtcccctcccctctgccctgttttgtatacccctcccctgaccctgctcctatcccacagtatttaatgccctgtcagtcccttctagtctgactcaatggtaacttgctgtatttgaattttttatagatgtatatacagggtggggggagtgggcggttctcattaaacgtcaccatttcatg

SEQ ID NO: 119774 - DNA, 6656 bp, Homo sapiens
  Payload ID: 3491
  Gene Symbol: CROCC
  Gene Name: ciliary rootlet coiled-coil, rootletin
  Uniprot ID: Q5TZA2
  ENST ID: ENST00000375541
  CDS Start-End: 70-6123
gcgtgctgactgagctagtcttggggtcctggagaagggggctggaggcatgcccacagcctcccccccatgagcttggggctggcgggggcacaggaggtggagctgacactagagacggttatccagacactggagagcagcgtcctgtgccaggagaaaggcttgggcgcgcgggacctggcccaggacgctcagatcaccagcctgcctgcccttatcagggagattgtcacccgcaacctctcccagcctgagagcccagtcctgctgccggccacagagatggcatcgctgctgtcgctgcaggaggagaaccagctgctgcagcaggagctgtcccgcgtggaggacctgctggcccagagccgtgccgagcgcgatgagctcgccattaagtacaatgcggtcagcgagaggctggagcaggctctgcggctggagcctggggagctggagacgcaggagcccagggggctggtacggcagagcgtggagttgcggaggcagctgcaggaggagcaggcctcctaccggcgcaagctgcaggcctaccaggagggccagcagcggcaggcccagcttgtgcagcggctgcagggcaagattctccagtacaagaagaggtgctcggagctggagcagcagctgctggagagatccggagagctggagcagcagcggctgagggacacagagcacagccaagacctggaaagcgccctcatccggctggaggaggagcagcagaggagtgccagcctggcccaggtgaatgccatgctccgagaacagctggaccaggcaggctcggccaaccaggctctgagtgaggacatacgaaaggtgaccaatgactggacacgctgccgcaaggagctggagcaccgggaggcggcgtggaggcgcgaggaggagtccttcaacgcctacttcagcaacgagcacagtcgcctgctcctcctctggaggcaggtggtggggttccggcggctggtcagcgaggtgaagatgttcactgagagggacctgctgcagctgggaggggagctggcccggacatcacgagctgtccaggaggcgggcctgggactgagcacgggcctacggctggcagagagccgggccgaggcagccctggagaaacaggccctgctgcaggcccagctggaggagcagctgcgggacaaggtgctccgcgagaaggacctggcgcagcagcagatgcaaagcgacctggacaaggctgacctcagtgccagagtgacagagctgggcctggcagtgaagcgtcttgagaagcagaatctggagaaggatcaggtcaacaaggacctcactgagaagcttgaggccctggaatccctgcggctacaggagcaggcggccctggagacagaggatggagaggggctacagcagaccctaagggacctggcacaggccgtcttgtcagactctgagagcggcgtccagctgagcggctctgagcgcaccgcggatgcttccaacggcagcctgcgggggctctcgggccagcggaccccgtccccaccgcggcgctcctcgcccggccgaggccgttcaccccgccgaggcccctccccggcctgctcagactcctccacgctcgccctgatccactccgccctgcacaagcgccagctgcaggtccaggacatgcgtgggcgctatgaggcaagccaggacctactgggcaccctgcggaagcagcttagcgacagcgagagcgagcggcgggccctagaggaacagctgcagcgcctgcgggacaagaccgacggcgccatgcaggcccacgaggacgcccagcgcgaggtgcagcggctgcggagcgccaacgagctcctgagcagggagaagagcaacctggcccacagcctgcaggtggcccagcagcaggccgaggagctgcggcaggagcgggagaagctgcaggctgcccaggaggagctgcggcgccagcgggaccggctggaggaagagcaggaggacgcagtgcaggatggcgcgcgggtgcgccgggagcttgagcgcagccatagacaactagagcagctggaagggaagcgctcagtcctggccaaggagctggtggaggtgagggaggcgctgagccgcgccacactgcaacgggacatgctgcaggccgagaaggccgaggtggccgaggcgctgaccaaggctgaggctggccgcgtggagctcgagctctccatgaccaagctgagggcagaggaggcctccctgcaggactccctgtccaagctgagcgccctcaacgagagccttgctcaggacaagttggatctgaaccgccttgtcgcccagctggaggaagaaaagtccgccctgcagggccggcaacggcaggcagagcaggaggccacagtggcgcgggaagagcaggaacggctagaggagctgcggttggagcaggaggtggcgcggcagggcctggagggctccctacgagtggcggagcaggcccaggaggcattggagcagcagctccccacgctgcgccatgagcgcagccagctgcaggagcagctagcgcagctctcccggcagctgagcgggcgggagcaggagctggagcaggcccggcgggaggcccagcggcaagtggaggcgctggagcgagcggcccgtgagaaggaggcgctagccaaggagcacgctggcctggctgtgcagctggtggctgcggagcgtgaaggcaggaccctgtcagaggaggccacacgcctgcgcttggagaaggaagccctggagggcagcctgtttgaggtgcaacggcagctggcccagcttgaggcccgccgggagcagctggaagccgaggggcaggccctgctgctggccaaggagaccctgactggggagttggcgggcctgcggcagcaaataatagctacacaggagaaagccagtctagacaaggagctgatggcccagaagctggtgcaggctgagcgggaggcccaggcctctctgcgggagcagcgggcagctcacgaggaggacttacagcgactccagcgtgaaaaggaggcagcatggcgggagctggaggccgagcgggcccagctgcagagtcagctgcagcgtgagcaggaggagctgctggcccggctggaggctgagaaggaagagctgagtgaggagattgctgccctgcagcaggagcgcgacgagggcctcctcctagcagagagtgagaagcagcaggccttgtctctgaaggagtctgagaagacggcgctgtcagagaagttgatgggtacacggcacagcctggccaccatctccctggagatggagcggcagaaacgagatgcccagagccggcaggagcaggaccggagcaccgtgaacgctctgacgtctgagctgcgggacctacgggcccagcgggaggaggctgctgcggcccacgcccaggaggtgaggaggctgcaagagcaggcccgagacctgggcaagcagcgggactcctgtcttcgcgaggcagaagagcttcggacccagctgcgtctgctggaggatgcccgtgacgggctgcggcgggagctgctggaggcccagcgcaagctgcgtgagagccaggagggccgggaggtgcagcgccaggaggcaggcgagctgcgacgcagcctgggcgagggtgccaaggagcgcgaggccctgcggcgttccaatgaggagcttcggtctgctgtgaagaaggcagagagcgagcgcatcagcctgaagcttgccaatgaggacaaggagcagaagctggcactcctagaggaggcacggacagctgtgggcaaggaggccggggagctgcgaactgggctgcaggaggtggagcgctcacggctggaggctcggcgggagctgcaggagctccggcgtcagatgaagatgctggacagtgagaacaccagactgggccgggagctggcggagctgcagggccgcctggcgctgggcgagcgggcagagaaggagagcaggcgggagaccctgggcctccggcagaggctgctgaagggcgaggccagcctggaggtgatgcggcaggagctccaggtagcccagcggaagctgcaggaacaagaaggcgagttccggacccgcgagcgacgcctgctgggctccctggaggaggcgcgtggcactgaaaagcagcagctggaccacgcccgcggcctggagctgaagctggaggcggcgcgggccgaggctgcagagctgggcctgcggctgagcgcagccgagggccgggcacaaggcctggaggccgagctggcccgcgtggaggtgcagcggcgcgcggcggaggcccagctgggtggcctgcgctcggctctgcgccggggcctcggcctcggtcgcgcgcccagcccagccccgcggccagtgcccggttcccctgcccgggacgcacccgcagaaggaagcggggaagggctcaacagccccagcaccttagaatgcagccctgggtcccagccaccatctccaggacctgccacctccccagcctctccagacctggacccggaggcagtgcgcggggccctccgggaattcctgcaagagctgcggagtgcccagagagaacgggacgaacttcggacccagaccagtgccctgaatcgccagctggccgagatggaggctgagagggacagcgcaacctcgagggccaggcagctgcagaaggcggtggctgagagtgaggaagcccggcgcagtgtggatgggcggctgagcggggtccaggcggagctggcgctgcaggaggagagtgtgcggcgcagtgagcgggagcgccgggccacgctggaccaggtggccacactggagaggagcctgcaggccaccgagagcgagctccgggccagccaggagaagatcagcaagatgaaggccaatgagacaaagctggagggcgacaagcggcgcctgaaggaggttctggacgcctccgagagccgcactgtcaagctggagctgcagcggcgctcgcttgagggggagctgcagcgcagccgcctgggcctcagtgaccgcgaggcccaagcccaggccctccaggatcgggtggattccctgcagagacaggtggccgacagcgaggtgaaggcagggaccctgcagctgaccgtggagcggctgaatggggccctggctaaggtggaggaaagcgagggggccctgcgggacaaggtgcggggcctgacagaggccctggcccagagcagtgccagcctcaacagcacccgggacaagaacctgcatctgcagaaggctctgaccgcctgtgaacatgaccgccaagtactccaggaacggctggatgccgcccggcaggcattatctgaggcacggaagcagagcagctccctgggcgagcaggtgcagacgttgcgaggcgaggtggctgacctggaactgcagcgggtggaggccgagggccagctacaacagctacgggaggtgctgcggcagcggcaggagggtgaggctgcagccctgaacaccgtccagaagctgcaagacgagcggcggctgctgcaggagcgcctgggaagcctgcagcgcgccctggctcagctggaagctgagaagcgggaggtggagcgctcagccctgcggctggagaaggaccgtgtagccctcaggaggacgctggacaaggtggagcgggagaagcttcgtagccatgaggacacagtgcggctgagcgcagagaagggccgcctggaccgcaccctcacgggggctgagctggagctggcagaggcgcagaggcagatccagcagctggaggcgcaggtggtggtgctggagcagagccacagcccggcccagctggaggtggatgcgcagcagcagcagctggagctgcagcaggaggtggagcggctgcgcagcgcccaggcgcagactgagcgcaccctggaggctcgggagcgggcccaccgccagagggtgcgtgggctggaggagcaggtgtccacactgaagggccagctgcagcaggagcttcgaaggagctcagcacccttctccccaccctccggccccccagagaaatgagctcctgctggcatctggagaacacccctgtgcctgggacaggggaggacccttcttttggacagcccccccacccagagcccggtcccttgggggcctcaagctggggtgggatgaggaggcgctctgctggcagtgctgaggacgggtactccagctccaggcctggagaggcttcccagcaacacctgcagtccagcccccctcttctaggatgagccactgtagatcattaaagttcctccttgagaggctgagccgtagccaggattggggagagcccttgtctctggtcagccctggagcatgggatcgtgggaaagaggagggggaccaggcccagggcaggggtcagaggcccaggccctgacttcggcttcccagagatctctccgccttagttaagagcatgtgtcgggaaattcctcagagtgctcagagtccctgtatttttatacctttttacaatgttaactgttcagaactgttttttgtaacaaaaccttgtttttaaaaaagtttgtacagctgtg

SEQ ID NO: 119775 - DNA, 3931 bp, Homo sapiens
  Payload ID: 3491
  Gene Symbol: CROCC
  Gene Name: ciliary rootlet coiled-coil, rootletin
  ENST ID: ENST00000445545
  CDS Start-End: 1-3931
cagggagattgtcacccgcaacctctcccagcctgagagcccagtcctgctgccggccacagagatggcatcgctgctgtcgctgcaggaggagaaccagctgctgcagcaggagctgtcccgcgtggaggacctgctggcccagagccgtgccgagcgcgatgagctcgccattaagtacaatgcggtcagcgagagggacacagagcacagccaagacctggaaagcgccctcatccggctggaggaggagcagcagaggagtgccagcctggcccaggtgaatgccatgctccgagaacagctggaccaggcaggctcggccaaccaggctctgagtgaggacatacgaaaggtgaccaatgactggacacgctgccgcaaggagctggagcaccgggaggcggcgtggaggcgcgaggaggagtccttcaacgcctacttcagcaacgagcacagtcgcctgctcctcctctggaggcaggtggtggggttccggcggctggtcagcgaggtgaagatgttcactgagagggacctgctgcagctgggaggggagctggcccggacatcacgagctgtccaggaggcgggcctgggactgagcacgggcctacggctggcagagagccgggccgaggcagccctggagaaacaggccctgctgcaggcccagctggaggagcagctgcgggacaaggtgctccgcgagaaggacctggcgcagcagcagatgcaaagcgacctggacaaggctgacctcagtgccagagtgacagagctgggcctggcagtgaagcgtcttgagaagcagaatctggagaaggatcaggtcaacaaggacctcactgagaagcttgaggccctggaatccctgcggctacaggagcaggcggccctggagacagaggatggagaggggctacagcagaccctaagggacctggcacaggccgtcttgtcagactctgagagcggcgtccagctgagcggctctgagcgcaccgcggatgcttccaacggcagcctgcgggggctctcgggccagcggaccccgtccccaccgcggcgctcctcgcccggccgaggccgttcaccccgccgaggcccctccccggcctgctcagactcctccacgctcgccctgatccactccgccctgcacaagcgccagctgcaggtccaggacatgcgtgggcgctatgaggcaagccaggacctactgggcaccctgcggaagcagcttagcgacagcgagagcgagcggcgggccctagaggaacagctgcagcgcctgcgggacaagaccgacggcgccatgcaggcccacgaggacgcccagcgcgaggtgcagcggctgcggagcgccaacgagctcctgagcagggagaagagcaacctggcccacagcctgcaggtggcccagcagcaggccgaggagctgcggcaggagcgggagaagctgcaggctgcccaggaggagctgcggcgccagcgggaccggctggaggaagagcaggaggacgcagtgcaggatggcgcgcgggtgcgccgggagcttgagcgcagccatagacaactagagcagctggaagggaagcgctcagtcctggccaaggagctggtggaggtgagggaggcgctgagccgcgccacactgcaacgggacatgctgcaggccgagaaggccgaggtggccgaggcgctgaccaaggctgaggctggccgcgtggagctcgagctctccatgaccaagctgagggcagaggaggcctccctgcaggactccctgtccaagctgagcgccctcaacgagagccttgctcaggacaagttggatctgaaccgccttgtcgcccagctggaggaagaaaagtccgccctgcagggccggcaacggcaggcagagcaggaggccacagtggcgcgggaagagcaggaacggctagaggagctgcggttggagcaggaggtggcgcggcagggcctggagggctccctacgagtggcggagcaggcccaggaggcattggagcagcagctccccacgctgcgccatgagcgcagccagctgcaggagcagctagcgcagctctcccggcagctgagcgggcgggagcaggagctggagcaggcccggcgggaggcccagcggcaagtggaggcgctggagcgagcggcccgtgagaaggaggcgctagccaaggagcacgctggcctggctgtgcagctggtggctgcggagcgtgaaggcaggaccctgtcagaggaggccacacgcctgcgcttggagaaggaagccctggagggcagcctgtttgaggtgcaacggcagctggcccagcttgaggcccgccgggagcagctggaagccgaggggcaggccctgctgctggccaaggagaccctgactggggagttggcgggcctgcggcagcaaataatagctacacaggagaaagccagtctagacaaggagctgatggcccagaagctggtgcaggctgagcgggaggcccaggcctctctgcgggagcagcgggcagctcacgaggaggacttacagcgactccagcgtgaaaaggaggcagcatggcgggagctggaggccgagcgggcccagctgcagagtcagctgcagcgtgagcaggaggagctgctggcccggctggaggctgagaaggaagagctgagtgaggagattgctgccctgcagcaggagcgcgacgagggcctcctcctagcagagagtgagaagcagcaggccttgtctctgaaggagtctgagaagacggcgctgtcagagaagttgatgggtacacggcacagcctggccaccatctccctggagatggagcggcagaaacgagatgcccagagccggcaggagcaggaccggagcaccgtgaacgctctgacgtctgagctgcgggacctacgggcccagcgggaggaggctgctgcggcccacgcccaggaggtgaggaggctgcaagagcaggcccgagacctgggcaagcagcgggactcctgtcttcgcgaggcagaagagcttcggacccagctgcgtctgctggaggatgcccgtgacgggctgcggcgggagctgctggaggcccagcgcaagctgcgtgagagccaggagggccgggaggtgcagcgccaggaggcaggcgagctgcgacgcagcctgggcgagggtgccaaggagcgcgaggccctgcggcgttccaatgaggagcttcggtctgctgtgaagaaggcagagagcgagcgcatcagcctgaagcttgccaatgaggacaaggagcagaagctggcactcctagaggaggcacggacagctgtgggcaaggaggccggggagctgcgaactgggctgcaggaggtggagcgctcacggctggaggctcggcgggagctgcaggagctccggcgtcagatgaagatgctggacagtgagaacaccagactgggccgggagctggcggagctgcagggccgcctggcgctgggcgagcgggcagagaaggagagcaggcgggagaccctgggcctccggcagaggctgctgaagggcgaggccagcctggaggtgatgcggcaggagctccaggtagcccagcggaagctgcaggaacaagaaggcgagttccggacccgcgagcgacgcctgctgggctccctggaggaggcgcgtggcactgaaaagcagcagctggaccacgcccgcggcctggagctgaagctggaggcggcgcgggccgaggctgcagagctgggcctgcggctgagcgcagccgagggccgggcacaaggcctggaggccgagctggcccgcgtggaggtgcagcggcgcgcggcggaggcccagctgggtggcctgcgctcggctctgcgccggggcctcggcctcggtcgcgcgcccagc

SEQ ID NO: 119776 - DNA, 614 bp, Homo sapiens
  Payload ID: 3491
  Gene Symbol: CROCC
  Gene Name: ciliary rootlet coiled-coil, rootletin
  ENST ID: ENST00000467715
  CDS Start-End: 1-614
ctgcgggacaaggtgctccgcgagaaggacctggcgcagcagcagatgcaaagcgacctggacaaggctgacctcagtgccagagtgacagagctgggcctggcagtgaagcgtcttgagaagcagaatctggagaaggatcaggtcaacaaggacctcactgagaagcttgaggccctggccgtcttgtcagactctgagagcggcgtccagctgagcggctctgagcgcaccgcggatgcttccaacggcagcctgcgggggctctcgggccagcggaccccgtccccaccgcggcgctcctcgcccggccgaggccgttcaccccgccgaggcccctccccggcctgctcagactcctccacgctcgccctgatccactccgccctgcacaagcgccagctgcaggtccaggacatgcgtgggcgctatgaggcaagccaggacctactgggcaccctgcggaagcagcttagcgacagcgagagcgagcggcgggccctagaggaacagctgcagcgcctgcgggacaagaccgacggcgccatgcaggcccacgaggacgcccagcgcgaggtgcagcggctgcggagcgccaacgagctcctgagcag

SEQ ID NO: 119777 - DNA, 2515 bp, Homo sapiens
  Payload ID: 3491
  Gene Symbol: CROCC
  Gene Name: ciliary rootlet coiled-coil, rootletin
  ENST ID: ENST00000467938
  CDS Start-End: 1-2515
cacccgcaacctctcccagcctgagagcccagctggagcaggctctgcggctggagcctggggagctggagacgcaggagcccagggggctggtacggcagagcgtggagttgcggaggcagctgcaggaggagcaggcctcctaccggcgcaagctgcaggcctaccaggagggccagcagcggcaggcccagcttgtgcagcggctgcagggcaagattctccagtacaagaagaggtgctcggagctggagcagcagctgctggagagatccggagagctggagcagcagcggctgagggacacagagcacagccaagacctggaaagcgccctcatccggctggaggaggagcagcagaggagtgccagcctggcccaggtgaatgccatgctccgagaacagctggaccaggcaggctcggccaaccaggctctgagtgaggacatacgaaaggtgaccaatgactggacacgctgccgcaaggagctggagcaccgggaggcggcgtggaggcgcgaggaggagtccttcaacgcctacttcagcaacgagcacagtcgcctgctcctcctctggaggcaggtggtggggttccggcggctggtcagcgaggtgaagatgttcactgagagggacctgctgcagctgggaggggagctggcccggacatcacgagctgtccaggaggcgggcctgggactgagcacgggcctacggctggcagagagccgggccgaggcagccctggagaaacaggccctgctgcaggcccagctggaggagcagctgcgggacaaggtgctccgcgagaaggacctggcgcagcagcagatgcaaagcgacctggacaaggctgacctcagtgccagagtgacagagctgggcctggcagtgaagcgtcttgagaagcagaatctggagaaggatcaggtcaacaaggacctcactgagaagcttgaggccctggaatccctgcggctacaggagcaggcggccctggagacagaggatggagaggggctacagcagaccctaagggacctggcacaggccgtcttgtcagactctgagagcggcgtccagctgagcggctctgagcgcaccgcggatgcttccaacggcagcctgcgggggctctcgggccagcggaccccgtccccaccgcggcgctcctcgcccggccgaggccgttcaccccgccgaggcccctccccggcctgctcagactcctccacgctcgccctgatccactccgccctgcacaagcgccagctgcaggtccaggacatgcgtgggcgctatgaggcaagccaggacctactgggcaccctgcggaagcagcttagcgacagcgagagcgagcggcgggccctagaggaacagctgcagcgcctgcgggacaagaccgacggcgccatgcaggcccacgaggacgcccagcgcgaggtgcagcggctgcggagcgccaacgagctcctgagcagggagaagagcaacctggcccacagcctgcaggtggcccagcagcaggccgaggagctgcggcaggagcgggagaagctgcaggctgcccaggaggagctgcggcgccagcgggaccggctggaggaagagcaggaggacgcagtgcaggatggcgcgcgggtgcgccgggagcttgagcgcagccatagacaactagagcagctggaagggaagcgctcagtcctggccaaggagctggtggaggtgagggaggcgctgagccgcgccacactgcaacgggacatgctgcaggccgagaaggccgaggtggccgaggcgctgaccaaggctgaggctggccgcgtggagctcgagctctccatgaccaagctgagggcagaggaggcctccctgcaggactccctgtccaagctgagcgccctcaacgagagccttgctcaggacaagttggatctgaaccgccttgtcgcccagctggaggaagaaaagtccgccctgcagggccggcaacggcaggcagagcaggaggccacagtggcgcgggaagagcaggaacggctagaggagctgcggttggagcaggaggtggcgcggcagggcctggagggctccctacgagtggcggagcaggcccaggaggcattggagcagcagctccccacgctgcgccatgagcgcagccagctgcaggagcagctagcgcaggaggcagcatggcgggagctggaggccgagcgggcccagctgcagagtcagctgcagcgtgagcaggaggagctgctggcccggctggaggctgagaaggaagagctgagtgaggagattgctgccctgcagcaggagcgcgacgagggcctcctcctagcagagagtgagaagcagcaggccttgtctctgaaggagtctgagaagacggcgctgtcagagaagttgatgggtacacggcacagcctggccaccatctccctggagatggagcggcagaaacgagatgcccagagccggcaggagcaggaccgggtagg

SEQ ID NO: 119778 - DNA, 5382 bp, Homo sapiens
  Payload ID: 3492
  Gene Symbol: CROCC2
  Gene Name: ciliary rootlet coiled-coil, rootletin family member 2
  Uniprot ID: H7BZ55
  ENST ID: ENST00000443866
  CDS Start-End: 185-5152
ctggccatactgtcttacccacagggcaagagcaactgggtgcccaggctcgggacacaagactgcagagccaggtgccacacaggtgtggggcccgtggaccaaggaagaccctggccagttggaggagaactgccaggtagcaaagcccagacttctctggggtcctgcgctctgggctgcaatgagctctgcctccagtgagcctggcaatggggacgcctcccaacagcccctactggggctggacaccgtgatccagagactggaggacaccatcctgagtcccacagccagcagggaagaccgggcgctgaccgtgcgtggggaaggccggcaggcctcgcccacccccgtgcccacccgcatccgtgagatcgtggccggcagcctgagtgaggagccaccccaagcaggggtacaggagccgacagccactgtggcccgagtgcaagaggagaacgagctcctgcaggaggagctgacccggctgggggacctgctggcccaggccagcgccgagcgagatgagctggccagcaggtgccgtgtggtcagcgagcagctgcaggcccggctggagaccaccgaggctcagctgcggaggtcagagctggagcacagcgtggatctggaggaggcccttggccgtctggaggctgccgaggagaggagcaccggcctctgtcaggtgaacgcgctcctgcgggagcagctggaacatatgaagaaggccaatgacgcgctgggccgggagctggccgggatgacgggcagcgtgcagcgcctgcagggcgagctggagctgaggcgctgggcccagagacagacccggtcagggggcctggggcagccccgggacctcctcctcctgtggagacaggccgtggtgctggggacagacctggccgagctgcgtgtagccactgagaggggcctcgctgacctgcaggcagacacggccaggacagcccgccgcctgcacaccgcctgcctgaacctcgactccaacctgcggctgtcggccagcagcacggccagcaccctggggcagcagcttcgggacaaggctggggagatgctgcagctgcagggccgctgggacgcagagaaggtggcgctccaggccagactctcggagcaaaccctgctggtggagaagcttacagagcagaatgagcagaaggcgaagaccatcgctgccctcagaaccgacctgcagaacctggtggcccaggaggacgcccggtgcctggagctggcaggtagcagcatcactgaattgggggagccacggcgcccactgaggagcccccaacgtgccacatccccccatcaaggggcgtccccaccacacatctgctccccagccaccctggaccccgcactgcaggccatgcgggcagccatagagaggcggtggcggcgggaacaggagctgtgcctgcagctgaagtcctcccaggcactggtggccagtctccaggagcagctgtccgaaagccggcgggagctgtgggccgcacagaagctccagcaggagcgggctcgggagcaggcacgggaacgagaggctcttcggggccagctggaggcccagaggctcgaggtgcagcagtgccgggcatcctgcaagctcctggggagggagaaggctgctctggagatggtggtggaggagctgaaagggaaggcagatgctgcagatgcggagaagcaggggctggaggccgaggctgcagagctgcagagaagcctcctgctgcaggcagagcggagggaggagctggctctgcggagggagcggagctgcagggcactggagaccagtcaaggccgcctgcagcagctggaggagaaggtctccgggctcagagaggagctggcatcggtccgggaggcactgagcacagcacagctgcagcgggatgtcgtggagagtgagagggagggactgcgcagcgccctggcgcgggccgagtgcagcaatgcggacctggagcttcttgtgaggcggctgaagtcggagggagtggagcaaagggactccctggccgcaatggccgccttgatggaggggttggctcaggacaaaagtgccctgaaccacctggctctccagctggagcaggagcgggaccagctgcgggaacagcggaagactctggagcaggaacgggcccgggccggggagcagctggcacaggcggagcagcagctggcgctggagcgggcagagcgcaggggcctgcagcaggcctgcggacgcctggagcagcggcaggagcagctggaggggcaggcagccctgctggggcgagagaaggcccagctccaggagcaggtgggccaggtcacatgccagaaacaggccctggaggagcagctggctcagagcctgcaggaccaggaggcccagatgggcactctgcagcaagccctgcaaggaaaggatgctctgtctgaggagcgggcccagctgctggccaagcaggaggccttggagaggcagggccggctcgcagctgaagaggcagctgatctcagggtggagagggactccctggagagcagcctccttgaggcccaacagctggccacaaagctgcaggagcagctggaggaggaagcccggagcgcaggactcgcgcggcaggccttgcaagtggaaatggagcagctacaaagtgactgggaggtccaggaaatgaagctgcggcaggacacggtgcggctccagcgacaggtggcacagcaggagcgggaggcacagcgggccctggagagccaggcgttggcccaccgagaggccctggcacagctccaaagggagaaggagaccctgagcctgaccctggcagaggagaaggaggtagccagatgccagctggagcaggagaaggagctggtgacaaaaagtgcagctgagagggaggctctgaagggggaaattcagagcctgaagcaggagcgggacgagagccttctccaactggagcacaagatgcaacaggtgatggccctgtccctgaaagaaacagagcggagccttctgagtgaggagctctccagggccaggaggacgctagagcgggtacagcaggaggcacagagccagcaggagcaagcgcaggccaccatcagtgccacgactgaggagctgaaggccctccaggcccagtttgaggatgccatcacagcccatcagagggagaccacggccctacgcgagagcctccaggacctagcggctgagcggggcgatgtggagagagaggctgagaggctgcgggcacagctgaccgtggcccaggagggactggccgcactgcgccaggagctgcagggcgtcgaggagagccgggaggggctgcacagggaggcccaggaggcccgccgggcgctgagtgacgaggcccgcgagaaggacgtactgttgcttttcaacagcgagctgcgggccaccatctgcagggccgaacaggagaaggccagttttaagcggtccaaggaggagaaggagcagaagctgctcatcctggaggaggcccaggcggcgttgcagcaggaggccagtgcactgcgggcccacctgtgggagctggagcaggcagggggggacgcccgtcaggagctccgggaactccacagacaggtgaggacactgaaggccgagaaccagaggaggagtggagaggcccatgagctgcaggcgcagtgctcgcaggaggtgctggagctgcggaggcaggcagccaaggcagaggccaagcacgagggtgcccggaaggaggtcctgggattgcagaggaagttggcagaggtggaggccgcaggggaggcccatggacagcggctccaggagcacctccgtgagagccggggggctgagcagaccctccgagcagagctgcacagtgtcaccaggaagctgcaggaagccagtggtgtggctgatgctctccaggctcgcctggaccaggcctgtcaccgaatccacagcctggagcaggagctggcccaggctgagggtgcaaggcaggatgcggaggcccagctgggccggctgtgctccacgctccgccgtggcctggggctccagagacagagcccgtgggcctccccggagcagcctggttcccccaccaaaggctccgacagctcccaggctctccctgggcaacagggtaccagccccccagccaggccccactcgcccctccgatggccctcgcccacacccggaggccgcagctcagagctcatggatgtggccaccgtgcaggacatcctgcgggactttgtgcagaagctccgggaagcccagcgggagcgggatgactcccgcatccagatggcgaccctgagcagccggctgagcgaggcagagtgcaggtgtgcccgggcccagagccgcgtggggcagctgcagaaagccctggctgaggcggaagaaggccagcgccgggtggagggcgcgctgagcagcgcccgggcagcacgtgccctgcagaaggaggcgctccgcaggctggagttggagcacctggcgagcgtgcgtgcggcaggccaggagaagcggcggctgcaggagcaactggaaacgctgcgccaggctcttgaagagagcaggaggcacagccaaggtctggccaagcaggggaagctgctggaagaacagctcaccaacttggagcacaggtgccagaaggctgaggtatcgctggagcccctgcgacagatggagcaagagacactgaagagggaggaggatgtggcgaggctgggggctgagaaggagcagctggaccagtctctgaacagcctgcaccaggaggtggacggagccctgaggcaaaatcagcagctgcaggcccagatgacagagatggagcaggcccacacccagcggctccaggacctgacagctcagcaccagcgggacctggccacagaggcagagcgtctccatggggcccggccgcaggccacgcaggccctggagtcccaagaatggacccaccagcagcaggtaaaggtgctggaagagcaggtggccagcctgaaggagcaactggaccaggaagtgcagtggcggcaacaggcccacctcggccaggccttccagacaggacacgcccaaagggactgaagctcccagcacaggggaggcgcccagcgtggctgcagaggaagggaacgcaccgcaggtgggaggggcccagctgatttctcagcgtcacagtgaaaggcacccgtgatgagacagctcgctctcggcagtttcaggaccctccttgccctggctgctcatggggaacatttgaaatgcatgtgggggcctccgaattttgaattttaataaatagttgaatcagcgta

SEQ ID NO: 119779 - DNA, 1323 bp, Homo sapiens
  Payload ID: 3493
  Gene Symbol: CATIP
  Gene Name: ciliogenesis associated TTC17 interacting protein
  Uniprot ID: Q7Z7H3
  ENST ID: ENST00000289388
  CDS Start-End: 30-1193
cacagaccgggtagaggcaggcccacagcatgtcctccaaggtttactccacaggctccagagctaaggaccaccagccctcgggtccggagtgtctgccactcccagaggccaatgctgaagccatcgacttcctcagctccctccacaaggaggagctacagatgctgttcttctctgagacgctggccatggtctcagacaccggggagcctcagggagagctgaccattgaggtgcagagagggaaataccaggaaaaactcggcatgctgacatactgcctcttcgtgcatgcctctagccgaggcttcttggacaaaatgctctgcggaaattccctcctgggctatctctcagagaagctggagctcatggaacagcacagccaagacttcatcaagttcctcatcctccccatggaacggaagatgagtttgctgaagcaggatgatcagctggctgtgaccagaagtatcaaggagggtgaggaagtgaagactggagtgacttctttcccctggagctcaatcaagggcttcatctcagaggctgccaacctggtgctgctcagggtgatggcctggcggcggatggtgcccagcaatgcccgcttcctgaccttggacaccgagggcaaactctgctatttgacctatcaaaacctgggcttccagaccatccaggtagaccatcagcaggctgaagtcttcatcgtggagcagactgtccacgcggaggagggcatccccatgtcctgccagtactacctgctctccgatgggcacctggccaagagaatacaggtgggctccccagggtgctgcatcatcaccaagatgcccatcttgagggaagaggatgagattgagccacgcccagtgtttgagaagaagcccctggtatgggaggaggatatggagctctattcgaagttcctggaccggaaggaggagctccggctcggccacgccagctatctgcggcagcaccccgaagcccacgcgctcatctccgacttcctgctcttcctgctgctgcgccagccggaggacgtggtcaccttcgccgccgagttcttcggccccttcgacccgtggcgtccgtcgtcaccggccttgggctcctcccaccggcccaaccctttccgctccctggagccggagggagacgcccgctcgggggcggcctaagcggggcccaggcccggacagggcaggaaaccaggggtcgggctgggacgcgggcgggacgcgccggggcgggtgcgctttccgggctgcggttttgggggaataaatggggccctcccgcttctctgca

SEQ ID NO: 119780 - DNA, 5091 bp, Homo sapiens
  Payload ID: 3494
  Gene Symbol: CGN
  Gene Name: cingulin
  Uniprot ID: Q9P2M7
  ENST ID: ENST00000271636
  CDS Start-End: 134-3745
gaggacgagggggagggccggagctgcgcgtgctgctttgcccgagcccgagcccgagcccgagcccgagcccgagcccgagcccgaacgcaagcctgggagcgcggagcccggctagggactcctcctatttatggagcaggcacccaacatggctgagccccggggccccgtagaccatggagtccagattcgcttcatcacagagccagtgagtggtgcagagatgggcactctacgtcgaggtggacgacgcccagctaaggatgcaagagccagtacctacggggttgctgtgcgtgtgcagggaatcgctgggcagccctttgtggtgctcaacagtggggagaaaggcggtgactcctttggggtccaaatcaagggggccaatgaccaaggggcctcaggagctctgagctcagatttggaactccctgagaacccctactctcaggtcaagggatttcctgccccctcgcagagcagcacatctgatgaggagcctggggcctactggaatggaaagctactccgttcccactcccaggcctcactggcaggccctggcccagtggatcctagtaacagaagcaacagcatgctggagctagccccgaaagtggcttccccaggtagcaccattgacactgctcccctgtcttcagtggactcactcatcaacaagtttgacagtcaacttggaggccaggcccggggtcggactggccgccgaacacggatgctaccccctgaacagcgcaaacggagcaagagcctggacagccgcctcccacgggacacctttgaggaacgggagcgccagtccaccaaccactggacctctagcacaaaatatgacaaccatgtgggcacttcgaagcagccagcccagagccagaacctgagtcctctcagtggctttagccgttctcgtcagactcaggactgggtccttcagagttttgaggagccgcggaggagtgcacaggaccccaccatgctgcagttcaaatcaactccagacctccttcgagaccagcaggaggcagccccaccaggcagtgtggaccatatgaaggccaccatctatggcatcctgagggagggaagctcagaaagtgaaacctctgtgaggaggaaggttagtttggtgctggagaagatgcagcctctagtgatggtttcttctggttctactaaggccgtggcagggcagggtgagcttacccgaaaagtggaggagctacagcgaaagctggatgaagaggtgaagaagcggcagaagctagagccatcccaagttgggctggagcggcagctggaggagaaaacagaagagtgcagccgactgcaggagctgctggagaggaggaagggggaggcccagcagagcaacaaggagctccagaacatgaagcgcctcttggaccagggtgaagatttacgacatgggctggagacccaggtgatggagctgcagaacaagctgaaacatgtccagggtcctgagcctgctaaggaggtgttactgaaggacctgttagagacccgggaacttctggaagaggtcttggaggggaaacagcgagtagaggagcagctgaggctgcgggagcgggagttgacagccctgaagggggccctgaaagaggaggtagcctcccgtgaccaggaggtggaacatgtccggcagcagtaccagcgagacacagagcagctccgcaggagcatgcaagatgcaacccaggaccatgcagtgctggaggccgagaggcagaagatgtcagcccttgtgcgagggctgcagagggagctggaggagacttcagaggagacagggcattggcagagtatgttccagaagaacaaggaggatcttagagccaccaagcaggaactcctgcagctgcgaatggagaaggaggagatggaagaggagcttggagagaagatagaggtcttgcagagggaattagagcaggcccgagctagtgctggagatactcgccaggttgaggtgctcaagaaggagctgctccggacacaggaggagcttaaggaactgcaggcagaacggcagagccaggaggtggctgggcgacaccgggaccgggagttggagaagcagctggcggtcctgagggtcgaggctgatcgaggtcgggagctggaagaacagaacctccagctacaaaagaccctccagcaactgcgacaggactgtgaagaggcttccaaggctaagatggtggccgaggcagaggcaacagtgctggggcagcggcgggccgcagtggagacgacgcttcgggagacccaggaggaaaatgacgaattccgccggcgcatcctgggtttggagcagcagctgaaggagactcgaggtctggtggatggtggggaagcggtggaggcacgactacgggacaagctgcagcggctggaggcagagaaacagcagctggaggaggccctgaatgcgtcccaggaagaggaggggagtctggcagcagccaagcgggcactggaggcacgcctagaggaggctcagcgggggctggcccgcctggggcaggagcagcagacactgaaccgggccctggaggaggaagggaagcagcgggaggtgctccggcgaggcaaggctgagctggaggagcagaagcgtttgctggacaggactgtggaccgactgaacaaggagttggagaagatcggggaggactctaagcaagccctgcagcagctccaggcccagctggaggattataaggaaaaggcccggcgggaggtggcagatgcccagcgccaggccaaggattgggccagtgaggctgagaagacctctggaggactgagccgacttcaggatgagatccagaggctgcggcaggccctgcaggcatcccaggctgagcgggacacagcccggctggacaaagagctactggcccagcgactgcaggggctggagcaagaggcagagaacaagaagcgttcccaggacgacagggcccggcagctgaagggtctcgaggaaaaagtctcacggctggaaacagagttagatgaggagaagaacaccgtggagctgctaacagatcgggtgaatcgtggccgggaccaggtggatcagctgaggacagagctcatgcaggaaaggtctgctcggcaggacctggagtgtgacaaaatctccttggagagacagaacaaggacctgaagacccggttggccagctcagaaggcttccagaagcctagtgccagcctctctcagcttgagtcccagaatcagttgttgcaggagcggctacaggctgaagagagggagaagacagttctgcagtctaccaatcgaaaactggagcggaaagttaaagaactatccatccagattgaagacgagcggcagcatgtcaatgaccagaaagaccagctaagcctgagggtgaaggctttgaagcgtcaggtggatgaagcagaagaggaaattgagcgactggacggcctgaggaagaaggcccagcgtgaggtggaggagcagcatgaggtcaatgaacagctccaggcccggatcaagtctctggagaaggactcctggcgcaaagcttcccgctcagctgctgagtcagctctcaaaaacgaagggctgagctcagatgaggaattcgacagtgtctacgatccctcgtccattgcatcactgcttacggagagcaacctacagaccagctcctgttagctcgtggtcctcaaggactcagaaaccaggctcgaggcctatcccagcaagtgctgctctgctctgcccaccctgggttctgcattcctatgggtgacccaattattcagacctaagacagggaggggtcagagtgatggtgataaaaaaaaaaaatcatcagcaataagctgatagatggactttccactgtaggagtggacatttcaagccaactgagccttttcctcaagtgccgacacctccctcatctctcttatagtggaaggatggtcagcattaggctgatggggactgagaaggataggaagggatagaaattgccatgtgtataaagctttattctttagcccttaaccctaaggctcagggaaataccctatgttattgtgctccctggattcctgcaactcattttccttccactctggagcagggtgaggggaatgttatgggtaacagacatgcaggcatggctctacccatttctttgcacaagtatggggcccatgtggtagtccccatacccctccagttcctatatttttgtcttcttcctttcccctctttgccattcctaccttgcatttttcctgtcagtgccttagccaaggcaaggagataaggatgctcttcttgctttttatatctgcacattcatacctctccaaagaccagcttttccccagccagggccctcagccttccctgctgccccagtgattgattgagagagctgttggggtttctctgccaatgacccctgggagagggactttggtagggtcatgataaagtggcgggggtctggtcctgctcagggttttcatccttcctcctctccctcctctgtgactgtggatatggttataaggtggttgcacctgggagccctgacaactggctgcacaaattccaaaagtaaaggtgtcagtccctgtggccttccttggggcttctctgaccacatgtgcccaacttcaataagagaaccaagggaccctcattttctgaggtgcttggctctgattcagggctttgcaaggggttagaagctgactgtaaaaatgggaagaggcaacggaagacatttatttctcctttggattttggggagaaccaagccctggtagggaagaggtaagggggatgattcacctccatatttcctaagcaggttgtatagggagccggtggcaggaggaaggctgttttcacaaatgacttgtaatgtcgtgattaaaaaaattcctatattcttctgcaaatcaaacgttctttcccaatccaatccagccttggttttattttaaattaaatattaaaattacacatttatattgaaa

SEQ ID NO: 119781 - DNA, 394 bp, Homo sapiens
  Payload ID: 3494
  Gene Symbol: CGN
  Gene Name: cingulin
  ENST ID: ENST00000416743
  CDS Start-End: 1-394
cacaggaccccaccatgctgcagttcaaatcaactccagacctccttcgagaccagcaggaggcagccccaccaggcagtgtggaccatatgaaggccaccatctatggcatcctgagggagggaagctcagaaagtgaaacctctgtgaggaggaaggttagtttggtgctggagaagatgcagcctctagtggccgtggcagggcagggtgagcttacccgaaaagtggaggagctacagcgaaagctggatgaagaggtgaagaagcggcagaagctagagccatcccaagttgggctggagcggcagctggaggagaaaacagaagagtgcagccgactgcaggagctgctggagaggaggaagggggaggcccagcagagcaacaagga

SEQ ID NO: 119782 - DNA, 1138 bp, Homo sapiens
  Payload ID: 3494
  Gene Symbol: CGN
  Gene Name: cingulin
  ENST ID: ENST00000427934
  CDS Start-End: 266-1138
agggagctccgaggacgagggggagggccggagctgcgcgtgctgctttgcccgagcccgagcccgagcccgagcccgagcccgagcccgagcccgaacgcaagcctgggagcgcggagcccggctaggacagagtcttactctattgcccaagctggagtgcagtggtgcaattacagctcactgcagcttcaacctcctgggctcaggtgatcctcctgcctcagcctcctaagtcgctgggactacaggactcctcctatttatggagcaggcacccaacatggctgagccccggggccccgtagaccatggagtccagattcgcttcatcacagagccagtgagtggtgcagagatgggcactctacgtcgaggtggacgacgcccagctaaggatgcaagagccagtacctacggggttgctgtgcgtgtgcagggaatcgctgggcagccctttgtggtgctcaacagtggggagaaaggcggtgactcctttggggtccaaatcaagggggccaatgaccaaggggcctcaggagctctgagctcagatttggaactccctgagaacccctactctcaggtcaagggatttcctgccccctcgcagagcagcacatctgatgaggagcctggggcctactggaatggaaagctactccgttcccactcccaggcctcactggcaggccctggcccagtggatcctagtaacagaagcaacagcatgctggagctagccccgaaagtggcttccccaggtagcaccattgacactgctcccctgtcttcagtggactcactcatcaacaagtttgacagtcaacttggaggccaggcccggggtcggactggccgccgaacacggatgctaccccctgaacagcgcaaacggagcaagagcctggacagccgcctcccacgggacacctttgaggaacgggagcgccagtccaccaaccactggacctctagcacaaaatatgacaaccatgtgggcacttcgaagcagccagcccagagccagaacctgagtcctctcagtggctttagccgttctcgtcagactcaggactgggtccttcagagttttgaggagccgcggaggagtgcacaggaccccaccatgctgcag

SEQ ID NO: 119783 - DNA, 589 bp, Homo sapiens
  Payload ID: 3494
  Gene Symbol: CGN
  Gene Name: cingulin
  ENST ID: ENST00000502442
  CDS Start-End: 80-589
cgtcgggggacaacggagatattttctgcagaaagtgacgaaagagcattctggttcctgcagaggactcctcctatttatggagcaggcacccaacatggctgagccccggggccccgtagaccatggagtccagattcgcttcatcacagagccagtgagtggtgcagagatgggcactctacgtcgaggtggacgacgcccagctaaggatgcaagagccagtacctacggggttgctgtgcgtgtgcagggaatcgctgggcagccctttgtggtgctcaacagtggggagaaaggcggtgactcctttggggtccaaatcaagggggccaatgaccaaggggcctcaggagctctgagctcagatttggaactccctgagaacccctactctcaggtcaagggatttcctgccccctcgcagagcagcacatctgatgaggagcctggggcctactggaatggaaagctactccgttcccactcccaggcctcactggcaggccctggcccagtggatcctagtaacagaagcaacagcatgctggagctagccccgaaagtggcttccccaggtagcaccatt

SEQ ID NO: 119784 - DNA, 564 bp, Homo sapiens
  Payload ID: 3494
  Gene Symbol: CGN
  Gene Name: cingulin
  ENST ID: ENST00000505188
  CDS Start-End: 55-564
tgggatcagcatccctactttttgagaggctaactctgaggactcctcctatttatggagcaggcacccaacatggctgagccccggggccccgtagaccatggagtccagattcgcttcatcacagagccagtgagtggtgcagagatgggcactctacgtcgaggtggacgacgcccagctaaggatgcaagagccagtacctacggggttgctgtgcgtgtgcagggaatcgctgggcagccctttgtggtgctcaacagtggggagaaaggcggtgactcctttggggtccaaatcaagggggccaatgaccaaggggcctcaggagctctgagctcagatttggaactccctgagaacccctactctcaggtcaagggatttcctgccccctcgcagagcagcacatctgatgaggagcctggggcctactggaatggaaagctactccgttcccactcccaggcctcactggcaggccctggcccagtggatcctagtaacagaagcaacagcatgctggagctagccccgaaagtggcttccccaggtagcaccatt

SEQ ID NO: 119785 - DNA, 7224 bp, Homo sapiens
  Payload ID: 3495
  Gene Symbol: CGNL1
  Gene Name: cingulin-like 1
  Uniprot ID: Q0VF96
  ENST ID: ENST00000281282
  CDS Start-End: 79-3987
gcactccggccgggctctgctggctgcggcgggagctggacgcgggaggaggcggcggcggcgctggaacagtgaaccatggagctgtatttcggtgaatatcaacatgtgcagcaggaatatggggtccatctgagactcgcaagtgatgatacccaaaaatcaaggagttcccagaactccaaggcaggctcctacggtgtcagtattcgggtccagggaattgatggtcacccctatattgtcctgaataacacagaacggtgcctagcaggcacatcgttttctgaaaatgggccaccctttccacctccagtgataaataacctgcctctacattccagcaatggttctgtgccaaaggagaacagtgaagaacttcagcttccagaaaacccatacgcccagcctagcccaataagaaacctgaaacagcccctgctccatgagggcaagaatggagttctagatcgcaaagacgggtctgtgaagccatctcacctgctgaactttcagaggcatccagagcttttgcaaccctatgaccctgaaaagaatgagttgaatttacaaaatcaccagccttctgagagtaattggctaaaaacgttgacagaagaaggcatcaacaataagaagccttggacttgctttcccaaacctagcaattcccagcctaccagtccctccttggaagacccggccaaatctggtgtgacagctattcgtttatgcagctccgtggtcatagaggaccccaaaaagcagacctcagtgtgtgtaaacgttcagagctgcaccaaggagagggtgggagaggaggcccttttcactagcgggaggcccctgactgcccacagcccacatgcccaccctgaaaccaagaaaaccaggccagatgttcttcccttccggcgacaggattcagcgggacccgtcctggatggagctcggtcccggaggtcctcctcgtcatccacaactcccacgtcagccaactctttgtacaggtttttactggatgatcaggaatgtgccatccatgccgacaacgtcaatcgtcatgaaaacagaaggtatattcccttcctgccaggaactggacgggatattgatacaggatcaattcctggtgtggatcagttaattgaaaaatttgatcaaaaacctgggcttcagagaagaggaaggtctgggaagcgaaacagaattaatacagatgacaggaaaagatccagaagcgtggatagcgcctttccttttggcctccaagggaactcggagtacctgattgaattcagtaggaacttgggcaagtcaagcgaacacctcctccggccttcccaggtgtgcccgcagcggccactgtctcaggagcgccgtgggaaacagagcgtgggccgcacctttgcaaagctgcagggagcagcgcacggggcttcatgtgcccactccaggcctccccagccgaacatagatgggaaagttctggaaaccgaaggtagtcaggaaagtacagtgatccgtgcgccctcccttggtgcacagagtaaaaaggaggaggaggtgaaaacagccaccgctacgctgatgttacagaaccgggcaacagcaacttcgcctgattctggtgccaagaaaatttccgtgaagacatttccttcggcctcaaatactcaggccacaccggatctcttaaagggccagcaagagctcactcagcaaaccaatgaggagacagctaagcagattctctacaattacctcaaagaaggaagcactgataatgacgatgctactaaaaggaaagtcaacttggtctttgagaaaatccagaccttaaagtctcgagcagctgggagcgcccaaggaaataaccaagcttgtaattccacatctgaagtcaaagatctattggaacagaaaagcaagttgaccatagaagtggctgaacttcagagacagcttcaactggaagtcaagaatcaacagaacattaaagaagagagagagaggatgagagcaaacctagaagagctccgaagccaacacaacgaaaaggtggaggagaactccacattgcagcaacgactggaagaaagtgaaggggagctccggaagaatctggaggagctattccaggtgaagatggaacgggagcagcatcagactgagatcagggatctccaggaccagctctcagaaatgcacgatgaactggacagtgcaaagcgatcggaggacagggagaagggagctctgattgaggagctcttacaggcaaaacaggatcttcaagatctgctgattgccaaagaggagcaagaagacctcttgagaaagcgagagcgtgaactcaccgccctgaagggagccctgaaagaagaggtttccagccatgatcaggagatggacaagctgaaggagcaatatgatgctgagttgcaggccctgagggagagtgtggaagaagcaaccaagaatgtcgaggtcttggcgagcaggagcaacacttcagagcaagaccaggcggggactgaaatgcgcgtgaagcttctgcaggaggagaatgagaagctgcagggaagaagcgaagagctggagcggagagttgctcagcttcaaaggcagatcgaggacctgaaaggcgatgaagccaaggcgaaggaaacgctgaagaagtacgagggagaaatacgacagttagaggaggcccttgtgcacgccagaaaggaagaaaaagaagctgtgtcagccagaagggccctggagaatgaactggaggctgctcagggaaatctgagtcagactacccaggagcagaagcagttgtctgagaagctcaaagaggagagtgagcagaaggagcagctaagaaggttgaagaacgagatggagaatgagcggtggcacctgggcaaaaccattgagaaactgcagaaggagatggcagacattgttgaggcctcccgtacctcaaccctggagctccagaaccagctggatgagtataaggagaaaaaccgcagggagctcgcagaaatgcaaagacagttgaaggagaaaacgctggaggcagaaaagtcccgactgacagccatgaaaatgcaggatgagatgcgtctgatggaggaagagttacgggactaccagagagctcaggatgaagcactcacaaaaaggcagcttctggagcagacgctgaaggacctggagtatgagctggaagccaagagtcacctcaaagatgaccgcagcaggctggtcaagcagatggaggacaaggtgtctcaactggagatggaactggaagaagagagaaacaactcagatttgctgtctgagaggatcagtaggagcagggaacagatggagcagttgaggaatgagctacttcaggagagagctgcgagacaagacttggagtgcgacaagatttccctggagaggcagaacaaggacttaaagagccggattatccacctggaaggttcctacaggtccagcaaagaggggctggttgtgcagatggaggccaggatcgcggagctggaggaccgcctggagagtgaggagagggatcgggccaatcttcagctcagcaaccggcggctggagcggaaagtgaaggagctggtgatgcaggtggatgatgagcacctgtcattgactgatcagaaggaccagctgagcttgcgtttgaaagccatgaagcggcaggtggaggaggctgaggaggaaatcgacagactggaaagttctaaaaagaagctgcagagggagctggaggagcagatggacatgaatgagcatctgcaggggcagctcaactccatgaagaaggacttaagactgaagaagctgccgagtaaagtgctggatgacatggatgacgacgatgacctcagcacggatgggggaagcctctatgaggcgcctgtgagctacacattctccaaggacagcaccgtcgccagccagatctgagtgctctcccgggctgtggaagtacctgtcattcctgcaggagctgcagccacccaaagtgggaggcagggaggggagcatctgtctgccactgagaccaatcacagcctctttgcacagcatgccagctcctcagtgttacattcctcgccagggtctctcagtgggtcttcgacagagagcttttgcagtttaaaatgttgggatgcctgaggaccaggagccaccacccactggggtgttgtgagagatacactttggtaggctgaggcccctgttccacagccactatttgcattgctgtccctgccccctcatcactccccctgccaagacaaagggtccagaaggctaggacttacttaatagcactgtgcagggaggaaaccatgtatagcttgtacatattttaaaccagaccttctcacgaactgctgctgttgggtttggaatgtgatggaggcttggtagggtggctggtttgtaaagttcatgcatctatattgagtattctttttttttttttttgagatggagtttcattcttgttgccgaggctggagtgcaatggcgcaaccttggctcactgcaacctctgcctccctggttcaagtgattctcctgcctcatcctcccaagaagctgagattacagatgaccaccaccactcctggctaattttttgtatttagtagagacggggtttcaccatgttggtcaggctggtcttgaactcctgacctcaggtgatccacctgcctcagcctcccaaagtgctgagattacaggcatgagccaccacgcccagccattgagtattcttttttaaaatatgaagctattagattttaagtgttgaggagcagaggtgagaagagagagagagagagaaagtcaaataaagtcaaagaccagtttggaaaccaaagttggaaaagaagaattgtagtggtcatggacagctaagactgagcatagcagttcacatggtctgggtaaacaagtcactggcacaggggaaagccagaaggttgcttgtgtctgtgactgcagctatggccttgtttgcttagtttatctggaattctgttataatttctgaactgttctgagacctgttcccagtcactgattgcaatttcttttacacaggttgggtagggagagttgtaggtaaggccttaaacaaatgaggccgtttctggaaggatagggctgtgtggtcatgtcccacagcaagcttttgggatcgggggaataagagggtatgggggaaaggttcatagacttaggtgtgagaatgaggtgggaggtgtctggtaaggtcatgggggaagggagatgagagaggagataggcagatgtgggtatggggcccagtgtgagaaggaagacagagaagttcttgaaagctgggggatgtgtgggcaagaggtggattgagcaggatctcagggttatgtcgaggaagggaagaaagaaacagaagtcaggcagaggcgtgtctgtgcaaactggaggactccttccaacttcctggaacaaagcgacatcgccagcagcaggctggcagggagtggttgaggtctgggggccaggccacatggctggagaggaatttcagggagcatagcatcgggaggatgctacatatccagggactccctcctggccttcctgtgtcacttcacaatgtgacagtccccaggcatgcccacaggccaggcccagtcacagctgggcttccacaggtcagaatatgggacaggacatggtcagggagaggaccctgtgagttggtgacatatatgtggcagagatggtagtgttcagctgcttcagcagtgtccccaaccatcccaatagggtgggggcctgtgggccagaggactccatgacagtagccatggagtcccacctgtgccaggtcagagcccacccggcaggtttcagagtggtcagcccagtttaagggtgggagtctggagccagacagccaagccccttccacatctacagggtcactgtcatcctcaccacagccaggggtgattctcacctctgcctgcttatgtggggtgtggccgattcctccctttagtcattcattcatttagcacatatttattgggcatcggtgatgtgtcaggcacagtccttggcacacagaatacagcagtgaattaaacaggcaaaaattcctcccctcctggagctcagtgtcaggaaagggggtgataaatgacaatcaaatcgacatggaggttgagcacctctgtactcagccctctgtctgtccttctgaggacgcaacaagcctggttccctagagctcactttgaccctcaatatgttcataatttccctgctgcttctcccatcgttagacatctgccagtaagcctgctgagagaagcctcagcccactcatacctagagacgctgctggggaaggtcagcacacccaagaactttgggagtgtgtgtctgttttggtttgtgagaaagtagctgcccctcattctggccagttctttccagtagccatggggctggctacaagaagcaaaactgcccatgcaaagagaacacaggtcacttttcaaaacacttgcatcattaccctaaaaataggctgttatgcgttttgacaattgcgctatcctacactctgagggagttggcaacgcatgcggtatagtggagtgggaagagttgagactgaaagttaagagaagggttttcaagtcccggctcatctcaccccagtgactttgacagtgtgctcactctcagagccatggattacctggaacaaagtgcagattagtgcccacggtcctttccaggtataacatgctatcgttctttaattttattatatatacatacttttcttctgttttttgctttaagaactaaccccgatcaagagtattttctttagctagcttaaaaagaaaacatatattttatgtaaaaacacatacatggccaaatgcaatactgaagagacaatcatcctgtatcttttatggtttttcctgcttctgagtgtcgttctacaatgcccgttgacttattccattgcgtctctgctttagggtatggtttggtcgctttggttgtcatgagaaagagacattctccttgcagctacctccatgtgagtgaattcctggataaagcaagatttcctttcaataaacgctgtcacccaatgggaattttgactct

SEQ ID NO: 119786 - DNA, 1746 bp, Homo sapiens
  Payload ID: 3496
  Gene Symbol: CIART
  Gene Name: circadian associated repressor of transcription
  Uniprot ID: Q8N365
  ENST ID: ENST00000290363
  CDS Start-End: 450-1607
accaggtgggttcgcgtgcccagattgactgcttgtgggtggcatggcctcaggtggagaggcttgctgcggactcaggctggcgaatagccctggcgaacaacgggcggaggggaaggtgtctttcaagtcggtatttactctgaactgagggaagaaaagaacggaggccgcgtcagaccgagagctgctctgcggcggccagagagggaatcccaagctcttaatgggcgggggtgggggtagaaatgtctttttctattgtgtttgagaccggtaatattggggagggggagaacaagtattatcccacgcagtacaccccaatctcccagttcatttcctaatccttaaactctggtttcaaactccctcgctttgctcttcagttgcaggttccgatctttgggtactccaggagctgttctatagcccctgcttctggacctatggattctccatctagcgtttcttcctattcctcctactctctctcttcgtcttttcccacctccccagtgaacagtgactttggcttcccctctgatagtgagagggaggacaagggggcccatgggcccaggccagacactgttgggcagaggggaggttcacggcccagcccgggtcctatccgctgcaggcatcgatcgaaggtttccggtaaccagcatacaccatctcatccgaaacagcggggttcggcttctcctatggcaggatctggggcgaaaagatcaagagatggtgaactggagaccagtctaaacacccaaggttgtaccacagagggagacctgctgtttgcccagaagtgtaaagaactccaaggatttatacctcctctcacagacctactcaatgggctgaagatgggtcgttttgagagaggattaagcagttttcagcagagtgtggcaatggacaggatccagcgtattgtaggtgttttgcagaagccacagatgggggaacgttacctaggaaccttgctacaggtagaagggatgttaaagacttggtttccacaaatagctgcccagaagtcatcattgggtggtggcaagcatcagctgaccaagcattttccaagccaccacagtgattcagctgcttcctctcctgcatctcctatggaaaagatggaccagacacagctaggacatctagctttaaaaccaaagcagccttggcacctcacacaatggccagctatgaacctcacctggatccacaccactccaatttgcaacccccctctcagctccccaggtactatctcctttagccatggtcctttaggcactggaaccggcattggcgtcattcttttcctccagcatggagtgcaacccttcacccactctgccccaaccaccccagtcccacctactacagcatctcctgtcatccctggtgagcctatgaaactatctggagagggtcctcgttgctacagtttgccagtaactctgccatcagactggagctataccctatcccctcccagtctacccaccttggccagaaagatgaccataggacaccgggagcagcagagaagccatcctccagttgctgctgatgctcatcttctcaacctctagcccagggcatacagctgtccactgtgacttctaatttgtgtaaatatttatgtatatatgtatttttactattaatgtgtgcatttgtgttgagggaagataaatcctttctgattaaagaaatttttttatacctaaa

SEQ ID NO: 119787 - DNA, 1179 bp, Homo sapiens
  Payload ID: 3496
  Gene Symbol: CIART
  Gene Name: circadian associated repressor of transcription
  ENST ID: ENST00000369094
  CDS Start-End: 147-1040
cggaggtgggtagatagacccggagagacggcgaaggagctggaaaccgagccagggctgagccggctgacaacaggcatcgatcgaaggtttccggtaaccagcatacaccatctcatccgaaacagcggggttcggcttctcctatggcaggatctggggcgaaaagatcaagagatggtgaactggagaccagtctaaacacccaaggttgtaccacagagggagacctgctgtttgcccagaagtgtaaagaactccaaggatttatacctcctctcacagacctactcaatgggctgaagatgggtcgttttgagagaggattaagcagttttcagcagagtgtggcaatggacaggatccagcgtattgtaggtgttttgcagaagccacagatgggggaacgttacctaggaaccttgctacaggtagaagggatgttaaagacttggtttccacaaatagctgcccagaagtcatcattgggtggtggcaagcatcagctgaccaagcattttccaagccaccacagtgattcagctgcttcctctcctgcatctcctatggaaaagatggaccagacacagctaggacatctagctttaaaaccaaagcagccttggcacctcacacaatggccagctatgaacctcacctggatccacaccactccaatttgcaacccccctctcagctccccaggtactatctcctttagccatggtcctttaggcactggaaccggcattggcgtcattcttttcctccagcatggagtgcaacccttcacccactctgccccaaccaccccagtcccacctactacagcatctcctgtcatccctggtgagcctatgaaactatctggagagggtcctcgttgctacagtttgccagtaactctgccatcagactggagctataccctatcccctcccagtctacccaccttggccagaaagatgaccataggacaccgggagcagcagagaagccatcctccagttgctgctgatgctcatcttctcaacctctagcccagggcatacagctgtccactgtgacttctaatttgtgtaaatatttatgtatatatgtatttttactattaatgtgtgcatttgtgttgagggaagataaatcctttctgattaaagaaatttttttatacctaaa

SEQ ID NO: 119788 - DNA, 1433 bp, Homo sapiens
  Payload ID: 3496
  Gene Symbol: CIART
  Gene Name: circadian associated repressor of transcription
  Uniprot ID: Q8N365
  ENST ID: ENST00000369095
  CDS Start-End: 137-1294
cggaggtgggtagatagacccggagagacggcgaaggagctggaaaccgagccagggctgagccggctgacaacagttgcaggttccgatctttgggtactccaggagctgttctatagcccctgcttctggacctatggattctccatctagcgtttcttcctattcctcctactctctctcttcgtcttttcccacctccccagtgaacagtgactttggcttcccctctgatagtgagagggaggacaagggggcccatgggcccaggccagacactgttgggcagaggggaggttcacggcccagcccgggtcctatccgctgcaggcatcgatcgaaggtttccggtaaccagcatacaccatctcatccgaaacagcggggttcggcttctcctatggcaggatctggggcgaaaagatcaagagatggtgaactggagaccagtctaaacacccaaggttgtaccacagagggagacctgctgtttgcccagaagtgtaaagaactccaaggatttatacctcctctcacagacctactcaatgggctgaagatgggtcgttttgagagaggattaagcagttttcagcagagtgtggcaatggacaggatccagcgtattgtaggtgttttgcagaagccacagatgggggaacgttacctaggaaccttgctacaggtagaagggatgttaaagacttggtttccacaaatagctgcccagaagtcatcattgggtggtggcaagcatcagctgaccaagcattttccaagccaccacagtgattcagctgcttcctctcctgcatctcctatggaaaagatggaccagacacagctaggacatctagctttaaaaccaaagcagccttggcacctcacacaatggccagctatgaacctcacctggatccacaccactccaatttgcaacccccctctcagctccccaggtactatctcctttagccatggtcctttaggcactggaaccggcattggcgtcattcttttcctccagcatggagtgcaacccttcacccactctgccccaaccaccccagtcccacctactacagcatctcctgtcatccctggtgagcctatgaaactatctggagagggtcctcgttgctacagtttgccagtaactctgccatcagactggagctataccctatcccctcccagtctacccaccttggccagaaagatgaccataggacaccgggagcagcagagaagccatcctccagttgctgctgatgctcatcttctcaacctctagcccagggcatacagctgtccactgtgacttctaatttgtgtaaatatttatgtatatatgtatttttactattaatgtgtgcatttgtgttgagggaagataaatcctttctgattaaagaaatttttttatacctaaa

SEQ ID NO: 119789 - DNA, 838 bp, Homo sapiens
  Payload ID: 3496
  Gene Symbol: CIART
  Gene Name: circadian associated repressor of transcription
  ENST ID: ENST00000417398
  CDS Start-End: 123-838
ggagagggcaggaggccagtctctatgggggcggttcccgtaggatcaccaggcatcgatcgaaggtttccggtaaccagcatacaccatctcatccgaaacagcggggttcggcttctcctatggcaggatctggggcgaaaagatcaagagatggtgaactggagaccagtctaaacacccaaggttgtaccacagagggagacctgctgtttgcccagaagtgtaaagaactccaaggatttatacctcctctcacagacctactcaatgggctgaagatgggtcgttttgagagaggattaagcagttttcagcagagtgtggcaatggacaggatccagcgtattgtaggtgttttgcagaagccacagatgggggaacgttacctaggaaccttgctacaggtagaagggatgttaaagacttggtttccacaaatagctgcccagaagtcatcattgggtggtggcaagcatcagctgaccaagcattttccaagccaccacagtgattcagctgcttcctctcctgcatctcctatggaaaagatggaccagacacagctaggacatctagctttaaaaccaaagcagccttggcacctcacacaatggccagctatgaacctcacctggatccacaccactccaatttgcaacccccctctcagctccccaggtactatctcctttagccatggtcctttaggcactggaaccggcattggcgtcattcttttcctccagcatggagtgcaacccttcacccactctgccccaaccaccccagtcccacctactacagcatctcctgtcatccctggtgagcctatgaa

SEQ ID NO: 119790 - DNA, 771 bp, Homo sapiens
  Payload ID: 3496
  Gene Symbol: CIART
  Gene Name: circadian associated repressor of transcription
  ENST ID: ENST00000447007
  CDS Start-End: 95-771
cggaggtgggtagatagacccggagagacggcgaaggagctggaaaccgagccagggctgagccggctgacaacagcggggttcggcttctcctatggcaggatctggggcgaaaagatcaagagatggtgaactggagaccagtctaaacacccaaggttgtaccacagagggagacctgctgtttgcccagaagtgtaaagaactccaaggatttatacctcctctcacagacctactcaatgggctgaagatgggtcgttttgagagaggattaagcagttttcagcagagtgtggcaatggacaggatccagcgtattgtaggtgttttgcagaagccacagatgggggaacgttacctaggaaccttgctacaggtagaagggatgttaaagacttggtttccacaaatagctgcccagaagtcatcattgggtggtggcaagcatcagctgaccaagcattttccaagccaccacagtgattcagctgcttcctctcctgcatctcctatggaaaagatggaccagacacagctaggacatctagctttaaaaccaaagcagccttggcacctcacacaatggccagctatgaacctcacctggatccacaccactccaatttgcaacccccctctcagctccccaggtactatctcctttagccatggtcctttaggcactggaaccggcattggcgtcattcttttcctccagcatggagtgcaacccttcacccactctgccccaaccaccccagtcccacc

SEQ ID NO: 119791 - DNA, 2322 bp, Homo sapiens
  Payload ID: 3497
  Gene Symbol: CIRH1A
  Gene Name: cirrhosis, autosomal recessive 1A (cirhin)
  Uniprot ID: Q969X6
  ENST ID: ENST00000314423
  CDS Start-End: 178-2238
gcggccaacgggcgacaaccgaacctcccgccgccgtcgccgccgccgcgagcactgcctgcgcacttccgactatgcgccaggagcacttccggggcagagcctgagagcgcgcgcgcacgtggggccggggcggagagaggcgagcaccgggaaggggagcgtggggccgctggaatgggtgaatttaaggtccatcgagtacgtttctttaattatgttccatcaggaatccgctgtgtggcttacaataaccagtcaaacagattggctgtttcacgaacagatggcactgtggaaatttataacttgtcagcaaactactttcaggagaaatttttcccaggtcatgagtctcgggctacagaagctttgtgctgggcagaaggacagcgactctttagtgctgggctcaatggcgagattatggagtatgatttacaggcgttaaacatcaagtatgctatggatgcctttggaggacctatttggagcatggctgccagccccagtggctctcaacttttggttggttgtgaagatggatctgtgaaactatttcaaattaccccagacaaaatccagtttgaaagaaattttgatcggcagaaaagtcgcatcctgagtctcagctggcatccctctggtacccacattgcagctggttccatagactacattagtgtgtttgatgtcaaatcaggcagcgctgttcataagatgattgtggacaggcagtatatgggcgtgtctaagcggaagtgcatcgtgtggggtgtcgccttcttgtccgatggcactatcataagtgtggactctgctgggaaggtgcagttctgggactcagccactgggacgcttgtgaagagccatctcatcgctaatgctgacgtgcagtccattgctgtagctgaccaagaagacagtttcgtggtgggcacagccgagggaacagtcttccattttcagctggtccctgtgacatctaacagcagtgagaagcagtgggtgcggacaaaaccgttccagcatcacactcatgacgtgcgcactgtggcccacagcccaacagcgctgatatctggaggcactgacacccacttagtctttcgtcctctcatggagaaggtggaagtaaagaattacgatgccgctctccgaaaaatcacctttccccaccgatgtctcatctcctgttctaaaaagaggcagcttctcctcttccagtttgctcatcacttagaactttggcgactgggatccacagttgcaacaggcaagaatggggatactcttccactctctaaaaatgcagatcatttactgcacctaaagacaaagggtcctgagaacattatctgtagctgtatctccccatgtggaagttggatagcctattctacagtttctcggttttttctctatcggctgaattatgaacatgacaacataagcctcaaaagggtttccaaaatgccagcattccttcgctctgcccttcagattttgttttctgaagattcaacaaagctctttgtagcatcaaatcaaggagctctgcatattgttcagctgtcaggaggaagcttcaagcacctgcatgctttccagcctcagtcaggaacagtggaggccatgtgtcttttggcagtcagtccagatgggaattggctagctgcatcaggtaccagtgctggagtccatgtctacaacgtaaaacagctaaagcttcactgcacggtgcctgcttacaatttcccagtgactgctatggctattgcccccaataccaacaaccttgtcatcgctcattcggaccagcaggtatttgagtacagcatcccagacaaacagtatacagattggagccggactgtccagaagcagggctttcaccacctttggctccaaagggatactcctatcacacacatcagttttcatcccaagagaccgatgcacatccttctccatgatgcctacatgttctgcatcattgacaagtcattgccccttccaaatgacaaaaccttactctacaatccatttcctcccacgaatgaatcagatgtcatccggaggcgcacagctcatgcttttaaaatttctaagatatataagcctctactcttcatggatcttttggatgaaagaacactcgtggcagtagaacggcctctggatgacatcattgctcagctcccaccacccattaaaaagaagaaatttggaacctaaaacagggcactgtctgtgtccttccttgaactgtctaccctgttgcttttcacaaatcatggtaataaaacaagttattcttga

SEQ ID NO: 119792 - DNA, 1841 bp, Homo sapiens
  Payload ID: 3497
  Gene Symbol: CIRH1A
  Gene Name: cirrhosis, autosomal recessive 1A (cirhin)
  Uniprot ID: Q969X6
  ENST ID: ENST00000352319
  CDS Start-End: 43-1758
gagagaggcgagcaccgggaaggggagcgtggggccgctggaatgggtgaatttaaggtccatcgagtacgtttctttaattatgttccatcaggaatccgctgtgtggcttacaataaccagtcaaacagattggctgtttcacgaacagatggcactgtggaaatttataacttgtcagcaaactactttcaggagaaatttttcccaggtcatgagtctcgggctacagaagctttgtgctgggcagaaggacagcgactctttagtgctgggctcaatggcgagattatggagtatgatttacaggcgttaaacatcaagtatgctatggatgcctttggaggacctatttggagcatggctgccagccccagtggctctcaacttttggttggttgtgaagatggatctgtgaaactatttcaaattaccccagacaaaatccagtttgaaagaaattttgatcggcagaaaagtcgcatcctgagtctcagctggcatccctctggtacccacattgcagctggttccatagactacattagtgtgtttgatgtcaaatcaggcagcgctgttcataagatgattgtggacaggcagtatatgggcgtgtctaagcggaagtgcatcgtgtggggtgtcgccttcttgtccgatggcactatcataagtgtggactctgctgggaaggtgcagttctgggactcagccactgggacgcttgtgaagagccatctcatcgctaatgctgacgtgcagtccattgctgtagctgaccaagaagacagtttcgtggtgggcacagccgagggaacagtcttccattttcagctggtccctgtgacatctaacagcagtgagaagcagtgggtgcggacaaaaccgttccagcatcacactcatgacgtgcgcactgtggcccacagcccaacagcgctgatatctggaggcactgacacccacttagtctttcgtcctctcatggagaaggtggaagtaaagaattacgatgccgctctccgaaaaatcacctttccccaccgatgtctcatctcctgttctaaaaagaggcagcttctcctcttccagtttgctcatcacttagaactttggcgactgggatccacagttgcaacaggaacagtggaggccatgtgtcttttggcagtcagtccagatgggaattggctagctgcatcaggtaccagtgctggagtccatgtctacaacgtaaaacagctaaagcttcactgcacggtgcctgcttacaatttcccagtgactgctatggctattgcccccaataccaacaaccttgtcatcgctcattcggaccagcaggtatttgagtacagcatcccagacaaacagtatacagattggagccggactgtccagaagcagggctttcaccacctttggctccaaagggatactcctatcacacacatcagttttcatcccaagagaccgatgcacatccttctccatgatgcctacatgttctgcatcattgacaagtcattgccccttccaaatgacaaaaccttactctacaatccatttcctcccacgaatgaatcagatgtcatccggaggcgcacagctcatgcttttaaaatttctaagatatataagcctctactcttcatggatcttttggatgaaagaacactcgtggcagtagaacggcctctggatgacatcattgctcagctcccaccacccattaaaaagaagaaatttggaacctaaaacagggcactgtctgtgtccttccttgaactgtctaccctgttgcttttcacaaatcatggtaataaaacaagttattcttg

SEQ ID NO: 119793 - DNA, 586 bp, Homo sapiens
  Payload ID: 3497
  Gene Symbol: CIRH1A
  Gene Name: cirrhosis, autosomal recessive 1A (cirhin)
  ENST ID: ENST00000567235
  CDS Start-End: 143-586
agacgccccggcccgaccgaacgcgcttgctctgtctgcgggttcctaaccttgaagctaggccagtgaggggcgaacaagacctggtctctactctcggccagtatatatgttggcgggcgtcggggggacggggtagggaatgggtgaatttaaggtccatcgagtacgtttctttaattatgttccatcaggaatccgctgtgtggcttacaataaccagtcaaacagattggctgtttcacgaacagatggcactgtggaaatttataacttgtcagcaaactactttcaggagaaatttttcccaggtcatgagtctcgggctacagaagctttgtgctgggcagaaggacagcgactctttagtgctgggctcaatggcgagattatggagtatgatttacaggcgttaaacatcaagtatgctatggatgcctttggaggacctatttggagcatggctgccagccccagtggctctcaacttttggttggttgtgaagatggatctgtgaaactatttcaaattaccccagacaaaatccagtttgaaagaaattttgatcggcagaaaagtcgcatc

SEQ ID NO: 119794 - DNA, 737 bp, Homo sapiens
  Payload ID: 3497
  Gene Symbol: CIRH1A
  Gene Name: cirrhosis, autosomal recessive 1A (cirhin)
  ENST ID: ENST00000567500
  CDS Start-End: 1-636
aaaaatgcagatcatttactgcacctaaagacaaagggtcctgagaacattatctgtagctgtatctccccatgtggaagttggatagcctattctacagtttctcggttttttctctatcggctgaattatgaacatgacaacataagcctcaaaagggtttccaaaatgccagcattccttcgctctgcccttcagattttgttttctgaagattcaacaaagctctttgtagcatcaaatcaaggagctctgcatattgttcagctgtcaggaggaagcttcaagcacctgcatgctttccagcctcagtcaggaacagtggaggccatgtgtcttttggcagtcagtccagatgggaattggctagctgcatcaggtaccagtgctggagtccatgtctacaacgtaaaacagctaaagcttcactgcacggtgcctgcttacaatttcccagtgactgctatggctattgcccccaataccaacaaccttgtcatcgctcattcggaccagcagcctctactcttcatggatcttttggatgaaagaacactcgtggcagtagaacggcctctggatgacatcattgctcagctcccaccacccattaaaaagaagaaatttggaacctaaaacagggcactgtctgtgtccttccttgaactgtctaccctgttgcttttcacaaatcatggtaataaaacaagttattcttgaggactagtcattataaa

SEQ ID NO: 119795 - DNA, 4183 bp, Homo sapiens
  Payload ID: 3497
  Gene Symbol: CIRH1A
  Gene Name: cirrhosis, autosomal recessive 1A (cirhin)
  Uniprot ID: Q969X6
  ENST ID: ENST00000563094
  CDS Start-End: 35-1912
cgagcaccgggaaggggagcgtggggccgctggaatgggtgaatttaaggtccatcgagtacgtttctttaattatgttccatcaggaatccgctgtgtggcttacaataaccagtcaaacagattggctgtttcacgaacagatggcactgtggaaatttataacttgtcagcaaactactttcaggagaaatttttcccaggtcatgagtctcgggctacagaagctttgtgctgggcagaaggacagcgactctttagtgctgggctcaatggcgagattatggagtatgatttacaggcgttaaacatcaagtatgctatggatgcctttggaggacctatttggagcatggctgccagccccagtggctctcaacttttggttggttgtgaagatggatctgtgaaactatttcaaattaccccagacaaaatccagtttgaaagaaattttgatcggcagaaaagtcgcatcctgagtctcagctggcatccctctggtacccacattgcagctggttccatagactacattagtgtgtttgatgtcaaatcaggcagcgctgttcataagatgattgtggacaggcagtatatgggcgtgtctaagcggaagtgcatcgtgtggggtgtcgccttcttgtccgatggcactatcataagtgtggactctgctgggaaggtgcagttctgggactcagccactgggacgcttgtgaagagccatctcatcgctaatgctgacgtgcagtccattgctgtagctgaccaagaagacagtttcgtggtgggcacagccgagggaacagtcttccattttcagctggtccctgtgacatctaacagcagtgagaagcagtgggtgcggacaaaaccgttccagcatcacactcatgacgtgcgcactgtggcccacagcccaacagcgctgatatctggaggcactgacacccacttagtctttcgtcctctcatggagaaggtggaagtaaagaattacgatgccgctctccgaaaaatcacctttccccaccgatgtctcatctcctgttctaaaaagaggcagcttctcctcttccagtttgctcatcacttagaactttggcgactgggatccacagttgcaacaggcaagaatggggatactcttccactctctaaaaatgcagatcatttactgcacctaaagacaaagggtcctgagaacattatctgtagctgtatctccccatgtggaagttggatagcctattctacagtttctcggttttttctctatcggctgaattatgaacatgacaacataagcctcaaaagggtttccaaaatgccagcattccttcgctctgcccttcagattttgttttctgaagattcaacaaagctctttgtagcatcaaatcaaggagctctgcatattgttcagctgtcaggaggaagcttcaagcacctgcatgctttccagcctcagtcaggaacagtggaggccatgtgtcttttggcagtcagtccagatgggaattggctagctgcatcaggtaccagtgctggagtccatgtctacaacgtaaaacagctaaagcttcactgcacggtgcctgcttacaatttcccagtgactgctatggctattgcccccaataccaacaaccttgtcatcgctcattcggaccagcaggtatttgagtacagcatcccagacaaacagtatacagattggagccggactgtccagaagcagggctttcaccacctttggctccaaagggatactcctatcacacacatcagttttcatcccaagagaccgatgcacatccttctccatgatgcctacatgttctgcatcattgacaagtcattggtgagttcttcactgctacctcccaaatcttcttctgaatcttaaagttctaaaagcaacaagtacaataaggtaagaggacagagactcagaataaaggtagctagtaaatcagaatacaggtagctagtacatttcttggaggagaggggcttttgttttacagattccctggtttgtgttcccacagttcttcgggaggctctcggggaaggggctggcctttgtatactggcttttgctgatttgactatttgtctactttgcgagtaagcacataaatcttacacagaaaagtgattaggccagtattcggaaggtgaccctcatccggaagtatcattgatttggctaacttgctttcaactttgaactctggggtatctgaataacctggtttcattaaaggaggtacaggctgaggttttgacctctgtgccccttcgctaaagctactaaaacgctgtctgcaggcttgaggaactggtcttaacatcttcgaaaaacccagctaggaaaattcttcatggctgtgatttacatgggatacgagcattttcttcagttttagattctgtcctctttgccagctgctgttttgattcaccctgaatttgtatggcttttctgggcaggtgctttgtttcctaggagcattgtggccatgcctgtcctgcactttgggcttagattacaaccatcacacggtgttttggtgtgtttgtgaaggtgggggtggaaggaacatgggggaaagcagcagatggctctaaaggaggtgtgcacggggatgtgtcactggaatcatctcgtgggccctgcgacctctgggtgtgggaagcagagctggctgacaagtgccttctgcaagatgagtgatacaggaagggcccctcccactctcttgcctctttgtaattgagcccagatcattttttccaaagcattggctttaagttcatcgcttccttacagtaggcatagctatttcccaggaagtcagagacaaaatatcatttctttggccagaggccacctcgaggtgtcagtgacatcagcacaggtggtttgtgttgaggtttcgcctggggagaactccagtcacttgtccagtctgtgatctggttgggggagagtctagaaagcacagaccctgtgtgggctgagctcctgcacttgccagtttgttccattctgacaaagtgatactgatgagacaggccagaagccgcagaagggccctttgatcttgctgcatggagttaacaagctctctttgcctcatacacccaccctctacagtgtggctgcaagagtagcttcagctctttctccctctctctccttttcttctttttttcccccctagtttttctgaatagaggtattatggctacagctgttttcccgaattaacgaatgtcagggaggtactgaatatatatgatggttagaagatgatgttgggctcaaaatgcactacagatctttggtctgcagaagcccaataaaagtaaccatttaaacaatgtgtctttgtttttttagccccttccaaatgacaaaaccttactctacaatccatttcctcccacgaatgaatcagatgtcatccggaggcgcacagctcatgcttttaaaatttctaagatatataaggtaaaacatcttgtgttgttattctggatagttggttcctttgtgataccaaaatgtaataaactccacaatcggaagataagagcaccttcagtttccatgcagagaacctggcttgtgggagacaagtcacctttttgaggctggctgtcccttgtatatgttttattgttcttgccttagtaggttagaggcaggcacatcatacttaaccaaaatgaaatgcgtaagtagtgagaaatgttggcgctgagggtagagtctttgttgtcatgagagctggctttaaattttacttgttggagtgttccataggataaatgtcaagcaggctgggcttggtagctcatacctgtaatcccagcactttgggaggccaaggcaggtggatctcctcagcccaggaattcaaaaccagcctgggcaccatggtgaaaccccatcactattaacaaaaaaaaaaaaaggagagttctgtaaattactgattactcaaatgactcaaatgtgattagcttcttgatgcatttgtagcttgccagttgtcagttgccttaggctgggtatggtgattcacgcctgtaatctcagtactttaggaggttgaggctggagttcaagaccagtctgggcaacatagtgagaccctgtctctac

SEQ ID NO: 119796 - DNA, 2186 bp, Homo sapiens
  Payload ID: 3497
  Gene Symbol: CIRH1A
  Gene Name: cirrhosis, autosomal recessive 1A (cirhin)
  ENST ID: ENST00000562237
  CDS Start-End: 1-2103
aggagcacttccggggcagagcctgagagcgcgcgcgcacgtggggccggggcggagagaggcgagcaccgggaaggggagcgtggggccgctggaatccgctgtgtggcttacaataaccagtcaaacagattggctgtttcacgaacagatggcactgtggaaatttataacttgtcagcaaactactttcaggagaaatttttcccaggtcatgagtctcgggctacagaagctttgtgctgggcagaaggacagcgactctttagtgctgggctcaatggcgagattatggagtatgatttacaggcgttaaacatcaagtatgctatggatgcctttggaggacctatttggagcatggctgccagccccagtggctctcaacttttggttggttgtgaagatggatctgtgaaactatttcaaattaccccagacaaaatccagtttgaaagaaattttgatcggcagaaaagtcgcatcctgagtctcagctggcatccctctggtacccacattgcagctggttccatagactacattagtgtgtttgatgtcaaatcaggcagcgctgttcataagatgattgtggacaggcagtatatgggcgtgtctaagcggaagtgcatcgtgtggggtgtcgccttcttgtccgatggcactatcataagtgtggactctgctgggaaggtgcagttctgggactcagccactgggacgcttgtgaagagccatctcatcgctaatgctgacgtgcagtccattgctgtagctgaccaagaagacagtttcgtggtgggcacagccgagggaacagtcttccattttcagctggtccctgtgacatctaacagcagtgagaagcagtgggtgcggacaaaaccgttccagcatcacactcatgacgtgcgcactgtggcccacagcccaacagcgctgatatctggaggcactgacacccacttagtctttcgtcctctcatggagaaggtggaagtaaagaattacgatgccgctctccgaaaaatcacctttccccaccgatgtctcatctcctgttctaaaaagaggcagcttctcctcttccagtttgctcatcacttagaactttggcgactgggatccacagttgcaacaggcaagaatggggatactcttccactctctaaaaatgcagatcatttactgcacctaaagacaaagggtcctgagaacattatctgtagctgtatctccccatgtggaagttggatagcctattctacagtttctcggttttttctctatcggctgaattatgaacatgacaacataagcctcaaaagggtttccaaaatgccagcattccttcgctctgcccttcagattttgttttctgaagattcaacaaagctctttgtagcatcaaatcaaggagctctgcatattgttcagctgtcaggaggaagcttcaagcacctgcatgctttccagcctcagtcaggaacagtggaggccatgtgtcttttggcagtcagtccagatgggaattggctagctgcatcaggtaccagtgctggagtccatgtctacaacgtaaaacagctaaagcttcactgcacggtgcctgcttacaatttcccagtgactgctatggctattgcccccaataccaacaaccttgtcatcgctcattcggaccagcaggtatttgagtacagcatcccagacaaacagtatacagattggagccggactgtccagaagcagggctttcaccacctttggctccaaagggatactcctatcacacacatcagttttcatcccaagagaccgatgcacatccttctccatgatgcctacatgttctgcatcattgacaagtcattgccccttccaaatgacaaaaccttactctacaatccatttcctcccacgaatgaatcagatgtcatccggaggcgcacagctcatgcttttaaaatttctaagatatataagcctctactcttcatggatcttttggatgaaagaacactcgtggcagtagaacggcctctggatgacatcattgctcagctcccaccacccattaaaaagaagaaatttggaacctaaaacagggcactgtctgtgtccttccttgaactgtctaccctgttgcttttcacaaatcatggtaataaaacaagttattcttg

SEQ ID NO: 119797 - DNA, 1619 bp, Homo sapiens
  Payload ID: 3497
  Gene Symbol: CIRH1A
  Gene Name: cirrhosis, autosomal recessive 1A (cirhin)
  Uniprot ID: Q969X6
  ENST ID: ENST00000575702
  CDS Start-End: 1-1535
gcagcgctgttcataagatgattgtggacaggcagtatatgggcgtgtctaagcggaagtgcatcgtgtggggtgtcgccttcttgtccgatggcactatcataagtgtggactctgctgggaaggtgcagttctgggactcagccactgggacgcttgtgaagagccatctcatcgctaatgctgacgtgcagtccattgctgtagctgaccaagaagacagtttcgtggtgggcacagccgagggaacagtcttccattttcagctggtccctgtgacatctaacagcagtgagaagcagtgggtgcggacaaaaccgttccagcatcacactcatgacgtgcgcactgtggcccacagcccaacagcgctgatatctggaggcactgacacccacttagtctttcgtcctctcatggagaaggtggaagtaaagaattacgatgccgctctccgaaaaatcacctttccccaccgatgtctcatctcctgttctaaaaagaggcagcttctcctcttccagtttgctcatcacttagaactttggcgactgggatccacagttgcaacaggcaagaatggggatactcttccactctctaaaaatgcagatcatttactgcacctaaagacaaagggtcctgagaacattatctgtagctgtatctccccatgtggaagttggatagcctattctacagtttctcggttttttctctatcggctgaattatgaacatgacaacataagcctcaaaagggtttccaaaatgccagcattccttcgctctgcccttcagattttgttttctgaagattcaacaaagctctttgtagcatcaaatcaaggagctctgcatattgttcagctgtcaggaggaagcttcaagcacctgcatgctttccagcctcagtcaggaacagtggaggccatgtgtcttttggcagtcagtccagatgggaattggctagctgcatcaggtaccagtgctggagtccatgtctacaacgtaaaacagctaaagcttcactgcacggtgcctgcttacaatttcccagtgactgctatggctattgcccccaataccaacaaccttgtcatcgctcattcggaccagcaggtatttgagtacagcatcccagacaaacagtatacagattggagccggactgtccagaagcagggctttcaccacctttggctccaaagggatactcctatcacacacatcagttttcatcccaagagaccgatgcacatccttctccatgatgcctacatgttctgcatcattgacaagtcattgccccttccaaatgacaaaaccttactctacaatccatttcctcccacgaatgaatcagatgtcatccggaggcgcacagctcatgcttttaaaatttctaagatatataagcctctactcttcatggatcttttggatgaaagaacactcgtggcagtagaacggcctctggatgacatcattgctcagctcccaccacccattaaaaagaagaaatttggaacctaaaacagggcactgtctgtgtccttccttgaactgtctaccctgttgcttttcacaaatcatggtaataaaacaagttattcttga

SEQ ID NO: 119798 - DNA, 581 bp, Homo sapiens
  Payload ID: 3497
  Gene Symbol: CIRH1A
  Gene Name: cirrhosis, autosomal recessive 1A (cirhin)
  ENST ID: ENST00000563299
  CDS Start-End: 34-581
aattactggtatttgtagcaatgggtggaaaagatggcttcagtcgatctgagttactgcagttttctccatcttctgctactctgcagccccatcttagcctgtcctcctcttaatggaatccgctgtgtggcttacaataaccagtcaaacagattggctgtttcacgaacagatggcactgtggaaatttataacttgtcagcaaactactttcaggagaaatttttcccaggtcatgagtctcgggctacagaagctttgtgctgggcagaaggacagcgactctttagtgctgggctcaatggcgagattatggagtatgatttacaggcgttaaacatcaagtatgctatggatgcctttggaggacctatttggagcatggctgccagccccagtggctctcaacttttggttggttgtgaagatggatctgtgaaactatttcaaattaccccagacaaaatccagtttgaaagaaattttgatcggcagaaaagtcgcatcctgagtctcagctggcatccctctggtacccacattgcagctggttccatagactacattagtgtgtttga

SEQ ID NO: 119799 - DNA, 562 bp, Homo sapiens
  Payload ID: 3497
  Gene Symbol: CIRH1A
  Gene Name: cirrhosis, autosomal recessive 1A (cirhin)
  ENST ID: ENST00000568448
  CDS Start-End: 327-562
cccgaccgaacgcgcttgctctgtctgcgggttcctaaccttgaagctaggccagtgaggggcgaacaagacctggtctctactctcggccagtatatatgttggcgggcgtcggggggacggggtagggaatccgctgtgtggcttacaataaccagtcaaacagattggctgtttcacgaacagatggcactgtggaaatttataacttgtcagcaaactactttcaggagaaatttttcccaggtcatgagtctcgggctacagaagctttgtgctgggcagaaggacagcgactctttagtgctgggctcaatggcgagattatggagtatgatttacaggcgttaaacatcaagtatgctatggatgcctttggaggacctatttggagcatggctgccagccccagtggctctcaacttttggttggttgtgaagatggatctgtgaaactatttcaaattaccccagacaaaatccagtttgaaagaaattttgatcggcagaaaagtcgcatcctgagtctcagctggcatccctctggtacccacattgcagc

SEQ ID NO: 119800 - DNA, 747 bp, Homo sapiens
  Payload ID: 3497
  Gene Symbol: CIRH1A
  Gene Name: cirrhosis, autosomal recessive 1A (cirhin)
  ENST ID: ENST00000566227
  CDS Start-End: 154-747
ggcggagagaggcgagcaccgggaaggggagcgtggggccgctggaatccgctgtgtggcttacaataaccagtcaaacagattggctgtttcacgaacagatggcactgtggaaatttataacttgtcagcaaactactttcaggagaaattatggtgtttctgcagtttttcccaggtcatgagtctcgggctacagaagctttgtgctgggcagaaggacagcgactctttagtgctgggctcaatggcgagattatggagtatgatttacaggcgttaaacatcaagtatgctatggatgcctttggaggacctatttggagcatggctgccagccccagtggctctcaacttttggttggttgtgaagatggatctgtgaaactatttcaaattaccccagacaaaatccagtttgaaagaaattttgatcggcagaaaagtcgcatcctgagtctcagctggcatccctctggtacccacattgcagctggttccatagactacattagtgtgtttgatgtcaaatcaggcagcgctgttcataagatgattgtggacaggcagtatatgggcgtgtctaagcggaagtgcatcgtgtggggtgtcgccttcttgtccgatggcactatcataagtgtggactctgctgggaaggtgcagttctgggactcagccactgggacgcttgtgaagagccatctcatcgctaatgctgacgtgcagtccattgctgtagctgac

SEQ ID NO: 119801 - DNA, 595 bp, Homo sapiens
  Payload ID: 3497
  Gene Symbol: CIRH1A
  Gene Name: cirrhosis, autosomal recessive 1A (cirhin)
  ENST ID: ENST00000567460
  CDS Start-End: 168-595
agagcctgagagcgcgcgcgcacgtggggccggggcggagagaggcgagcaccgggaaggggagcgtggggccgctgtttttcccaggtcatgagtctcgggctacagaagctttgtgctgggcagaaggacagcgactctttagtgctgggctcaatggcgagattatggagtatgatttacaggcgttaaacatcaagtatgctatggatgcctttggaggacctatttggagcatggctgccagccccagtggctctcaacttttggttggttgtgaagatggatctgtgaaactatttcaaattaccccagacaaaatccagtttgaaagaaattttgatcggcagaaaagtcgcatcctgagtctcagctggcatccctctggtacccacattgcagctggttccatagactacattagtgtgtttgatgtcaaatcaggcagcgctgttcataagatgattgtggacaggcagtatatgggcgtgtctaagcggaagtgcatcgtgtggggtgtcgccttcttgtccgatggcactatcataagtgtggactctgctgggaaggtgcagttctgggactcagccactgg

SEQ ID NO: 119802 - DNA, 3614 bp, Homo sapiens
  Payload ID: 3497
  Gene Symbol: CIRH1A
  Gene Name: cirrhosis, autosomal recessive 1A (cirhin)
  ENST ID: ENST00000634106
  CDS Start-End: 1-1352
gcagcgctgttcataagatgattgtggacaggcagtatatgggcgtgtctaagcggaagtgcatcgtgtggggtgtcgccttcttgtccgatggcactatcataagtgtggactctgctgggaaggtgcagttctgggactcagccactgggacgcttgtgaagagccatctcatcgctaatgctgacgtgcagtccattgctgtagctgaccaagaagacagtttcgtggtgggcacagccgagggaacagtcttccattttcagctggtccctgtgacatctaacagcagtgagaagcagtgggtgcggacaaaaccgttccagcatcacactcatgacgtgcgcactgtggcccacagcccaacagcgctgatatctggaggcactgacacccacttagtctttcgtcctctcatggagaaggtggaagtaaagaattacgatgccgctctccgaaaaatcacctttccccaccgatgtctcatctcctgttctaaaaagaggcagcttctcctcttccagtttgctcatcacttagaactttggcgactgggatccacagttgcaacaggcaagaatggggatactcttccactctctaaaaatgcagatcatttactgcacctaaagacaaagggtcctgagaacattatctgtagctgtatctccccatgtggaagttggatagcctattctacagtttctcggttttttctctatcggctgaattatgaacatgacaacataagcctcaaaagggtttccaaaatgccagcattccttcgctctgcccttcagattttgttttctgaagattcaacaaagctctttgtagcatcaaatcaaggagctctgcatattgttcagctgtcaggaggaagcttcaagcacctgcatgctttccagcctcagtcaggaacagtggaggccatgtgtcttttggcagtcagtccagatgggaattggctagctgcatcaggtaccagtgctggagtccatgtctacaacgtaaaacagctaaagcttcactgcacggtgcctgcttacaatttcccagtgactgctatggctattgcccccaataccaacaaccttgtcatcgctcattcggaccagcaggtatttgagtacagcatcccagacaaacagtatacagattggagccggactgtccagaagcagggctttcaccacctttggctccaaagggatactcctatcacacacatcagttttcatcccaagagaccgatgcacatccttctccatgatgcctacatgttctgcatcattgacaagtcattggtgagttcttcactgctacctcccaaatcttcttctgaatcttaaagttctaaaagcaacaagtacaataaggtaagaggacagagactcagaataaaggtagctagtaaatcagaatacaggtagctagtacatttcttggaggagaggggcttttgttttacagattccctggtttgtgttcccacagttcttcgggaggctctcggggaaggggctggcctttgtatactggcttttgctgatttgactatttgtctactttgcgagtaagcacataaatcttacacagaaaagtgattaggccagtattcggaaggtgaccctcatccggaagtatcattgatttggctaacttgctttcaactttgaactctggggtatctgaataacctggtttcattaaaggaggtacaggctgaggttttgacctctgtgccccttcgctaaagctactaaaacgctgtctgcaggcttgaggaactggtcttaacatcttcgaaaaacccagctaggaaaattcttcatggctgtgatttacatgggatacgagcattttcttcagttttagattctgtcctctttgccagctgctgttttgattcaccctgaatttgtatggcttttctgggcaggtgctttgtttcctaggagcattgtggccatgcctgtcctgcactttgggcttagattacaaccatcacacggtgttttggtgtgtttgtgaaggtgggggtggaaggaacatgggggaaagcagcagatggctctaaaggaggtgtgcacggggatgtgtcactggaatcatctcgtgggccctgcgacctctgggtgtgggaagcagagctggctgacaagtgccttctgcaagatgagtgatacaggaagggcccctcccactctcttgcctctttgtaattgagcccagatcattttttccaaagcattggctttaagttcatcgcttccttacagtaggcatagctatttcccaggaagtcagagacaaaatatcatttctttggccagaggccacctcgaggtgtcagtgacatcagcacaggtggtttgtgttgaggtttcgcctggggagaactccagtcacttgtccagtctgtgatctggttgggggagagtctagaaagcacagaccctgtgtgggctgagctcctgcacttgccagtttgttccattctgacaaagtgatactgatgagacaggccagaagccgcagaagggccctttgatcttgctgcatggagttaacaagctctctttgcctcatacacccaccctctacagtgtggctgcaagagtagcttcagctctttctccctctctctccttttcttctttttttcccccctagtttttctgaatagaggtattatggctacagctgttttcccgaattaacgaatgtcagggaggtactgaatatatatgatggttagaagatgatgttgggctcaaaatgcactacagatctttggtctgcagaagcccaataaaagtaaccatttaaacaatgtgtctttgtttttttagccccttccaaatgacaaaaccttactctacaatccatttcctcccacgaatgaatcagatgtcatccggaggcgcacagctcatgcttttaaaatttctaagatatataaggtaaaacatcttgtgttgttattctggatagttggttcctttgtgataccaaaatgtaataaactccacaatcggaagataagagcaccttcagtttccatgcagagaacctggcttgtgggagacaagtcacctttttgaggctggctgtcccttgtatatgttttattgttcttgccttagtaggttagaggcaggcacatcatacttaaccaaaatgaaatgcgtaagtagtgagaaatgttggcgctgagggtagagtctttgttgtcatgagagctggctttaaattttacttgttggagtgttccataggataaatgtcaagcaggctgggcttggtagctcatacctgtaatcccagcactttgggaggccaaggcaggtggatctcctcagcccaggaattcaaaaccagcctgggcaccatggtgaaaccccatcactattaacaaaaaaaaaaaaaggagagttctgtaaattactgattactcaaatgtgattagcttcttgatgcatttgtagcttgccagttgtcagttgccttaggctgggtatggtgattcacgcctgtaatctcagtactttaggaggttgaggctggagttcaagaccagtctgggcaacatagtgagaccctgtctctac

SEQ ID NO: 119803 - DNA, 1618 bp, Homo sapiens
  Payload ID: 3497
  Gene Symbol: CIRH1A
  Gene Name: cirrhosis, autosomal recessive 1A (cirhin)
  ENST ID: ENST00000633692
  CDS Start-End: 1-1535
gcagcgctgttcataagatgattgtggacaggcagtatatgggcgtgtctaagcggaagtgcatcgtgtggggtgtcgccttcttgtccgatggcactatcataagtgtggactctgctgggaaggtgcagttctgggactcagccactgggacgcttgtgaagagccatctcatcgctaatgctgacgtgcagtccattgctgtagctgaccaagaagacagtttcgtggtgggcacagccgagggaacagtcttccattttcagctggtccctgtgacatctaacagcagtgagaagcagtgggtgcggacaaaaccgttccagcatcacactcatgacgtgcgcactgtggcccacagcccaacagcgctgatatctggaggcactgacacccacttagtctttcgtcctctcatggagaaggtggaagtaaagaattacgatgccgctctccgaaaaatcacctttccccaccgatgtctcatctcctgttctaaaaagaggcagcttctcctcttccagtttgctcatcacttagaactttggcgactgggatccacagttgcaacaggcaagaatggggatactcttccactctctaaaaatgcagatcatttactgcacctaaagacaaagggtcctgagaacattatctgtagctgtatctccccatgtggaagttggatagcctattctacagtttctcggttttttctctatcggctgaattatgaacatgacaacataagcctcaaaagggtttccaaaatgccagcattccttcgctctgcccttcagattttgttttctgaagattcaacaaagctctttgtagcatcaaatcaaggagctctgcatattgttcagctgtcaggaggaagcttcaagcacctgcatgctttccagcctcagtcaggaacagtggaggccatgtgtcttttggcagtcagtccagatgggaattggctagctgcatcaggtaccagtgctggagtccatgtctacaacgtaaaacagctaaagcttcactgcacggtgcctgcttacaatttcccagtgactgctatggctattgcccccaataccaacaaccttgtcatcgctcattcggaccagcaggtatttgagtacagcatcccagacaaacagtatacagattggagccggactgtccagaagcagggctttcaccacctttggctccaaagggatactcctatcacacacatcagttttcatcccaagagaccgatgcacatccttctccatgatgcctacatgttctgcatcattgacaagtcattgccccttccaaatgacaaaaccttactctacaatccatttcctcccacgaatgaatcagatgtcatccggaggcgcacagctcatgcttttaaaatttctaagatatataagcctctactcttcatggatcttttggatgaaagaacactcgtggcagtagaacggcctctggatgacatcattgctcagctcccaccacccattaaaaagaagaaatttggaacctaaaacagggcactgtctgtgtccttccttgaactgtctaccctgttgcttttcacaaatcatggtaataaaacaagttattcttg

SEQ ID NO: 119804 - DNA, 212 bp, Homo sapiens
  Payload ID: 3497
  Gene Symbol: CIRH1A
  Gene Name: cirrhosis, autosomal recessive 1A (cirhin)
  ENST ID: ENST00000631675
  CDS Start-End: 1-212
gcagcgctgttcataagatgattgtggacaggcagtatatgggcgtgtctaagcggaagtgcatcgtgtggggtgtcgccttcttgtccgatggcactatcataagtgtggactctgctgggaaggtgcagttctgggactcagccactgggacgcttgtgaagagccatctcatcgctaatgctgacgtgcagtccattgctgtagctgac

SEQ ID NO: 119805 - DNA, 1273 bp, Homo sapiens
  Payload ID: 3497
  Gene Symbol: CIRH1A
  Gene Name: cirrhosis, autosomal recessive 1A (cirhin)
  ENST ID: ENST00000632079
  CDS Start-End: 1-1190
gcagcgctgttcataagatgattgtggacaggcagtatatgggcgtgtctaagcggaagtgcatcgtgtggggtgtcgccttcttgtccgatggcactatcataagtgtggactctgctgggaaggtgcagttctgggactcagccactgggacgcttgtgaagagccatctcatcgctaatgctgacgtgcagtccattgctgtagctgaccaagaagacagtttcgtggtgggcacagccgagggaacagtcttccattttcagctggtccctgtgacatctaacagcagtgagaagcagtgggtgcggacaaaaccgttccagcatcacactcatgacgtgcgcactgtggcccacagcccaacagcgctgatatctggaggcactgacacccacttagtctttcgtcctctcatggagaaggtggaagtaaagaattacgatgccgctctccgaaaaatcacctttccccaccgatgtctcatctcctgttctaaaaagaggcagcttctcctcttccagtttgctcatcacttagaactttggcgactgggatccacagttgcaacaggaacagtggaggccatgtgtcttttggcagtcagtccagatgggaattggctagctgcatcaggtaccagtgctggagtccatgtctacaacgtaaaacagctaaagcttcactgcacggtgcctgcttacaatttcccagtgactgctatggctattgcccccaataccaacaaccttgtcatcgctcattcggaccagcaggtatttgagtacagcatcccagacaaacagtatacagattggagccggactgtccagaagcagggctttcaccacctttggctccaaagggatactcctatcacacacatcagttttcatcccaagagaccgatgcacatccttctccatgatgcctacatgttctgcatcattgacaagtcattgccccttccaaatgacaaaaccttactctacaatccatttcctcccacgaatgaatcagatgtcatccggaggcgcacagctcatgcttttaaaatttctaagatatataagcctctactcttcatggatcttttggatgaaagaacactcgtggcagtagaacggcctctggatgacatcattgctcagctcccaccacccattaaaaagaagaaatttggaacctaaaacagggcactgtctgtgtccttccttgaactgtctaccctgttgcttttcacaaatcatggtaataaaacaagttattcttg

SEQ ID NO: 119806 - DNA, 151 bp, Homo sapiens
  Payload ID: 3497
  Gene Symbol: CIRH1A
  Gene Name: cirrhosis, autosomal recessive 1A (cirhin)
  ENST ID: ENST00000631541
  CDS Start-End: 1-151
gcagcgctgttcataagatgattgtggacaggcagtatatgggcgtgtctaagcggaagtgcatcgtgtggggtgtcgccttcttgtccgatggcactatcataagtgtggactctgctgggaaggtgcagttctgggactcagccactgg

SEQ ID NO: 119807 - DNA, 737 bp, Homo sapiens; identical to SEQ ID NO: 119794
  Payload ID: 3497
  Gene Symbol: CIRH1A
  Gene Name: cirrhosis, autosomal recessive 1A (cirhin)
  ENST ID: ENST00000631682
  CDS Start-End: 1-636

SEQ ID NO: 119808 - DNA, 1169 bp, Homo sapiens
  Payload ID: 3498
  Gene Symbol: CLYBL
  Gene Name: citrate lyase beta like
  Uniprot ID: Q8N0X4
  ENST ID: ENST00000339105
  CDS Start-End: 1-1023
atggcgctacgtctgctgcggagggcggcgcgcggagctgcggcggcggcgctgctgaggctgaaagcgtctctagcagctgatatccccagacttggatatagttcctcatcccatcacaagtacatcccccggagggcagtgctttatgtacctggaaatgatgaaaagaaaataaagaagattccatccctgaatgtagattgtgcagtgctcgactgtgaggatggagtggctgcaaacaaaaagaatgaagctcgactgagaattgtaaaaactcttgaagacattgatctgggccctactgaaaaatgtgtgagagtcaactcagtttccagtggtctggcggaagaagacctagagacccttttgcaatcccgggtccttccttccagcctgatgctaccaaaggtggaaagtcctgaagaaatccagtggtttgcagacaaattttcattccacttaaaaggccgaaaacttgaacaaccaatgaatttaatcccttttgtggaaactgcaatgggtttgctcaattttaaggcagtgtgtgaagaaaccctgaaggtcgggcctcaagtaggtctctttctagatgcagtcgtttttggaggagaagactttcgagccagcataggtgcaacaagtagtaaagaaaccctggatattctctacgcccggcaaaagattgttgtcatagcgaaagcctttggtctccaagccatagatctggtgtacattgactttcgagatggagctgggctgcttagacagtcacgagaaggagccgccatgggcttcactggtaagcaggtgattcaccctaaccaaattgccgtggtccaggagcagttttctccttcccctgaaaaaattaagtgggctgaagaactgattgctgcctttaaagaacatcaacaattaggaaagggggcctttactttccaagggagtatgatcgacatgccattactgaagcaggcccagaacactgttacgcttgccacctccatcaaggaaaaatgatctgttaaatgaagctgtcatcaggctaaagggtattgaagctgcagagggatcaacttgtgcttgccagaggacgccaatgaagtttgaaacaccaacaatcagagattttgtttctgttcctcattaaatcatgagcttttgtg

SEQ ID NO: 119809 - DNA, 1127 bp, Homo sapiens
  Payload ID: 3498
  Gene Symbol: CLYBL
  Gene Name: citrate lyase beta like
  Uniprot ID: Q8N0X4
  ENST ID: ENST00000376354
  CDS Start-End: 7-927
gggaagatggcgctacgtctgctgcggagggcggcgcgcggagctgcggcggcggcgctgctgaggctgaaagcgtctctagcagctgatatccccagacttggatatagttcctcatcccatcacaagtacatcccccggagggcagtgctttatgtacctggaaatgatgaaaagaaaataaagaagattccatccctgaatgtagattgtgcagtgctcgactgtgaggatggagtggctgcaaacaaaaagaatgaagctcgactgagaattgtaaaaactcttgaagacattgatctgggccctactgaaaaatgtgtgagagtcaactcagtttccagtggtctggcggaagaagacctagagacccttttgcaatcccgggtccttccttccagcctgatgctaccaaaggtggaaagtcctgaagaaatccagtgggcagtgtgtgaagaaaccctgaaggtcgggcctcaagtaggtctctttctagatgcagtcgtttttggaggagaagactttcgagccagcataggtgcaacaagtagtaaagaaaccctggatattctctacgcccggcaaaagattgttgtcatagcgaaagcctttggtctccaagccatagatctggtgtacattgactttcgagatggagctgggctgcttagacagtcacgagaaggagccgccatgggcttcactggtaagcaggtgattcaccctaaccaaattgccgtggtccaggagcagttttctccttcccctgaaaaaattaagtgggctgaagaactgattgctgcctttaaagaacatcaacaattaggaaagggggcctttactttccaagggagtatgatcgacatgccattactgaagcaggcccagaacactgttacgcttgccacctccatcaaggaaaaatgatctgttaaatgaagctgtcatcaggtgggctgaacatatacagtggggttcttaaagacaaaccacaatactcaaagcaacttgttaggatgccagattgggacctgactccatttacagttcatgttaatcacaattttgttgttgttgtctcactggccagttattcccctaaaaaaatgaacgcttttccctttgga

SEQ ID NO: 119810 - DNA, 6771 bp, Homo sapiens
  Payload ID: 3498
  Gene Symbol: CLYBL
  Gene Name: citrate lyase beta like
  Uniprot ID: Q8N0X4
  ENST ID: ENST00000376355
  CDS Start-End: 28-1050
aaagggcggggcgcgcgcgtcgggaagatggcgctacgtctgctgcggagggcggcgcgcggagctgcggcggcggcgctgctgaggctgaaagcgtctctagcagctgatatccccagacttggatatagttcctcatcccatcacaagtacatcccccggagggcagtgctttatgtacctggaaatgatgaaaagaaaataaagaagattccatccctgaatgtagattgtgcagtgctcgactgtgaggatggagtggctgcaaacaaaaagaatgaagctcgactgagaattgtaaaaactcttgaagacattgatctgggccctactgaaaaatgtgtgagagtcaactcagtttccagtggtctggcggaagaagacctagagacccttttgcaatcccgggtccttccttccagcctgatgctaccaaaggtggaaagtcctgaagaaatccagtggtttgcagacaaattttcattccacttaaaaggccgaaaacttgaacaaccaatgaatttaatcccttttgtggaaactgcaatgggtttgctcaattttaaggcagtgtgtgaagaaaccctgaaggtcgggcctcaagtaggtctctttctagatgcagtcgtttttggaggagaagactttcgagccagcataggtgcaacaagtagtaaagaaaccctggatattctctacgcccggcaaaagattgttgtcatagcgaaagcctttggtctccaagccatagatctggtgtacattgactttcgagatggagctgggctgcttagacagtcacgagaaggagccgccatgggcttcactggtaagcaggtgattcaccctaaccaaattgccgtggtccaggagcagttttctccttcccctgaaaaaattaagtgggctgaagaactgattgctgcctttaaagaacatcaacaattaggaaagggggcctttactttccaagggagtatgatcgacatgccattactgaagcaggcccagaacactgttacgcttgccacctccatcaaggaaaaatgatctgttaaatgaagctgtcatcaggtgggctgaacatatacagtggggttcttaaagacaaaccacaatactcaaagcaacttgttaggatgccagattgggacctgactccatttacagttcatgttaatcacaattttgttgttgttgtctcactggccagttattcccctaaaaaaatgaacgcttttccctttggatccaagcttatgattttatcatttttagtgtattacgaatatgggcttatgatttcacagggaggtaagatcctggggaaagatgggctgtgaggcgaaggtaggtctttaatgaaatggatctttcccaaatagacatattccctccacccttctcatgttagtaaatgtttcctgcttgttcatttatacagctgacaccacaaataattttaagaaaagccaggcctttaaaacatagtagcaacattaaggggtcatctctatttcactagtaatctgataaaacaacagagatggcatcaaaaaagaatactaagtattatattggcttaaaaagacactttctgaaaataaactttcgaaactggttactattaacctccacccctaaaacgaaacatccatctccttgaaccgctagacgatgaacacgaaagctgtcatcctgggtgaatgctgtgagtcaaccattaccggcaattaaaaaataaatgtgcagaaacacaagaccatccattctccccctttattttcccgtttaactgtttgccattgaggctatttccccctggaaatgtatggctgggacaggactccctcagtcataaacttgtagcgtctcagaagacacaatgcacccgagctggtgcatgtggcccctgcgagatttgcatcacattagagatgcggctgcaggtcagatgggtggtgtggttaacgggcttagtaaagctgttttgaagaggttaacccagcttgtagtaagggtaaataaacataacaaccagccattgttccctattcagcatgtactcttatattgaaggctaaagggtattgaagctgcagagggatcaacttgtgcttgccagaggacgccaatgaagtttgaaacaccaacaatcagagattttgtttctgttcctcattaaatcatgagcttttgtgccgagactctggacgactgttccttaagaaattaacagaatgggaagttttaaactctacaccaaccttttcatgacctacacagcagcaacgctgctactcttagacaaacaccgcggggaaggctgttctgtttatttaaatttgtaaatagaaaacagttgttttttactttcatttttcacctcctcctacgcccttttggattatttcctctgcggcccctagcatgagccccaaccaggcctccccttttccccacttctctcaattcccacaggaagcccgagaggtgaggagctgaggttagacaccaggagaggcaccatcacacaaaagcgcggccgcagagtcccaccgccaccaggcgacccccacccagagagggacagacatgcggggagccagcaccgggcaagatggctctggggatcctcattctgtgaagacaccaactcatttctcaaacacaggatccaggagacagatagctcctaaatggagatggcacatgctccgtggggtccctcatagaggagtgccaccctccacactggccacgctgggctgccccagagcggccagaaaggaaggtgggagctagccccatcctcactcagaggccggaaggaggaagatggcatctcgccaacttcagagccgaatggcctctagccacactgcttccagaccccagacggggcagcagcagcagttcccagaggagcacccattgttgcagctaggacccaccaaggatgggactcctggagtcaggtgcacaccaggtaacccaggaccacgctgtgcacccccagtctgcccctctgctcagaacacagagggatgggaggatggcttggcagtgggaaggcaaaagaaggcctctctcactctgcccctgccatacgcacccgctgagggtgttagaagcagtggaggcagagctggccctaagcaaaagaagaaaataaacctcaccttgtccttcctatgggcagccctcaccccaatctaactaaccttcccatcctccagcctaatccaaagaagcccttggcttgaggggatgaagggcttgcgttctagtctccaccccagccccacaggcagccagccagccagccccacacagaggggcctcctcaaggcctcactgggagcctcctgtccccagccaaggagccctacagacctggggaaaagcaggcccctccgcaaggcccctgggtggtgcggaggccggaccggctaggcctcccgctgctggccactcccaggccacgggttcctaggtcccaaccacattggactgctcgccacgccactgccctcatcccaaactgctttgttcaaacaaaaccaccttgtttcagtctccccaaatgtccagttcattatcttcctcataacccatggtccctattagggtaggatcatgagactaagacctatgagagccacaaatctggaccaaagtcccattccctgaacagagacccaaacgacgagggtcccagaagagagttcagtcctgatcagaaacccatggtgccttagtccttgaagaacaaaactctaggaagaagatgctggaaggcaaagggtattccccctctttccccacccgcgtctctgtggtgccatgggtgggcccaggtaccctgggaaaggtgggagagcagtcaagggtgggtgtgtgatctccactgggctcactgggcacccccgacacggggaagtgagagctgcccgactcctgagccaggcgtgggtgacaggaagaggaccttgcagctaatctgattcattagaaaccatacctgtttatgttttgtgtagctcatcacaagccgcttagccatatcacccccgttattaattcttggggtctaaattatgggtaacactattaaaacattatcagaactaatgagaaacaattacttagaaaatgagccgggacaagactgagttgggaacatcagtggtgatcactgtagattagtttaataaatcatcaggtgcaaggcaagactgactgtatgtatgcaaagccccgtcacgggaaaatgaaattgagattttttttttttgcataattttttcattaatctcaataggacccgtgtggtgtagattgctttattcccctaataccttgcctgaggcgggggggggggggggtgcccaataatgtcttcattgttttactgaggtcttaatgacaatctgtgacaacctcattttaatgtatagaggattatatcaatacagtcatgttttattgaaatggtgaagggaactccagtcagagtcaggcagtgtctgtgagcacaagttaggaagtttctcggcatccgggagcgttcccgtctgatgtcccagtgttagtcctcccggccgccctcccctcctctcctccagggacggctgggaaaacagtcctgcgggatgaagacttcaccgcctccgatttgaatttgaaagtaactccttccgtggcatatttcgctgggcagatagaacaaaccatgtcgttttcccccgtctctaaaatagacatattattatcattcacacttttgcacccggtcgttttgcgggagttcgggaaactgactttcttcattggggacattgtaattttctgatgatgccacgaggagaaaaaaaatacgggtttgttttaattggaaggaccttccgcttttatgatttcggtttaccttggaaaactgaatcttctgtgttttatttctttcctctagtactagaaaagcaatgaattaattgcacaaaacaggttctgagacggcccgcaggccccgagctcgtggacgcggccgagggtcgggtgtgacccgcggagccgctgccaggcttcccagctcgtcttcgcggggaggcgggaggcaggaccagaccccagcatttcagcgtgaaagtcttcgcctttctttccgcgctgtctttcccgcgggcggagcggcgtacctgagcgcggtccccacggaggatcagtgactttcccagaccccgcgggcgagcccgcgcttgggacccggcagctctgcgcgggctggttttggagggggtggtgttcgtttgtttaaattccagttgttatttggcagcatatcgccttccgagtcagtaagaattgcccacgacgtaaagagcgacttgcaggaaggggccgaagccgtcgttagcgcccgggcggcggcggccactcgaaccccgtttccgccaagcgcgctgcaacctgcggggcgagttcgttttgttttgccaaaatcatttggggacttctttgtcattcatgcccttccttttaaatgatttttatttttttccactgtaagtgaccggctgggtttgacttttgcttcttccgacggaagggcaccgcgagccggggtgggcggccccgcgggcaggaggagcgcggggtacacgcggtggccgcagacgccgagccctgcggagccccgaggcctcgtcgcccgcgcccccggtgcgcgcggagccggggccgaggccgggccaggaggagtgtggcggcccaggaggcctggactgtgggccctgctcgcccgcccgccgcgggccgcccggagcccgcgcgcctgtcgcgcagcccggctgtaatggtggcagatcaaaggcggccccgtgtccccgcggagcccgggacaatcccgcgcctttgtgcgctgttgctaggagcccgagaaactaagagaaagtgtcaggagcatgttaatcagactcgttacactgtaacaataacgtctctctcgggtctcccaggccccagtacccccgcgcaccctgcgcgcaggccggacacctgcgcagggcccttgcgcccgccctggggtcccgccggccctggggtccctgcagccccgaatccgcacccgagccacgcggaacgactagccccgaggggccccgcaggctcccggtgcagctccctggtcgtggtctccttgaccgaagccccggcctcacaccgcctggccgcgagcccgagggacgcagggacgatcccggtcccctgcttttcagtcctccagtcgaatcgcccactttgttcaatcacagtattcgaatcaagaggaaaatgaacattccctttatggtagctttttggttatgagttttggcaaaactgttaaatcaactttgccgatttcccttgggaatccctggaggccactctaagtggtaatcccaagtttaagaaggaaatggggaaattttgctgagagtaaagatgtcgccgaactttttgaagggatttgcttcattcattcatttagtcattcaacagacacctgttgaacccgactgggtgccagaggggccagtcacaggacttattccagatgaacttttcttttgaaattagaatgcccttgtggaagccaaaggaggagcagaggcctaaaataatgtcaagtgtcaaagcaaaaagaagtgccattggctactacagtgtgtgatgataacaagagaggtgcgaattaggaattaaaaacgtttgaaaaactacaggcca

SEQ ID NO: 119811 - DNA, 469 bp, Homo sapiens
  Payload ID: 3498
  Gene Symbol: CLYBL
  Gene Name: citrate lyase beta like
  ENST ID: ENST00000425186
  CDS Start-End: 1-270
gaagaactgattgctgcctttaaagaacatcaacaattaggaaaggtaggtcggtattgctgctcttggctttgcattcagccttttccatcatcaccaggtcagcggtcacagagcatctcccgtgtacctggcaggtactgggtgctgggtgccaggtcctgggagtcaaagggggcctttactttccaagggagtatgatcgacatgccattactgaagcaggcccagaacactgttacgcttgccacctccatcaaggaaaaatgatctgttaaatgaagctgtcatcaggtgggctgaacatatacagtggggttcttaaagacaaaccacaatactcaaagcaacttgttaggatgccagattgggacctgactccatttacagttcatgttaatcacaattttgttgttgttgtctcactggccagttattcccctaaaaaaatgaacgcttttccctttgg

SEQ ID NO: 119812 - DNA, 386 bp, Homo sapiens
  Payload ID: 3498
  Gene Symbol: CLYBL
  Gene Name: citrate lyase beta like
  ENST ID: ENST00000419700
  CDS Start-End: 1-312
ctccaagccatagatctggtgtacattgactttcgagatggagctgggctgcttagacagtcacgagaaggagccgccatgggcttcactggtaagcaggtgattcaccctaaccaaattgccgtggtccaggagcagttttctccttcccctgaaaaaattaagtgggctgaagaactgattgctgcctttaaagaacatcaacaattaggaaagggggcctttactttccaagggagtatgatcgacatgccattactgaagcaggcccagaacactgttacgcttgccacctccatcaaggaaaaatgatctgttaaatgaagctgtcatcaggaagcccgagaggtgaggagctgaggttagacaccaggagaggcaccatc

SEQ ID NO: 119813 - DNA, 610 bp, Homo sapiens
  Payload ID: 3498
  Gene Symbol: CLYBL
  Gene Name: citrate lyase beta like
  ENST ID: ENST00000443887
  CDS Start-End: 1-444
aatgaagctcgactgagaattgtaaaaactcttgaagacattgatctgggccctactgaaaaatgtgtgagagtcaactcagtttccagtggtctggcggaagaagacctagagacccttttgcaatcccgggtccttccttccagcctgatgctaccaaaggtggaaagtcctgaagaaatccagtgggcagtgtgtgaagaaaccctgaaggtcgggcctcaagtaggtctctttctagatgcagtcgtttttggaggagaagactttcgagccagcataggtgtcaaagacatctctctctctctttttctgtgtgtgtgtgtgtatatgtgtgtatatattttttctttgcccctcaaggatggacatttacataacaatgtatatttgccaaccatgacaatggtttttcatgacaatggaatggacactacttcctgataatttagggctcctcatagctgccctgcttctagagcactgcattattacttctgttcatttataaaagacacgagcaatagaaagcctgttgcagccccaggcatgctcaggaatatatggcatctcctttgctcctaataaatatattatgtgaacagcctca

SEQ ID NO: 119814 - DNA, 712 bp, Homo sapiens
  Payload ID: 3498
  Gene Symbol: CLYBL
  Gene Name: citrate lyase beta like
  ENST ID: ENST00000416504
  CDS Start-End: 1-546
aatgaagctcgactgagaattgtaaaaactcttgaagacattgatctgggccctactgaaaaatgtgtgagagtcaactcagtttccagtggtctggcggaagaagacctagagacccttttgcaatcccgggtccttccttccagcctgatgctaccaaaggtggaaagtcctgaagaaatccagtggtttgcagacaaattttcattccacttaaaaggccgaaaacttgaacaaccaatgaatttaatcccttttgtggaaactgcaatgggtttgctcaattttaaggcagtgtgtgaagaaaccctgaaggtcgggcctcaagtaggtctctttctagatgcagtcgtttttggaggagaagactttcgagccagcataggtgtcaaagacatctctctctctctttttctgtgtgtgtgtgtgtatatgtgtgtatatattttttctttgcccctcaaggatggacatttacataacaatgtatatttgccaaccatgacaatggtttttcatgacaatggaatggacactacttcctgataatttagggctcctcatagctgccctgcttctagagcactgcattattacttctgttcatttataaaagacacgagcaatagaaagcctgttgcagccccaggcatgctcaggaatatatggcatctcctttgctcctaataaatatattatgtgaacagcctca

SEQ ID NO: 119815 - DNA, 2975 bp, Homo sapiens
  Payload ID: 3499
  Gene Symbol: CS
  Gene Name: citrate synthase
  Uniprot ID: O75390
  ENST ID: ENST00000351328
  CDS Start-End: 192-1592
cagtgggcggggcctccttgaggaccccgggctgggcgccgccgccggttcgtctactctttccttcagccgcctcctttcaaccttgtcaacccgtcggcgcggcctctggtgcagcggcggcggctcctgttcctgccgcagctctctccctttcttacctccccaccagatcccggagatcgcccgccatggctttacttactgcggccgcccggctcttgggaaccaagaatgcatcttgtcttgttcttgcagcccggcatgccagtgcttcctccacgaatttgaaagacatattggctgacctgatacctaaggagcaggccagaattaagactttcaggcagcaacatggcaagacggtggtgggccaaatcactgtggacatgatgtatggtggcatgagaggcatgaagggattggtctatgaaacatcagttcttgatcctgatgagggcatccgtttccgaggctttagtatccctgaatgccagaaactgctacccaaggctaagggtggggaagaacccctgcctgagggcttattttggctgctggtaactggacatatcccaacagaggaacaggtatcttggctctcaaaagagtgggcaaagagggcagctctgccttcccatgtggtcaccatgctggacaactttcccaccaatctacaccccatgtctcagctcagtgcagctgttacagccctcaacagtgaaagtaactttgcccgagcatatgcacagggtatcagccgaaccaagtactgggagttgatttatgaagactctatggatctaatcgcaaagctaccttgtgttgcagcaaagatctaccgaaatctctacagagaaggcagcggtattggggccattgactctaacctggactggtctcacaatttcaccaacatgttaggctatactgatcatcagttcactgagctcacgcgcctgtacctcaccatccacagtgaccatgagggtggcaatgtaagtgcccataccagccatttggtgggcagtgccctttccgacccttacctgtcctttgcagcagccatgaacgggctggcagggcctctccatggactggcaaatcaggaagtgcttgtctggctaacacagctgcagaaggaagttggcaaagatgtgtcagatgagaagttacgagactacatctggaacacactcaactcaggacgggttgttccaggctatggccatgcagtactaaggaagactgatccgcgatatacctgtcagcgagagtttgctctgaaacacctgcctaatgaccccatgtttaagttggttgctcagctgtacaagattgtgcccaatgtcctcttagagcagggtaaagccaagaatccttggcccaatgtagatgctcacagtggggtgctgctccagtattatggcatgacggagatgaattactacacggtcctgtttggggtgtcacgagcattgggtgtactggcacagctcatctggagccgagccttaggcttccctctagaaaggcccaagtccatgagcacagagggtctgatgaagtttgtggactctaagtcagggtaaaactggagactgggtgaaagtgactaccagaaagtgaggaagcctaaataaaaagtatacttttgtttcagggggcctttaaagacttaagattaaattatatctgaggcactgataatatgtttgaggttaaaatataaattaagactttaaaagatgaaaaatggtcccttcttccctaatcagctcccttcccctgcctggtatgagttgcccatcatacgcatggtcctggaggatgaccaggactaatgcatgtggtatgagtaggtttggccccctcactatctctagagtgagaatctggctcctgtttccatgggtcaaagccggttgcagagaatctgtagtcactttggagctttagcttctctgccaagccctcaataagccagcaaaccaggactctgccccttctgtttccataggaatcatgttggatagtcagctgtaccaagccccttggccctctcccatgcacacaaacacctcctagcaagacctgttggttagctggacatgctttggcaatttttttatactaccaagtgaccataaaggcatggcatttgttgtgactggcacccaatgtttgattttttttttaaaactatccaattaaaattaaggtctgggagtgttctgtttcccattactttaatactcacctcctcccagactttctacacctgttgcacctcaggcagaggatgttctggacctccccctcttggtccctactagagacctctcaacagatctgtgggcccagtcattgggttttatcagtgcttaatgtgaactaagttttttacttccacagaatacaagccactaccttctgacctccccaccccccaccaacccccatcttttaatatgctgtggggcatagaactccggaatgaccagcatgatattttcagagtcttgtccccggggtattagcacctctttttgaacagggaattgattcaagattggacatggtctcctctgattatcaggtactggggctgagggcattaaaaatagtaagcctccctcctcgtcccctgcctcaagaaattgcctccttatttatcaacatctttttcctccctttccctgagagctcacagtacaatgtttcagaagccccatttgcacaggttttcagcaactcagaatgctctacttctttttctttgagaaaggattaagatacactcctgctgtgcccccatctttcctccaaactcctgcctgtgtttgtgtggatacccagtcccagaaccacactgttgagttggacacactgtaaacccctgggtaactgtcaagtcatgatggagacttcaggttgttctgtataaaatgcaaaataaatgtttttattaacaa

SEQ ID NO: 119816 - DNA, 1893 bp, Homo sapiens
  Payload ID: 3499
  Gene Symbol: CS
  Gene Name: citrate synthase
  ENST ID: ENST00000542324
  CDS Start-End: 256-1617
ccttcagccgcctcctttcaaccttgtcaacccgtcggcgcggcctctggtgcagcggcggcggctcctgttcctgccgcagctctctccctttcttacctccccaccagatcccggagatcgcccgccatggctttacttactgcggccgcccggctcttgggaaccaagctggaaggaattatccattcacctctgcctcaggcttgactgcctctttcctgggatccaactcccaggaagttctgacacttgatgaatgcatcttgtcttgttcttgcagcccggcatgccagtgcttcctccacgaatttgaaagacatattggctgacctgatacctaaggagcaggccagaattaagactttcaggcagcaacatggcaagacggtggtgggccaaatcactgtggacatgatgtatggtggcatgagaggcatgaagggattggtctatgaaacatcagttcttgatcctgatgagggcatccgtttccgaggctttagtatccctgaatgccagaaactgctacccaaggctaagggtggggaagaacccctgcctgagggcttattttggctgctggtaactggacatatcccaacagaggaacaggtatcttggctctcaaaagagtgggcaaagagggcagctctgccttcccatgtggtcaccatgctggacaactttcccaccaatctacaccccatgtctcagctcagtgcagctgttacagccctcaacagtgaaagtaactttgcccgagcatatgcacagggtatcagccgaaccaagtactgggagttgatttatgaagactctatggatctaatcgcaaagctaccttgtgttgcagcaaagatctaccgaaatctctacagagaaggcagcggtattggggccattgactctaacctggactggtctcacaatttcaccaacatgttaggctatactgatcatcagttcactgagctcacgcgcctgtacctcaccatccacagtgaccatgagggtggcaatgtaagtgcccataccagccatttggtgggcagtgccctttccgacccttacctgtcctttgcagcagccatgaacgggctggcagggcctctccatggactggcaaatcaggaagtgcttgtctggctaacacagctgcagaaggaagttggcaaagatgtgtcagatgagaagttacgagactacatctggaacacactcaactcaggacgggttgttccaggctatggccatgcagtactaaggaagactgatccgcgatatacctgtcagcgagagtttgctctgaaacacctgcctaatgaccccatgtttaagttggttgctcagctgtacaagattgtgcccaatgtcctcttagagcagggtaaagccaagaatccttggcccaatgtagatgctcacagtggggtgctgctccagtattatggcatgacggagatgaattactacacggtcctgtttggggtgtcacgagcattgggtgtactggcacagctcatctggagccgagccttaggcttccctctagaaaggcccaagtccatgagcacagagggtctgatgaagtttgtggactctaagtcagggtaaaactggagactgggtgaaagtgactaccagaaagtgaggaagcctaaataaaaagtatacttttgtttcagggggcctttaaagacttaagattaaattatatctgaggcactgataatatgtttgaggttaaaatataaattaagactttaaaagatgaaaaatggtcccttcttccctaatcagctcccttcccctgcctggtatgagttgcccatcatacgcatggtcctggaggatgaccaggactaatgcatgtggtatgagtaggtttgg

SEQ ID NO: 119817 - DNA, 911 bp, Homo sapiens
  Payload ID: 3499
  Gene Symbol: CS
  Gene Name: citrate synthase
  ENST ID: ENST00000546891
  CDS Start-End: 1-573
ttggctgacctgatacctaaggagcaggccagaattaagactttcaggcagcaacatggcaagacggtggtgggccaaatcactgtggacatgatgtatggtggcatgagaggcatgaagggattggtctatgaaacatcagttcttgatcctgatgagggcatccgtttccgaggctttagtatccctgaatgccagaaactgctacccaaggctaagggtggggaagaacccctgcctgagggcttattttggctgctggtaactggacatatcccaacagaggaacaggtatcttggctctcaaaagagtgggcaaagagggcagctctgccttcccatgtggtcaccatgctggacaactttcccaccaatctacaccccatgtctcagctcagtgcagctgttacagccctcaacagtgaaagtaactttgcccgagcatatgcacagggtatcagccgaaccaagtactgggagcaaagatctaccgaaatctctacagagaaggcagcggtattggggccattgactctaacctggactggtctcacaatttcaccaacatgttaggctatactgatcatcagttcactgagctcacgcgcctgtacctcaccatccacagtgaccatgagggtggcaatgtaagtgcccataccagccatttggtgggcagtgccctttccgacccttacctgtcctttgcagcagccatgaacgggctggcagggcctctccatggactggcaaatcaggaagtgcttgtctggctaacacagctgcagaaggaagttggcaaagatgtgtcagatgagaagttacgagactacatctggaacacactcaactcaggacgggttgttccaggctatggccatgcagtactaaggaagactgatccgcgatat

SEQ ID NO: 119818 - DNA, 3057 bp, Homo sapiens
  Payload ID: 3499
  Gene Symbol: CS
  Gene Name: citrate synthase
  ENST ID: ENST00000548567
  CDS Start-End: 472-1674
agtgggcggggcctccttgaggaccccgggctgggcgccgccgccggttcgtctactctttccttcagccgcctcctttcaaccttgtcaacccgtcggcgcggcctctggtgcagcggcggcggctcctgttcctgccgcagctctctccctttcttacctccccaccagatcccggagatcgcccgccatggctttacttactgcggccgcccggctcttgggaaccaaggcacccagtggcaagtactagctgagcatttgggagatgcttgtcttacttggctgttgcttctcctgctgctggggaaaaggaatgcatcttgtcttgttcttgcagcccggcatgccagtgcttcctccacgaatttgaaagacatattggctgacctgatacctaaggagcaggccagaattaagactttcaggcagcaacatggcaagacggtggtgggccaaatcactgtggacatgatgtatggtggcatgagaggcatgaagggattggtctatgaaacatcagttcttgatcctgatgagggcatccgtttccgaggctttagtatccctgaatgccagaaactgctacccaaggctaagggtggggaagaacccctgcctgagggcttattttggctgctggtaactggacatatcccaacagaggaacaggtatcttggctctcaaaagagtgggcaaagagggcagctctgccttcccatgtggtcaccatgctggacaactttcccaccaatctacaccccatgtctcagctcagtgcagctgttacagccctcaacagtgaaagtaactttgcccgagcatatgcacagggtatcagccgaaccaagtactgggagttgatttatgaagactctatggatctaatcgcaaagctaccttgtgttgcagcaaagatctaccgaaatctctacagagaaggcagcggtattggggccattgactctaacctggactggtctcacaatttcaccaacatgttaggctatactgatcatcagttcactgagctcacgcgcctgtacctcaccatccacagtgaccatgagggtggcaatgtaagtgcccataccagccatttggtgggcagtgccctttccgacccttacctgtcctttgcagcagccatgaacgggctggcagggcctctccatggactggcaaatcaggaagtgcttgtctggctaacacagctgcagaaggaagttggcaaagatgtgtcagatgagaagttacgagactacatctggaacacactcaactcaggacgggttgttccaggctatggccatgcagtactaaggaagactgatccgcgatatacctgtcagcgagagtttgctctgaaacacctgcctaatgaccccatgtttaagttggttgctcagctgtacaagattgtgcccaatgtcctcttagagcagggtaaagccaagaatccttggcccaatgtagatgctcacagtggggtgctgctccagtattatggcatgacggagatgaattactacacggtcctgtttggggtgtcacgagcattgggtgtactggcacagctcatctggagccgagccttaggcttccctctagaaaggcccaagtccatgagcacagagggtctgatgaagtttgtggactctaagtcagggtaaaactggagactgggtgaaagtgactaccagaaagtgaggaagcctaaataaaaagtatacttttgtttcagggggcctttaaagacttaagattaaattatatctgaggcactgataatatgtttgaggttaaaatataaattaagactttaaaagatgaaaaatggtcccttcttccctaatcagctcccttcccctgcctggtatgagttgcccatcatacgcatggtcctggaggatgaccaggactaatgcatgtggtatgagtaggtttggccccctcactatctctagagtgagaatctggctcctgtttccatgggtcaaagccggttgcagagaatctgtagtcactttggagctttagcttctctgccaagccctcaataagccagcaaaccaggactctgccccttctgtttccataggaatcatgttggatagtcagctgtaccaagccccttggccctctcccatgcacacaaacacctcctagcaagacctgttggttagctggacatgctttggcaatttttttatactaccaagtgaccataaaggcatggcatttgttgtgactggcacccaatgtttgattttttttttaaaactatccaattaaaattaaggtctgggagtgttctgtttcccattactttaatactcacctcctcccagactttctacacctgttgcacctcaggcagaggatgttctggacctccccctcttggtccctactagagacctctcaacagatctgtgggcccagtcattgggttttatcagtgcttaatgtgaactaagttttttacttccacagaatacaagccactaccttctgacctccccaccccccaccaacccccatcttttaatatgctgtggggcatagaactccggaatgaccagcatgatattttcagagtcttgtccccggggtattagcacctctttttgaacagggaattgattcaagattggacatggtctcctctgattatcaggtactggggctgagggcattaaaaatagtaagcctccctcctcgtcccctgcctcaagaaattgcctccttatttatcaacatctttttcctccctttccctgagagctcacagtacaatgtttcagaagccccatttgcacaggttttcagcaactcagaatgctctacttctttttctttgagaaaggattaagatacactcctgctgtgcccccatctttcctccaaactcctgcctgtgtttgtgtggatacccagtcccagaaccacactgttgagttggacacactgtaaacccctgggtaactgtcaagtcatgatggagacttcaggttgttctgtataaaatgcaaaataaatgtttttattaacaa

SEQ ID NO: 119819 - DNA, 646 bp, Homo sapiens
  Payload ID: 3499
  Gene Symbol: CS
  Gene Name: citrate synthase
  ENST ID: ENST00000550159
  CDS Start-End: 405-646
ctttccttcagccgcctcctttcaaccttgtcaacccgtcggcgcggcctctggtgcagcggcggcggctcctgttcctgccgcagctctctccctttcttacctccccaccagatcccggagatcgcccgccatggctttacttactgcggccgcccggctcttgggaaccaagcccggcatgccagtgcttcctccacggtaaggtttggaaaagaagactaagaataagaatcattgcggccagcctgaccttggggcagaggatttggcaaccacctggcctcttattatcctgaaatttgaaagacatattggctgacctgatacctaaggagcaggccagaattaagactttcaggcagcaacatggcaagacggtggtgggccaaatcactgtggacatgatgtatggtggcatgagaggcatgaagggattggtctatgaaacatcagttcttgatcctgatgagggcatccgtttccgaggctttagtatccctgaatgccagaaactgctacccaaggctaagggtggggaagaacccctgcctgagggcttattttggctgctggtaactggacatatcccaacagaggaacaggtatcttggctctcaaaagagtgggcaaagagggcagctct

SEQ ID NO: 119820 - DNA, 580 bp, Homo sapiens
  Payload ID: 3499
  Gene Symbol: CS
  Gene Name: citrate synthase
  ENST ID: ENST00000552688
  CDS Start-End: 108-580
cttgtcaacccgtcggcgcggcctctggtgcagcggcggcggctcctgttcctgccgcagctctctccctttcttacctccccaccagatcccggagatcgcccgccatggctttacttactgcggccgcccggctcttgggaaccaagaatgcatcttgtcttgttcttgcagcccggcatgccagtgcttcctccacgatgtatggtggcatgagaggcatgaagggattggtctatgaaacatcagttcttgatcctgatgagggcatccgtttccgaggctttagtatccctgaatgccagaaactgctacccaaggctaagggtggggaagaacccctgcctgagggcttattttggctgctggtaactggacatatcccaacagaggaacaggtatcttggctctcaaaagagtgggcaaagagggcagctctgccttcccatgtggtcaccatgctggacaactttcccaccaatctacaccccatgtctcagctcagtgcagctgttacagccctcaacagtgaaagtaactttgcccgagcatatgcacagggtatcagccgaaccaagta

SEQ ID NO: 119821 - DNA, 555 bp, Homo sapiens
  Payload ID: 3499
  Gene Symbol: CS
  Gene Name: citrate synthase
  ENST ID: ENST00000552222
  CDS Start-End: 117-344
cctttcaaccttgtcaacccgtcggcgcggcctctggtgcagcggcggcggctcctgttcctgccgcagctctctccctttcttacctccccaccagatcccggagatcgcccgccatggctttacttactgcggccgcccggctcttgggaaccaagaatgcatcttgtcttgttcttgcagcccggcatgccagtgcttcctccacgaatttgaaagacatattggctgacctgatacctaaggagcaggccagaattaagactttcaggcagcaacatggcaagacggtggtgggccaaatcactgtggacatggcctgttgcagtggctcatgcctgtaatcccagcactttgggaggctgaggcgggtggctcatctgaggtcaggagttcgagaccagcctggccaacatgatgtatggtggcatgagaggcatgaagggattggtctatgaaacatcagttcttgatcctgatgagggcatccgtttccgaggctttagtatccctgaatgccagaaactgctacccaaggctaagggtggggaagaa

SEQ ID NO: 119822 - DNA, 542 bp, Homo sapiens
  Payload ID: 3499
  Gene Symbol: CS
  Gene Name: citrate synthase
  ENST ID: ENST00000551968
  CDS Start-End: 116-542
ctttcaaccttgtcaacccgtcggcgcggcctctggtgcagcggcggcggctcctgttcctgccgcagctctctccctttcttacctccccaccagatcccggagatcgcccgccatggctttacttactgcggccgcccggctcttgggaaccaagaatgcatcttgtcttgttcttgcagcccggcatgccagtgcttcctccacgaatttgaaagacatattggctgacctgatacctaaggagcaggccagaattaagactttcaggcagcaacatggcaagacggtggtgggccaaatcactgtggacatgatgtatggtggcatgagaggcatgaagggattggtctatgaaacatcagttcttgatcctgatgagggcttattttggctgctggtaactggacatatcccaacagaggaacaggtatcttggctctcaaaagagtgggcaaagagggcagctctgccttcccatgtggtcaccatgctggacaactttcccaccaatctacaccccatgtctcagctcagtgcag

SEQ ID NO: 119823 - DNA, 561 bp, Homo sapiens
  Payload ID: 3499
  Gene Symbol: CS
  Gene Name: citrate synthase
  ENST ID: ENST00000548041
  CDS Start-End: 115-561
tttcaaccttgtcaacccgtcggcgcggcctctggtgcagcggcggcggctcctgttcctgccgcagctctctccctttcttacctccccaccagatcccggagatcgcccgccatggctttacttactgcggccgcccggctcttgggaaccaagaatgcatcttgtcttgttcttgcagcccggcatgccagtgcttcctccacgaatttgaaagacatattggctgacctgatacctaaggagcaggccagaattaagactttcaggcagcaacatggcaagacggtggtgggccaaatcactgtggacatgatgtatggtggcatgagaggcatgaagggattggtctatgaaacatcagttcttgatcctgatgagggcatccgtttccgaggctttagtatccctgaatgccagaaactgctacccaaggctaagggtggggaagaacccctgcctgagggcttattttggctgctggtaactggacatatcccaacagaggaacagttgatttatgaagactctatggatctaatcgcaaagctaccttgtgtt

SEQ ID NO: 119824 - DNA, 751 bp, Homo sapiens
  Payload ID: 3499
  Gene Symbol: CS
  Gene Name: citrate synthase
  ENST ID: ENST00000551430
  CDS Start-End: 552-751
agtgggcggggcctccttgaggaccccgggctgggcgccgccgccggttcgtctactctttccttcagccgcctcctttcaaccttgtcaacccgtcggcgcggcctctggtgcagcggcggcggctcctgttcctgccgcagctctctccctttcttacctccccaccagatcccggagatcgcccgccatggctttacttactgcggccgcccggctcttgggaaccaaggagctgacctattgagtgagatgactgcctgattctcctgagagctgctgttccagtaaggtgactctacaggtggcatgcatccagaagccaaaagcccaactgtcacacctccaggattaggggagaatctgggaggtagaagttcagggatgattcagagaatgcatcttgtcttgttcttgcagcccggcatgccagtgcttcctccacgaatttgaaagacatattggctgacctgatacctaaggagcaggccagaattaagactttcaggcagcaacatggcaagacggtggtgggccaaatcactgtggacatgatgtatggtggcatgagaggcatgaagggattggtctatgaaacatcagttcttgatcctgatgagggcatccgtttccgaggctttagtatccctgaatgccagaaactgctacccaaggctaagggtggggaagaacccctgcctgagggcttattttggctgctggtaactggacatatcccaacagaggaaca

SEQ ID NO: 119825 - DNA, 589 bp, Homo sapiens
  Payload ID: 3499
  Gene Symbol: CS
  Gene Name: citrate synthase
  ENST ID: ENST00000550655
  CDS Start-End: 54-589
ctccttgaggaccccgggctgggcgccgccgccgatcccggagatcgcccgccatggctttacttactgcggccgcccggctcttgggaaccaagaatgcatcttgtcttgttcttgcagcccggcatgccagtgcttcctccacgaatttgaaagacatattggctgacctgatacctaaggagcaggccagaattaagactttcaggcagcaacatggcaagacggtggtgggccaaatcactgtggacatgatgtatggtggcatgagaggcatgaagggattggtctatgaaacatcagttcttgatcctgatgagggcatccgtttccgaggctttagtatccctgaatgccagaaactgctacccaaggctaagggtggggaagaacccctgcctgagggcttattttggctgctggtaactggacatatcccaacagaggaacaggtatcttggctctcaaaagagtgggcaaagagggcagctctgccttcccatgtggtcaccatgctggacaactttcccaccaatctacaccccatgtctcagctcagtgcagctgttacagccctcaacagtgaaag

SEQ ID NO: 119826 - DNA, 656 bp, Homo sapiens
  Payload ID: 3499
  Gene Symbol: CS
  Gene Name: citrate synthase
  ENST ID: ENST00000547298
  CDS Start-End: 304-656
ctgggggtgaagtgcacgccgcccgccctcggcccgcagtccagaacgcgtgaggaggccgaccctgctgtcaccccgcatgtctgaaatgaaaggggaagggatgcgtggccctgaaatagcaaggagccgagacaggaacctctgaatgcatcttgtcttgttcttgcagcccggcatgccagtgcttcctccacgaatttgaaagacatattggctgacctgatacctaaggagcaggccagaattaagactttcaggcagcaacatggcaagacggtggtgggccaaatcactgtggacatgatgtatggtggcatgagaggcatgaagggattggtctatgaaacatcagttcttgatcctgatgagggcatccgtttccgaggctttagtatccctgaatgccagaaactgctacccaaggctaagggtggggaagaacccctgcctgagggcttattttggctgctggtaactggacatatcccaacagaggaacaggtatcttggctctcaaaagagtgggcaaagagggcagctctgccttcccatgtggtcaccatgctggacaactttcccaccaatctacaccccatgtctcagctcagtgcagctgttacagccctcaacagtgaaagtaactttgcccgagc

SEQ ID NO: 119827 - DNA, 553 bp, Homo sapiens
  Payload ID: 3499
  Gene Symbol: CS
  Gene Name: citrate synthase
  ENST ID: ENST00000549221
  CDS Start-End: 133-553
tttccttcagccgcctcctttcaaccttgtcaacccgtcggcgcggcctctggtgcagcggcggcggctcctgttcctgccgcagctctctccctttcttacctccccaccagatcccggagatcgcccgccatggctttacttactgcggccgcccggctcttgggaaccaagggcatccgtttccgaggctttagtatccctgaatgccagaaactgctacccaaggctaagggtggggaagaacccctgcctgagggcttattttggctgctggtaactggacatatcccaacagaggaacaggtatcttggctctcaaaagagtgggcaaagagggcagctctgccttcccatgtggtcaccatgctggacaactttcccaccaatctacaccccatgtctcagctcagtgcagctgttacagccctcaacagtgaaagtaactttgcccgagcatatgcacagggtatcagccgaaccaagtactgggagttgatttatgaagactctatggatctaatcgcaaagctaccttgtgttgcagcaaaga

SEQ ID NO: 119828 - DNA, 747 bp, Homo sapiens
  Payload ID: 3499
  Gene Symbol: CS
  Gene Name: citrate synthase
  ENST ID: ENST00000550734
  CDS Start-End: 314-747
gtctactctttccttcagccgcctcctttcaaccttgtcaacccgtcggcgcggcctctggtgcagcggcggcggctcctgttcctgccgcagctctctccctttcttacctccccaccagatcccggagatcgcccgccatggctttacttactgcggccgcccggctcttgggaaccaagcccggcatgccagtgcttcctccacgaatttgaaagacatattggctgacctgatacctaaggagcaggccagaattaagactttcaggcagcaacatggcaagacggtggtgggccaaatcactgtggacatgatgtatggtggcatgagaggcatgaagggattggtctatgaaacatcagttcttgatcctgatgagggcatccgtttccgaggctttagtatccctgaatgccagaaactgctacccaaggctaagggtggggaagaacccctgcctgagggcttattttggctgctggtaactggacatatcccaacagaggaacaggtatcttggctctcaaaagagtgggcaaagagggcagctctgccttcccatgtggtcaccatgctggacaactttcccaccaatctacaccccatgtctcagctcagtgcagctgttacagccctcaacagtgaaagtaactttgcccgagcatatgcacagggtatcagccgaaccaagtactgggagttgatttatgaagactctatggatctaatcgcaaagctaccttg

SEQ ID NO: 119829 - DNA, 551 bp, Homo sapiens
  Payload ID: 3499
  Gene Symbol: CS
  Gene Name: citrate synthase
  ENST ID: ENST00000548746
  CDS Start-End: 1-372
ttacgagactacatctggaacacactcaactcaggacgggttgttccaggctatggccatgcagtactaaggaagactgatccgcgatatacctgtcagcgagagtttgctctgaaacacctgcctaatgaccccatgtttaagttggttgctcagctgtacaagattgtgcccaatgtcctcttagagcagggtaaagccaagaatccttggcccaatgtagatgctcacagtggggtgctgctccagtattatggcatgacggagatgaattactacacggtcctgtttggggtgtcacgagcattgggtgtactggcacagctcatctggagccgagccttaggcttccctctagaaagaaaggattaagatacactcctgctgtgcccccatctttcctccaaactcctgcctgtgtttgtgtggatacccagtcccagaaccacactgttgagttggacacactgtaaacccctgggtaactgtcaagtcatgatggagacttcaggttgttctgtataaaatgcaaaataaatgtttttattaac

SEQ ID NO: 119830 - DNA, 797 bp, Homo sapiens
  Payload ID: 3499
  Gene Symbol: CS
  Gene Name: citrate synthase
  ENST ID: ENST00000551473
  CDS Start-End: 436-797
agccctgcgtgaagctacaggaccatgtgccgcgcttcccttctggctcctgggggtgaagtgcacgccgcccgccctcggcccgcagtccagaacgcgtgaggaggccgaccctgctgtcaccccgcatgtctgaaatgaaaggggaagggatgcgtggccctgaaatagcaaggagccgagacaggaacctctggcacccagtggcaagtactagctgagcatttgggagatgcttgtcttacttggctgttgcttctcctgctgctggggaaaaggaatgcatcttgtcttgttcttgcagcccggcatgccagtgcttcctccacgaatttgaaagacatattggctgacctgatacctaaggagcaggccagaattaagactttcaggcagcaacatggcaagacggtggtgggccaaatcactgtggacatgatgtatggtggcatgagaggcatgaagggattggtctatgaaacatcagttcttgatcctgatgagggcatccgtttccgaggctttagtatccctgaatgccagaaactgctacccaaggctaagggtggggaagaacccctgcctgagggcttattttggctgctggtaactggacatatcccaacagaggaacaggtatcttggctctcaaaagagtgggcaaagagggcagctctgccttcccatgtggtcaccatgctggacaactttcccaccaatctacaccccatgtctcagctcagtgcagctgttacagccctcaacagtgaaagtaactttgcccgagcatatgcaca

SEQ ID NO: 119831 - DNA, 1028 bp, Homo sapiens
  Payload ID: 3499
  Gene Symbol: CS
  Gene Name: citrate synthase
  ENST ID: ENST00000548849
  CDS Start-End: 176-571
cttgaggaccccgggctgggcgccgccgccggttcgtctactctttccttcagccgcctcctttcaaccttgtcaacccgtcggcgcggcctctggtgcagcggcggcggctcctgttcctgccgcagctctctccctttcttacctccccaccagatcccggagatcgcccgccatggctttacttactgcggccgcccggctcttgggaaccaagaatgcatcttgtcttgttcttgcagcccggcatgccagtgcttcctccacgaatttgaaagacatattggctgacctgatacctaaggagcaggccagaattaagactttcaggcagcaacatggcaagacggtggtgggccaaatcactgtggacatgggcatccgtttccgaggctttagtatccctgaatgccagaaactgctacccaaggctaagggtggggaagaacccctgcctgagggcttattttggctgctggtaactggacatatcccaacagaggaacaggtatcttggctctcaaaagagtgggcaaagagggcagctctgccttcccatgtggtcaccatgctggacaactttcccaccaatctacaccccatgtctcagctcagtgcagctgttacagccctcaacagtgaaagtaactttgcccgagcatatgcacagggtatcagccgaaccaagtactgggagttgatttatgaagactctatggatctaatcgcaaagctaccttgtgttgcagcaaagatctaccgaaatctctacagagaaggcagcggtattggggccattgactctaacctggactggtctcacaatttcaccaacatgttaggctatactgatcatcagttcactgagctcacgcgcctgtacctcaccatccacagtgaccatgagggtggcaatgtaagtgcccataccagccatttggtgggcagtgccctttccgacccttacctgtcctttgcagcagccatgaacgggctggcagggcctctccatggactggcaaatcagg

SEQ ID NO: 119832 - DNA, 2811 bp, Homo sapiens
  Payload ID: 3499
  Gene Symbol: CS
  Gene Name: citrate synthase
  ENST ID: ENST00000549143
  CDS Start-End: 118-267
tcctttcaaccttgtcaacccgtcggcgcggcctctggtgcagcggcggcggctcctgttcctgccgcagctctctccctttcttacctccccaccagatcccggagatcgcccgccatggctttacttactgcggccgcccggctcttgggaaccaagaatgcatcttgtcttgttcttgcagcaacatggcaagacggtggtgggccaaatcactgtggacatgatgtatggtggcatgagaggcatgaagggattggtctatgaaacatcagttcttgatcctgatgagggcatccgtttccgaggctttagtatccctgaatgccagaaactgctacccaaggctaagggtggggaagaacccctgcctgagggcttattttggctgctggtaactggacatatcccaacagaggaacaggtatcttggctctcaaaagagtgggcaaagagggcagctctgccttcccatgtggtcaccatgctggacaactttcccaccaatctacaccccatgtctcagctcagtgcagctgttacagccctcaacagtgaaagtaactttgcccgagcatatgcacagggtatcagccgaaccaagtactgggagttgatttatgaagactctatggatctaatcgcaaagctaccttgtgttgcagcaaagatctaccgaaatctctacagagaaggcagcggtattggggccattgactctaacctggactggtctcacaatttcaccaacatgttaggctatactgatcatcagttcactgagctcacgcgcctgtacctcaccatccacagtgaccatgagggtggcaatgtaagtgcccataccagccatttggtgggcagtgccctttccgacccttacctgtcctttgcagcagccatgaacgggctggcagggcctctccatggactggcaaatcaggaagtgcttgtctggctaacacagctgcagaaggaagttggcaaagatgtgtcagatgagaagttacgagactacatctggaacacactcaactcaggacgggttgttccaggctatggccatgcagtactaaggaagactgatccgcgatatacctgtcagcgagagtttgctctgaaacacctgcctaatgaccccatgtttaagttggttgctcagctgtacaagattgtgcccaatgtcctcttagagcagggtaaagccaagaatccttggcccaatgtagatgctcacagtggggtgctgctccagtattatggcatgacggagatgaattactacacggtcctgtttggggtgtcacgagcattgggtgtactggcacagctcatctggagccgagccttaggcttccctctagaaaggcccaagtccatgagcacagagggtctgatgaagtttgtggactctaagtcagggtaaaactggagactgggtgaaagtgactaccagaaagtgaggaagcctaaataaaaagtatacttttgtttcagggggcctttaaagacttaagattaaattatatctgaggcactgataatatgtttgaggttaaaatataaattaagactttaaaagatgaaaaatggtcccttcttccctaatcagctcccttcccctgcctggtatgagttgcccatcatacgcatggtcctggaggatgaccaggactaatgcatgtggtatgagtaggtttggccccctcactatctctagagtgagaatctggctcctgtttccatgggtcaaagccggttgcagagaatctgtagtcactttggagctttagcttctctgccaagccctcaataagccagcaaaccaggactctgccccttctgtttccataggaatcatgttggatagtcagctgtaccaagccccttggccctctcccatgcacacaaacacctcctagcaagacctgttggttagctggacatgctttggcaatttttttatactaccaagtgaccataaaggcatggcatttgttgtgactggcacccaatgtttgattttttttttaaaactatccaattaaaattaaggtctgggagtgttctgtttcccattactttaatactcacctcctcccagactttctacacctgttgcacctcaggcagaggatgttctggacctccccctcttggtccctactagagacctctcaacagatctgtgggcccagtcattgggttttatcagtgcttaatgtgaactaagttttttacttccacagaatacaagccactaccttctgacctccccaccccccaccaacccccatcttttaatatgctgtggggcatagaactccggaatgaccagcatgatattttcagagtcttgtccccggggtattagcacctctttttgaacagggaattgattcaagattggacatggtctcctctgattatcaggtactggggctgagggcattaaaaatagtaagcctccctcctcgtcccctgcctcaagaaattgcctccttatttatcaacatctttttcctccctttccctgagagctcacagtacaatgtttcagaagccccatttgcacaggttttcagcaactcagaatgctctacttctttttctttgagaaaggattaagatacactcctgctgtgcccccatctttcctccaaactcctgcctgtgtttgtgtggatacccagtcccagaaccacactgttgagttggacacactgtaaacccctgggtaactgtcaagtcatgatggagacttcaggttgttctgtataaaatgcaaaataaatgtttttattaacaatg

SEQ ID NO: 119833 - DNA, 903 bp, Homo sapiens
  Payload ID: 3499
  Gene Symbol: CS
  Gene Name: citrate synthase
  ENST ID: ENST00000551137
  CDS Start-End: 560-903
ctttcaaccttgtcaacccgtcggcgcggcctctggtgcagcggcggcggctcctgttcctgccgcagctctctccctttcttacctccccaccagatcccggagatcgcccgccatggctttacttactgcggccgcccggctcttgggaaccaaggcacccagtggcaagtactagctgagcatttgggagatgcttgtcttacttggctgttgcttctcctgctgctggggaaaagggagctgacctattgagtgagatgactgcctgattctcctgagagctgctgttccagtaaggtgactctacaggtggcatgcatccagaagccaaaagcccaactgtcacacctccaggattaggggagaatctgggaggtagaagttcagggatgattcagagaatgcatcttgtcttgttcttgcagcccggcatgccagtgcttcctccacgaatttgaaagacatattggctgacctgatacctaaggagcaggccagaattaagactttcaggcagcaacatggcaagacggtggtgggccaaatcactgtggacatgatgtatggtggcatgagaggcatgaagggattggtctatgaaacatcagttcttgatcctgatgagggcatccgtttccgaggctttagtatccctgaatgccagaaactgctacccaaggctaagggtggggaagaacccctgcctgagggcttattttggctgctggtaactggacatatcccaacagaggaacaggtatcttggctctcaaaagagtgggcaaagagggcagctctgccttcccatgtggtcaccatgctggacaactttcccaccaatctacaccccatgtctcagctcagtgcagctgttacagccctcaacagtgaaagtaactt

SEQ ID NO: 119834 - DNA, 676 bp, Homo sapiens
  Payload ID: 3499
  Gene Symbol: CS
  Gene Name: citrate synthase
  ENST ID: ENST00000551253
  CDS Start-End: 255-676
agccctgcgtgaagctacaggaccatgtgccgcgcttcccttctggctcctgggggtgaagtgcacgccgcccgccctcggcccgcagtccagaacgcaatgcatcttgtcttgttcttgcagcccggcatgccagtgcttcctccacgaatttgaaagacatattggctgacctgatacctaaggagcaggccagaattaagactttcaggcagcaacatggcaagacggtggtgggccaaatcactgtggacatgatgtatggtggcatgagaggcatgaagggattggtctatgaaacatcagttcttgatcctgatgagggcatccgtttccgaggctttagtatccctgaatgccagaaactgctacccaaggctaagggtggggaagaacccctgcctgagggcttattttggctgctggtaactggacatatcccaacagaggaacaggtatcttggctctcaaaagagtgggcaaagagggcagctctgccttcccatgtggtcaccatgctggacaactttcccaccaatctacaccccatgtctcagctcagtgcagctgttacagccctcaacagtgaaagtaactttgcccgagcatatgcacagggtatcagccgaaccaagtactgggagttgatttatgaagactctatggatctaatcgc

SEQ ID NO: 119835 - DNA, 744 bp, Homo sapiens
  Payload ID: 3499
  Gene Symbol: CS
  Gene Name: citrate synthase
  ENST ID: ENST00000551936
  CDS Start-End: 311-744
caggaccatgtgccgcgcttcccttctggctcctgggggtgaagtgcacgccgcccgccctcggcccgcagtccagaacgcgtgaggaggccgaccctgctgtcaccccgcatgtctgaaatgaaaggggaagggatgcgtggccctgaaatagcaaggagccgagacaggaacctctgcccggcatgccagtgcttcctccacgaatttgaaagacatattggctgacctgatacctaaggagcaggccagaattaagactttcaggcagcaacatggcaagacggtggtgggccaaatcactgtggacatgatgtatggtggcatgagaggcatgaagggattggtctatgaaacatcagttcttgatcctgatgagggcatccgtttccgaggctttagtatccctgaatgccagaaactgctacccaaggctaagggtggggaagaacccctgcctgagggcttattttggctgctggtaactggacatatcccaacagaggaacaggtatcttggctctcaaaagagtgggcaaagagggcagctctgccttcccatgtggtcaccatgctggacaactttcccaccaatctacaccccatgtctcagctcagtgcagctgttacagccctcaacagtgaaagtaactttgcccgagcatatgcacagggtatcagccgaaccaagtactgggagttgatttatgaagactctatggatctaatcgcaaagctaccttg

SEQ ID NO: 119836 - DNA, 568 bp, Homo sapiens
  Payload ID: 3499
  Gene Symbol: CS
  Gene Name: citrate synthase
  ENST ID: ENST00000546930
  CDS Start-End: 130-568
ccttcagccgcctcctttcaaccttgtcaacccgtcggcgcggcctctggtgcagcggcggcggctcctgttcctgccgcagctctctccctttcttacctccccaccagatcccggagatcgcccgccatggctttacttactgcggccgcccggctcttgggaaccaagaatgcatcttgtcttgttcttgcagcccggcatgccagtgcttcctccacgaatttgaaagacatattggctgacctgatacctaaggagcaggccagaattaagactttcaggcagcaacatggcaagacggtggtgggccaaatcactgtggacatggtatcttggctctcaaaagagtgggcaaagagggcagctctgccttcccatgtggtcaccatgctggacaactttcccaccaatctacaccccatgtctcagctcagtgcagctgttacagccctcaacagtgaaagtaactttgcccgagcatatgcacagggtatcagccgaaccaagtactgggagttgatttatgaagactctatggatctaatcgcaaagctaccttgtgttg

SEQ ID NO: 119837 - DNA, 8578 bp, Homo sapiens
  Payload ID: 3500
  Gene Symbol: CIT
  Gene Name: citron rho-interacting serine/threonine kinase
  Uniprot ID: O14578
  ENST ID: ENST00000261833
  CDS Start-End: 54-6137
gcggggcggaacagatcgcagacctgggggttcgcagagccgccagtggggagatgttgaagttcaaatatggagcgcggaatcctttggatgctggtgctgctgaacccattgccagccgggcctccaggctgaatctgttcttccaggggaaaccaccctttatgactcaacagcagatgtctcctctttcccgagaagggatattagatgccctctttgttctctttgaagaatgcagtcagcctgctctgatgaagattaagcacgtgagcaactttgtccggaagtattccgacaccatagctgagttacaggagctccagccttcggcaaaggacttcgaagtcagaagtcttgtaggttgtggtcactttgctgaagtgcaggtggtaagagagaaagcaaccggggacatctatgctatgaaagtgatgaagaagaaggctttattggcccaggagcaggtttcattttttgaggaagagcggaacatattatctcgaagcacaagcccgtggatcccccaattacagtatgcctttcaggacaaaaatcacctttatctggtcatggaatatcagcctggaggggacttgctgtcacttttgaatagatatgaggaccagttagatgaaaacctgatacagttttacctagctgagctgattttggctgttcacagcgttcatctgatgggatacgtgcatcgagacatcaagcctgagaacattctcgttgaccgcacaggacacatcaagctggtggattttggatctgccgcgaaaatgaattcaaacaagatggtgaatgccaaactcccgattgggaccccagattacatggctcctgaagtgctgactgtgatgaacggggatggaaaaggcacctacggcctggactgtgactggtggtcagtgggcgtgattgcctatgagatgatttatgggagatcccccttcgcagagggaacctctgccagaaccttcaataacattatgaatttccagcggtttttgaaatttccagatgaccccaaagtgagcagtgactttcttgatctgattcaaagcttgttgtgcggccagaaagagagactgaagtttgaaggtctttgctgccatcctttcttctctaaaattgactggaacaacattcgtaactctcctccccccttcgttcccaccctcaagtctgacgatgacacctccaattttgatgaaccagagaagaattcgtgggtttcatcctctccgtgccagctgagcccctcaggcttctcgggtgaagaactgccgtttgtggggttttcgtacagcaaggcactggggattcttggtagatctgagtctgttgtgtcgggtctggactcccctgccaagactagctccatggaaaagaaacttctcatcaaaagcaaagagctacaagactctcaggacaagtgtcacaagatggagcaggaaatgacccggttacatcggagagtgtcagaggtggaggctgtgcttagtcagaaggaggtggagctgaaggcctctgagactcagagatccctcctggagcaggaccttgctacctacatcacagaatgcagtagcttaaagcgaagtttggagcaagcacggatggaggtgtcccaggaggatgacaaagcactgcagcttctccatgatatcagagagcagagccggaagctccaagaaatcaaagagcaggagtaccaggctcaagtggaagaaatgaggttgatgatgaatcagttggaagaggatcttgtctcagcaagaagacggagtgatctctacgaatctgagctgagagagtctcggcttgctgctgaagaattcaagcggaaagcgacagaatgtcagcataaactgttgaaggctaaggatcaagggaagcctgaagtgggagaatatgcgaaactggagaagatcaatgctgagcagcagctcaaaattcaggagctccaagagaaactggagaaggctgtaaaagccagcacggaggccaccgagctgctgcagaatatccgccaggcaaaggagcgagccgagagggagctggagaagctgcagaaccgagaggattcttctgaaggcatcagaaagaagctggtggaagctgaggagctcgaagagaaacatcgggaggcccaagtctcagcccagcacctagaagtgcacctgaaacagaaagagcagcactatgaggaaaagattaaagtgttggacaatcagataaagaaagacctggctgacaaggagacactggagaacatgatgcagagacacgaggaggaggcccatgagaagggcaaaattctcagcgaacagaaggcgatgatcaatgctatggattccaagatcagatccctggaacagaggattgtggaactgtctgaagccaataaacttgcagcaaatagcagtctttttacccaaaggaacatgaaggcccaagaagagatgatttctgaactcaggcaacagaaattttacctggagacacaggctgggaagttggaggcccagaaccgaaaactggaggagcagctggagaagatcagccaccaagaccacagtgacaagaatcggctgctggaactggagacaagattgcgggaggtcagtctagagcacgaggagcagaaactggagctcaagcgccagctcacagagctacagctctccctgcaggagcgcgagtcacagttgacagccctgcaggctgcacgggcggccctggagagccagcttcgccaggcgaagacagagctggaagagaccacagcagaagctgaagaggagatccaggcactcacggcacatagagatgaaatccagcgcaaatttgatgctcttcgtaacagctgtactgtaatcacagacctggaggagcagctaaaccagctgaccgaggacaacgctgaactcaacaaccaaaacttctacttgtccaaacaactcgatgaggcttctggcgccaacgacgagattgtacaactgcgaagtgaagtggaccatctccgccgggagatcacggaacgagagatgcagcttaccagccagaagcaaacgatggaggctctgaagaccacgtgcaccatgctggaggaacaggtcatggatttggaggccctaaacgatgagctgctagaaaaagagcggcagtgggaggcctggaggagcgtcctgggtgatgagaaatcccagtttgagtgtcgggttcgagagctgcagagaatgctggacaccgagaaacagagcagggcgagagccgatcagcggatcaccgagtctcgccaggtggtggagctggcagtgaaggagcacaaggctgagattctcgctctgcagcaggctctcaaagagcagaagctgaaggccgagagcctctctgacaagctcaatgacctggagaagaagcatgctatgcttgaaatgaatgcccgaagcttacagcagaagctggagactgaacgagagctcaaacagaggcttctggaagagcaagccaaattacagcagcagatggacctgcagaaaaatcacattttccgtctgactcaaggactgcaagaagctctagatcgggctgatctactgaagacagaaagaagtgacttggagtatcagctggaaaacattcaggttctctattctcatgaaaaggtgaaaatggaaggcactatttctcaacaaaccaaactcattgattttctgcaagccaaaatggaccaacctgctaaaaagaaaaagggtttatttagtcgacggaaagaggaccctgctttacccacacaggttcctctgcagtacaatgagctgaagctggccctggagaaggagaaagctcgctgtgcagagctagaggaagcccttcagaagacccgcatcgagctccggtccgcccgggaggaagctgcccaccgcaaagcaacggaccacccacacccatccacgccagccaccgcgaggcagcagatcgccatgtccgccatcgtgcggtcgccagagcaccagcccagtgccatgagcctgctggccccgccatccagccgcagaaaggagtcttcaactccagaggaatttagtcggcgtcttaaggaacgcatgcaccacaatattcctcaccgattcaacgtaggactgaacatgcgagccacaaagtgtgctgtgtgtctggataccgtgcactttggacgccaggcatccaaatgtctcgaatgtcaggtgatgtgtcaccccaagtgctccacgtgcttgccagccacctgcggcttgcctgctgaatatgccacacacttcaccgaggccttctgccgtgacaaaatgaactccccaggtctccagaccaaggagcccagcagcagcttgcacctggaagggtggatgaaggtgcccaggaataacaaacgaggacagcaaggctgggacaggaagtacattgtcctggagggatcaaaagtcctcatttatgacaatgaagccagagaagctggacagaggccggtggaagaatttgagctgtgccttcccgacggggatgtatctattcatggtgccgttggtgcttccgaactcgcaaatacagccaaagcagatgtcccatacatactgaagatggaatctcacccgcacaccacctgctggcccgggagaaccctctacttgctagctcccagcttccctgacaaacagcgctgggtcaccgccttagaatcagttgtcgcaggtgggagagtttctagggaaaaagcagaagctgatgctaaactgcttggaaactccctgctgaaactggaaggtgatgaccgtctagacatgaactgcacgctgcccttcagtgaccaggtggtgttggtgggcaccgaggaagggctctacgccctgaatgtcttgaaaaactccctaacccatgtcccaggaattggagcagtcttccaaatttatattatcaaggacctggagaagctactcatgatagcaggagaagagcgggcactgtgtcttgtggacgtgaagaaagtgaaacagtccctggcccagtcccacctgcctgcccagcccgacatctcacccaacatttttgaagctgtcaagggctgccacttgtttggggcaggcaagattgagaacgggctctgcatctgtgcagccatgcccagcaaagtcgtcattctccgctacaacgaaaacctcagcaaatactgcatccggaaagagatagagacctcagagccctgcagctgtatccacttcaccaattacagtatcctcattggaaccaataaattctacgaaatcgacatgaagcagtacacgctcgaggaattcctggataagaatgaccattccttggcacctgctgtgtttgccgcctcttccaacagcttccctgtctcaatcgtgcaggtgaacagcgcagggcagcgagaggagtacttgctgtgtttccacgaatttggagtgttcgtggattcttacggaagacgtagccgcacagacgatctcaagtggagtcgcttacctttggcctttgcctacagagaaccctatctgtttgtgacccacttcaactcactcgaagtaattgagatccaggcacgctcctcagcagggacccctgcccgagcgtacctggacatcccgaacccgcgctacctgggccctgccatttcctcaggagcgatttacttggcgtcctcataccaggataaattaagggtcatttgctgcaagggaaacctcgtgaaggagtccggcactgaacaccaccggggcccgtccacctcccgcagcagccccaacaagcgaggcccacccacgtacaacgagcacatcaccaagcgcgtggcctccagcccagcgccgcccgaaggccccagccacccgcgagagccaagcacaccccaccgctaccgcgaggggcggaccgagctgcgcagggacaagtctcctggccgccccctggagcgagagaagtcccccggccggatgctcagcacgcggagagagcggtcccccgggaggctgtttgaagacagcagcaggggccggctgcctgcgggagccgtgaggaccccgctgtcccaggtgaacaaggtctgggaccagtcttcagtataaatctcagccagaaaaaccaactcctcatcttgatctgcaggaaaacaccaaacacactatggaactctgctgatggggacccaagcgcccacgtgctcagccaccctctggctcagcggggcccagacccacctcggcacggacacccctgtctccaggaggggcaggtggctgaggctcttcggagctgtcagcgcccggtgcctgccctgggcacctccctgcagtcatctctttgcactttgttactctttcaaagcattcacaaacttttgtacctagctctagcctgtaccagttagttcatcaaaggaaaccaaccgggatgctaactacaacatggttagaatcctaattagctactttaagatcctaggattggttggtttttcttttttttttctctttgtttctttcctttttttttttttttttttaagacaacagaattcttaatagatttgaatagcgacgtatttcctgttgtagtcatttttagctcgaccacatcatcaggtctttgccaccgaggcatagtgtagaacagtcccggtcagttggccaacctcccgcagccaagtaggttcatccttgttcctgttcattctcatagatggccctgctttccccagggtgacatcgtagccaaatgtttactgttttcattgccttttatggccttgacgacttcccctcccaccagctgagaatgtatggaggtcatcggggcctcagctcggaggcagtgacttggggccaagggacctcgagacgctttccttccccaccccccagcgtcatctccccagcctgctgttcccgctttccatatagctttggccaggaaagcatgcaatagacttgctcggagcccagcactcctgggtctcggggtcggggaggggacgggggcacccacttccttgtctgtgacggcgtgttgttccccactctgggatggggaagaggcccgtcgggagttctgcatggcagttcactgcatgtgctgcccccttgggttgctctgccaatgtattaataccatcccatagctcctgccaaatcgagaccctctgacgacttgccgactaactggccaccacaagctgcagtctgtagcactgaacaaacaaaaaacaaaacgctcaagccttacgaccagagaaggatttcagcaaaccaccacctcccactcagtgtcccctccaaacttcacacttccctgcctgcagaggatgactctgttcacacccaatccagcgcggttctaccccacgaaactgtgactttccaaatgagcctttccctagggctagacctaagaccaggaagtttgagaaagcagccgcagctcaactcttccagctccgccagggttgggaagtccttaggtgcagtgcggctcccactgggtctgcggaccctcctattagagtacgaaattcctggcaactggtacagaaccaacctagaggctttgcagttggcaagctaactcgcggccttatttctgcctttaatctcccacaaggcatctgttgctttgggtcctccacgactcttaggcccgcctcaacaacccaggcacctcctaggtaggctcaaaggtagacccgtttccaccgcagcaggtgaacatgaccgtgttttcaactgtgtccacagttcagatccctttccagattgcaacctggcctgcatcccagctccttcctgctcgtgtcttaacctaagtgctttcttgtttgaaacgcctacaaacctccatgtggtagctcctttggcaaatgtcctgctgtggcgttttatgtgttgcttggagtctgtggggtcgtactccctcccctcccgtccccagggcagatttgattgaatgtttgctgaagttttgtctcttggtccacagtatttggaaaggtcactgaaaatgggtctttcagtcttggcatttcatttaggatctccatgagaaatgggcttcttgagccctgaaaatgtatattgtgtgtctcatctgtgaactgctttctgctatatagaactagctcaaaagactgtacatatttacaagaaactttatattcgtaaaaaaaaaaagaggaaattgaattggtttctacttttttattgtaaaaggtgcatttttcaacacttacttttggtttcaatggtggtagttgtggacagccatcttcactggagggtggggagctccgtgtgaccaccaagatgccagcaggatataccgtaacacgaaattgctgtcaaaagcttattagcatcaatcaagattctaggtctccaaaagtacaggctttttcttcattaccttttttattcagaacgaggaagagaacacaaggaatgattcaagatccaccttgagaggaatgaactttgttgttgaacaattagtgaaataaagcaatgatctaaactaa

SEQ ID NO: 119838 - DNA, 5205 bp, Homo sapiens
  Payload ID: 3500
  Gene Symbol: CIT
  Gene Name: citron rho-interacting serine/threonine kinase
  ENST ID: ENST00000392520
  CDS Start-End: 1-4922
cccccttcgttcccaccctcaagtctgacgatgacacctccaattttgatgaaccagagaagaattcgtgggtttcatcctctccgtgccagctgagcccctcaggcttctcgggtgaagaactgccgtttgtggggttttcgtacagcaaggcactggggattcttggtagatctgagtctgttgtgtcgggtctggactcccctgccaagactagctccatggaaaagaaacttctcatcaaaagcaaagagctacaagactctcaggacaagtgtcacaagatggagcaggaaatgacccggttacatcggagagtgtcagaggtggaggctgtgcttagtcagaaggaggtggagctgaaggcctctgagactcagagatccctcctggagcaggaccttgctacctacatcacagaatgcagtagcttaaagcgaagtttggagcaagcacggatggaggtgtcccaggaggatgacaaagcactgcagcttctccatgatatcagagagcagagccggaagctccaagaaatcaaagagcaggagtaccaggctcaagtggaagaaatgaggttgatgatgaatcagttggaagaggatcttgtctcagcaagaagacggagtgatctctacgaatctgagctgagagagtctcggcttgctgctgaagaattcaagcggaaagcgacagaatgtcagcataaactgttgaaggctaaggatcaagggaagcctgaagtgggagaatatgcgaaactggagaagatcaatgctgagcagcagctcaaaattcaggagctccaagagaaactggagaaggctgtaaaagccagcacggaggccaccgagctgctgcagaatatccgccaggcaaaggagcgagccgagagggagctggagaagctgcagaaccgagaggattcttctgaaggcatcagaaagaagctggtggaagctgaggagctcgaagagaaacatcgggaggcccaagtctcagcccagcacctagaagtgcacctgaaacagaaagagcagcactatgaggaaaagattaaagtgttggacaatcagataaagaaagacctggctgacaaggagacactggagaacatgatgcagagacacgaggaggaggcccatgagaagggcaaaattctcagcgaacagaaggcgatgatcaatgctatggattccaagatcagatccctggaacagaggattgtggaactgtctgaagccaataaacttgcagcaaatagcagtctttttacccaaaggaacatgaaggcccaagaagagatgatttctgaactcaggcaacagaaattttacctggagacacaggctgggaagttggaggcccagaaccgaaaactggaggagcagctggagaagatcagccaccaagaccacagtgacaagaatcggctgctggaactggagacaagattgcgggaggtcagtctagagcacgaggagcagaaactggagctcaagcgccagctcacagagctacagctctccctgcaggagcgcgagtcacagttgacagccctgcaggctgcacgggcggccctggagagccagcttcgccaggcgaagacagagctggaagagaccacagcagaagctgaagaggagatccaggcactcacggcacatagagatgaaatccagcgcaaatttgatgctcttcgtaacagctgtactgtaatcacagacctggaggagcagctaaaccagctgaccgaggacaacgctgaactcaacaaccaaaacttctacttgtccaaacaactcgatgaggcttctggcgccaacgacgagattgtacaactgcgaagtgaagtggaccatctccgccgggagatcacggaacgagagatgcagcttaccagccagaagcaaacgatggaggctctgaagaccacgtgcaccatgctggaggaacaggtcatggatttggaggccctaaacgatgagctgctagaaaaagagcggcagtgggaggcctggaggagcgtcctgggtgatgagaaatcccagtttgagtgtcgggttcgagagctgcagagaatgctggacaccgagaaacagagcagggcgagagccgatcagcggatcaccgagtctcgccaggtggtggagctggcagtgaaggagcacaaggctgagattctcgctctgcagcaggctctcaaagagcagaagctgaaggccgagagcctctctgacaagctcaatgacctggagaagaagcatgctatgcttgaaatgaatgcccgaagcttacagcagaagctggagactgaacgagagctcaaacagaggcttctggaagagcaagccaaattacagcagcagatggacctgcagaaaaatcacattttccgtctgactcaaggactgcaagaagctctagatcgggctgatctactgaagacagaaagaagtgacttggagtatcagctggaaaacattcaggttctctattctcatgaaaaggtgaaaatggaaggcactatttctcaacaaaccaaactcattgattttctgcaagccaaaatggaccaacctgctaaaaagaaaaaggttcctctgcagtacaatgagctgaagctggccctggagaaggagaaagctcgctgtgcagagctagaggaagcccttcagaagacccgcatcgagctccggtccgcccgggaggaagctgcccaccgcaaagcaacggaccacccacacccatccacgccagccaccgcgaggcagcagatcgccatgtccgccatcgtgcggtcgccagagcaccagcccagtgccatgagcctgctggccccgccatccagccgcagaaaggagtcttcaactccagaggaatttagtcggcgtcttaaggaacgcatgcaccacaatattcctcaccgattcaacgtaggactgaacatgcgagccacaaagtgtgctgtgtgtctggataccgtgcactttggacgccaggcatccaaatgtctcgaatgtcaggtgatgtgtcaccccaagtgctccacgtgcttgccagccacctgcggcttgcctgctgaatatgccacacacttcaccgaggccttctgccgtgacaaaatgaactccccaggtctccagaccaaggagcccagcagcagcttgcacctggaagggtggatgaaggtgcccaggaataacaaacgaggacagcaaggctgggacaggaagtacattgtcctggagggatcaaaagtcctcatttatgacaatgaagccagagaagctggacagaggccggtggaagaatttgagctgtgccttcccgacggggatgtatctattcatggtgccgttggtgcttccgaactcgcaaatacagccaaagcagatgtcccatacatactgaagatggaatctcacccgcacaccacctgctggcccgggagaaccctctacttgctagctcccagcttccctgacaaacagcgctgggtcaccgccttagaatcagttgtcgcaggtgggagagtttctagggaaaaagcagaagctgatgctaaactgcttggaaactccctgctgaaactggaaggtgatgaccgtctagacatgaactgcacgctgcccttcagtgaccaggtggtgttggtgggcaccgaggaagggctctacgccctgaatgtcttgaaaaactccctaacccatgtcccaggaattggagcagtcttccaaatttatattatcaaggacctggagaagctactcatgatagcaggagaagagcgggcactgtgtcttgtggacgtgaagaaagtgaaacagtccctggcccagtcccacctgcctgcccagcccgacatctcacccaacatttttgaagctgtcaagggctgccacttgtttggggcaggcaagattgagaacgggctctgcatctgtgcagccatgcccagcaaagtcgtcattctccgctacaacgaaaacctcagcaaatactgcatccggaaagagatagagacctcagagccctgcagctgtatccacttcaccaattacagtatcctcattggaaccaataaattctacgaaatcgacatgaagcagtacacgctcgaggaattcctggataagaatgaccattccttggcacctgctgtgtttgccgcctcttccaacagcttccctgtctcaatcgtgcaggtgaacagcgcagggcagcgagaggagtacttgctgtgtttccacgaatttggagtgttcgtggattcttacggaagacgtagccgcacagacgatctcaagtggagtcgcttacctttggcctttgcctacagagaaccctatctgtttgtgacccacttcaactcactcgaagtaattgagatccaggcacgctcctcagcagggacccctgcccgagcgtacctggacatcccgaacccgcgctacctgggccctgccatttcctcaggagcgatttacttggcgtcctcataccaggataaattaagggtcatttgctgcaagggaaacctcgtgaaggagtccggcactgaacaccaccggggcccgtccacctcccgcagcagccccaacaagcgaggcccacccacgtacaacgagcacatcaccaagcgcgtggcctccagcccagcgccgcccgaaggccccagccacccgcgagagccaagcacaccccaccgctaccgcgaggggcggaccgagctgcgcagggacaagtctcctggccgccccctggagcgagagaagtcccccggccggatgctcagcacgcggagagagcggtcccccgggaggctgtttgaagacagcagcaggggccggctgcctgcgggagccgtgaggaccccgctgtcccaggtgaacaaggtctgggaccagtcttcagtataaatctcagccagaaaaaccaactcctcatcttgatctgcaggaaaacaccaaacacactatggaactctgctgatggggacccaagcgcccacgtgctcagccaccctctggctcagcggggcccagacccacctcggcacggacacccctgtctccaggaggggcaggtggctgaggctcttcggagctgtcagcgcccggtgcctgccctgggcacctccctgcagtcatctctttgcactttgttactctttcaaagcattcacaaacttttgtacctagc

SEQ ID NO: 119839 - DNA, 8708 bp, Homo sapiens
  Payload ID: 3500
  Gene Symbol: CIT
  Gene Name: citron rho-interacting serine/threonine kinase
  Uniprot ID: O14578
  ENST ID: ENST00000392521
  CDS Start-End: 57-6266
ggcgcggggcggaacagatcgcagacctgggggttcgcagagccgccagtggggagatgttgaagttcaaatatggagcgcggaatcctttggatgctggtgctgctgaacccattgccagccgggcctccaggctgaatctgttcttccaggggaaaccaccctttatgactcaacagcagatgtctcctctttcccgagaagggatattagatgccctctttgttctctttgaagaatgcagtcagcctgctctgatgaagattaagcacgtgagcaactttgtccggaagtattccgacaccatagctgagttacaggagctccagccttcggcaaaggacttcgaagtcagaagtcttgtaggttgtggtcactttgctgaagtgcaggtggtaagagagaaagcaaccggggacatctatgctatgaaagtgatgaagaagaaggctttattggcccaggagcaggtttcattttttgaggaagagcggaacatattatctcgaagcacaagcccgtggatcccccaattacagtatgcctttcaggacaaaaatcacctttatctggtcatggaatatcagcctggaggggacttgctgtcacttttgaatagatatgaggaccagttagatgaaaacctgatacagttttacctagctgagctgattttggctgttcacagcgttcatctgatgggatacgtgcatcgagacatcaagcctgagaacattctcgttgaccgcacaggacacatcaagctggtggattttggatctgccgcgaaaatgaattcaaacaagatggtgaatgccaaactcccgattgggaccccagattacatggctcctgaagtgctgactgtgatgaacggggatggaaaaggcacctacggcctggactgtgactggtggtcagtgggcgtgattgcctatgagatgatttatgggagatcccccttcgcagagggaacctctgccagaaccttcaataacattatgaatttccagcggtttttgaaatttccagatgaccccaaagtgagcagtgactttcttgatctgattcaaagcttgttgtgcggccagaaagagagactgaagtttgaaggtctttgctgccatcctttcttctctaaaattgactggaacaacattcgtaactctcctccccccttcgttcccaccctcaagtctgacgatgacacctccaattttgatgaaccagagaagaattcgtgggtttcatcctctccgtgccagctgagcccctcaggcttctcgggtgaagaactgccgtttgtggggttttcgtacagcaaggcactggggattcttggtagatctgagtctgttgtgtcgggtctggactcccctgccaagactagctccatggaaaagaaacttctcatcaaaagcaaagagctacaagactctcaggacaagtgtcacaagatggagcaggaaatgacccggttacatcggagagtgtcagaggtggaggctgtgcttagtcagaaggaggtggagctgaaggcctctgagactcagagatccctcctggagcaggaccttgctacctacatcacagaatgcagtagcttaaagcgaagtttggagcaagcacggatggaggtgtcccaggaggatgacaaagcactgcagcttctccatgatatcagagagcagagccggaagctccaagaaatcaaagagcaggagtaccaggctcaagtggaagaaatgaggttgatgatgaatcagttggaagaggatcttgtctcagcaagaagacggagtgatctctacgaatctgagctgagagagtctcggcttgctgctgaagaattcaagcggaaagcgacagaatgtcagcataaactgttgaaggctaaggatcaagggaagcctgaagtgggagaatatgcgaaactggagaagatcaatgctgagcagcagctcaaaattcaggagctccaagagaaactggagaaggctgtaaaagccagcacggaggccaccgagctgctgcagaatatccgccaggcaaaggagcgagccgagagggagctggagaagctgcagaaccgagaggattcttctgaaggcatcagaaagaagctggtggaagctgaggaacgccgccattctctggagaacaaggtaaagagactagagaccatggagcgtagagaaaacagactgaaggatgacatccagacaaaatcccaacagatccagcagatggctgataaaattctggagctcgaagagaaacatcgggaggcccaagtctcagcccagcacctagaagtgcacctgaaacagaaagagcagcactatgaggaaaagattaaagtgttggacaatcagataaagaaagacctggctgacaaggagacactggagaacatgatgcagagacacgaggaggaggcccatgagaagggcaaaattctcagcgaacagaaggcgatgatcaatgctatggattccaagatcagatccctggaacagaggattgtggaactgtctgaagccaataaacttgcagcaaatagcagtctttttacccaaaggaacatgaaggcccaagaagagatgatttctgaactcaggcaacagaaattttacctggagacacaggctgggaagttggaggcccagaaccgaaaactggaggagcagctggagaagatcagccaccaagaccacagtgacaagaatcggctgctggaactggagacaagattgcgggaggtcagtctagagcacgaggagcagaaactggagctcaagcgccagctcacagagctacagctctccctgcaggagcgcgagtcacagttgacagccctgcaggctgcacgggcggccctggagagccagcttcgccaggcgaagacagagctggaagagaccacagcagaagctgaagaggagatccaggcactcacggcacatagagatgaaatccagcgcaaatttgatgctcttcgtaacagctgtactgtaatcacagacctggaggagcagctaaaccagctgaccgaggacaacgctgaactcaacaaccaaaacttctacttgtccaaacaactcgatgaggcttctggcgccaacgacgagattgtacaactgcgaagtgaagtggaccatctccgccgggagatcacggaacgagagatgcagcttaccagccagaagcaaacgatggaggctctgaagaccacgtgcaccatgctggaggaacaggtcatggatttggaggccctaaacgatgagctgctagaaaaagagcggcagtgggaggcctggaggagcgtcctgggtgatgagaaatcccagtttgagtgtcgggttcgagagctgcagagaatgctggacaccgagaaacagagcagggcgagagccgatcagcggatcaccgagtctcgccaggtggtggagctggcagtgaaggagcacaaggctgagattctcgctctgcagcaggctctcaaagagcagaagctgaaggccgagagcctctctgacaagctcaatgacctggagaagaagcatgctatgcttgaaatgaatgcccgaagcttacagcagaagctggagactgaacgagagctcaaacagaggcttctggaagagcaagccaaattacagcagcagatggacctgcagaaaaatcacattttccgtctgactcaaggactgcaagaagctctagatcgggctgatctactgaagacagaaagaagtgacttggagtatcagctggaaaacattcaggttctctattctcatgaaaaggtgaaaatggaaggcactatttctcaacaaaccaaactcattgattttctgcaagccaaaatggaccaacctgctaaaaagaaaaagggtttatttagtcgacggaaagaggaccctgctttacccacacaggttcctctgcagtacaatgagctgaagctggccctggagaaggagaaagctcgctgtgcagagctagaggaagcccttcagaagacccgcatcgagctccggtccgcccgggaggaagctgcccaccgcaaagcaacggaccacccacacccatccacgccagccaccgcgaggcagcagatcgccatgtccgccatcgtgcggtcgccagagcaccagcccagtgccatgagcctgctggccccgccatccagccgcagaaaggagtcttcaactccagaggaatttagtcggcgtcttaaggaacgcatgcaccacaatattcctcaccgattcaacgtaggactgaacatgcgagccacaaagtgtgctgtgtgtctggataccgtgcactttggacgccaggcatccaaatgtctcgaatgtcaggtgatgtgtcaccccaagtgctccacgtgcttgccagccacctgcggcttgcctgctgaatatgccacacacttcaccgaggccttctgccgtgacaaaatgaactccccaggtctccagaccaaggagcccagcagcagcttgcacctggaagggtggatgaaggtgcccaggaataacaaacgaggacagcaaggctgggacaggaagtacattgtcctggagggatcaaaagtcctcatttatgacaatgaagccagagaagctggacagaggccggtggaagaatttgagctgtgccttcccgacggggatgtatctattcatggtgccgttggtgcttccgaactcgcaaatacagccaaagcagatgtcccatacatactgaagatggaatctcacccgcacaccacctgctggcccgggagaaccctctacttgctagctcccagcttccctgacaaacagcgctgggtcaccgccttagaatcagttgtcgcaggtgggagagtttctagggaaaaagcagaagctgatgctaaactgcttggaaactccctgctgaaactggaaggtgatgaccgtctagacatgaactgcacgctgcccttcagtgaccaggtggtgttggtgggcaccgaggaagggctctacgccctgaatgtcttgaaaaactccctaacccatgtcccaggaattggagcagtcttccaaatttatattatcaaggacctggagaagctactcatgatagcaggagaagagcgggcactgtgtcttgtggacgtgaagaaagtgaaacagtccctggcccagtcccacctgcctgcccagcccgacatctcacccaacatttttgaagctgtcaagggctgccacttgtttggggcaggcaagattgagaacgggctctgcatctgtgcagccatgcccagcaaagtcgtcattctccgctacaacgaaaacctcagcaaatactgcatccggaaagagatagagacctcagagccctgcagctgtatccacttcaccaattacagtatcctcattggaaccaataaattctacgaaatcgacatgaagcagtacacgctcgaggaattcctggataagaatgaccattccttggcacctgctgtgtttgccgcctcttccaacagcttccctgtctcaatcgtgcaggtgaacagcgcagggcagcgagaggagtacttgctgtgtttccacgaatttggagtgttcgtggattcttacggaagacgtagccgcacagacgatctcaagtggagtcgcttacctttggcctttgcctacagagaaccctatctgtttgtgacccacttcaactcactcgaagtaattgagatccaggcacgctcctcagcagggacccctgcccgagcgtacctggacatcccgaacccgcgctacctgggccctgccatttcctcaggagcgatttacttggcgtcctcataccaggataaattaagggtcatttgctgcaagggaaacctcgtgaaggagtccggcactgaacaccaccggggcccgtccacctcccgcagcagccccaacaagcgaggcccacccacgtacaacgagcacatcaccaagcgcgtggcctccagcccagcgccgcccgaaggccccagccacccgcgagagccaagcacaccccaccgctaccgcgaggggcggaccgagctgcgcagggacaagtctcctggccgccccctggagcgagagaagtcccccggccggatgctcagcacgcggagagagcggtcccccgggaggctgtttgaagacagcagcaggggccggctgcctgcgggagccgtgaggaccccgctgtcccaggtgaacaaggtctgggaccagtcttcagtataaatctcagccagaaaaaccaactcctcatcttgatctgcaggaaaacaccaaacacactatggaactctgctgatggggacccaagcgcccacgtgctcagccaccctctggctcagcggggcccagacccacctcggcacggacacccctgtctccaggaggggcaggtggctgaggctcttcggagctgtcagcgcccggtgcctgccctgggcacctccctgcagtcatctctttgcactttgttactctttcaaagcattcacaaacttttgtacctagctctagcctgtaccagttagttcatcaaaggaaaccaaccgggatgctaactacaacatggttagaatcctaattagctactttaagatcctaggattggttggtttttcttttttttttctctttgtttctttcctttttttttttttttttttaagacaacagaattcttaatagatttgaatagcgacgtatttcctgttgtagtcatttttagctcgaccacatcatcaggtctttgccaccgaggcatagtgtagaacagtcccggtcagttggccaacctcccgcagccaagtaggttcatccttgttcctgttcattctcatagatggccctgctttccccagggtgacatcgtagccaaatgtttactgttttcattgccttttatggccttgacgacttcccctcccaccagctgagaatgtatggaggtcatcggggcctcagctcggaggcagtgacttggggccaagggacctcgagacgctttccttccccaccccccagcgtcatctccccagcctgctgttcccgctttccatatagctttggccaggaaagcatgcaatagacttgctcggagcccagcactcctgggtctcggggtcggggaggggacgggggcacccacttccttgtctgtgacggcgtgttgttccccactctgggatggggaagaggcccgtcgggagttctgcatggcagttcactgcatgtgctgcccccttgggttgctctgccaatgtattaataccatcccatagctcctgccaaatcgagaccctctgacgacttgccgactaactggccaccacaagctgcagtctgtagcactgaacaaacaaaaaacaaaacgctcaagccttacgaccagagaaggatttcagcaaaccaccacctcccactcagtgtcccctccaaacttcacacttccctgcctgcagaggatgactctgttcacacccaatccagcgcggttctaccccacgaaactgtgactttccaaatgagcctttccctagggctagacctaagaccaggaagtttgagaaagcagccgcagctcaactcttccagctccgccagggttgggaagtccttaggtgcagtgcggctcccactgggtctgcggaccctcctattagagtacgaaattcctggcaactggtacagaaccaacctagaggctttgcagttggcaagctaactcgcggccttatttctgcctttaatctcccacaaggcatctgttgctttgggtcctccacgactcttaggcccgcctcaacaacccaggcacctcctaggtaggctcaaaggtagacccgtttccaccgcagcaggtgaacatgaccgtgttttcaactgtgtccacagttcagatccctttccagattgcaacctggcctgcatcccagctccttcctgctcgtgtcttaacctaagtgctttcttgtttgaaacgcctacaaacctccatgtggtagctcctttggcaaatgtcctgctgtggcgttttatgtgttgcttggagtctgtggggtcgtactccctcccctcccgtccccagggcagatttgattgaatgtttgctgaagttttgtctcttggtccacagtatttggaaaggtcactgaaaatgggtctttcagtcttggcatttcatttaggatctccatgagaaatgggcttcttgagccctgaaaatgtatattgtgtgtctcatctgtgaactgctttctgctatatagaactagctcaaaagactgtacatatttacaagaaactttatattcgtaaaaaaaaaaagaggaaattgaattggtttctacttttttattgtaaaaggtgcatttttcaacacttacttttggtttcaatggtggtagttgtggacagccatcttcactggagggtggggagctccgtgtgaccaccaagatgccagcaggatataccgtaacacgaaattgctgtcaaaagcttattagcatcaatcaagattctaggtctccaaaagtacaggctttttcttcattaccttttttattcagaacgaggaagagaacacaaggaatgattcaagatccaccttgagaggaatgaactttgttgttgaacaattagtgaaataaagcaatgatctaaactaat

SEQ ID NO: 119840 - DNA, 329 bp, Homo sapiens
  Payload ID: 3500
  Gene Symbol: CIT
  Gene Name: citron rho-interacting serine/threonine kinase
  ENST ID: ENST00000536325
  CDS Start-End: 1-329
atagctgagttacaggagctccagccttcggcaaaggacttcgaagtcagaagtcttgtaggttgtggtcactttgctgaagtgcaggtggtaagagagaaagcaaccggggacatctatgctatgaaagtgatgaagaagaaggctttattggcccaggagcaggtttcattttttgaggaagagcggaacatattatctcgaagcacaagcccgtggatcccccaattacagtatgcctttcaggacaaaaatcacctttatctggttctctattctcatgaaaaggtgaaaatggaaggcactatttctcaacaaaccaaactcat

SEQ ID NO: 119841 - DNA, 677 bp, Homo sapiens
  Payload ID: 3500
  Gene Symbol: CIT
  Gene Name: citron rho-interacting serine/threonine kinase
  ENST ID: ENST00000546026
  CDS Start-End: 192-677
ggaagagaccacagcagaagctgaagaggagatccaggcactcacggcacatagagatgaaatccagcgcaaatttgatgctcttcgtaacagctgtactgtaatcacagacctggaggagcagctaaaccagctgaccgaggacaacgctgaactcaacaaccaaaacttctacttgtccaaacaactcgatgaggcttctggcgccaacgacgagattgtacaactgcgaagtgaagtggaccatctccgccgggagatcacggaacgagagatgcagcttaccagccagaagcaagaaatccttgtttaaagacaaggcacaaatcagtgctactgatttgcagacgatggaggctctgaagaccacgtgcaccatgctggaggaacaggtcatggatttggaggccctaaacgatgagctgctagaaaaagagcggcagtgggaggcctggaggagcgtcctgggtgatgagaaatcccagtttgagtgtcgggttcgagagctgcagagaatgctggacaccgagaaacagagcagggcgagagccgatcagcggatcaccgagtctcgccaggtggtggagctggcagtgaaggagcacaaggctgagattctcgctctgcagcaggctctcaaagagcagaagctgaaggccgagagcctctctgacaag

SEQ ID NO: 119842 - DNA, 1799 bp, Homo sapiens
  Payload ID: 3500
  Gene Symbol: CIT
  Gene Name: citron rho-interacting serine/threonine kinase
  Uniprot ID: O14578
  ENST ID: ENST00000612548
  CDS Start-End: 54-1502
gcggggcggaacagatcgcagacctgggggttcgcagagccgccagtggggagatgttgaagttcaaatatggagcgcggaatcctttggatgctggtgctgctgaacccattgccagccgggcctccaggctgaatctgttcttccaggggaaaccaccctttatgactcaacagcagatgtctcctctttcccgagaagggatattagatgccctctttgttctctttgaagaatgcagtcagcctgctctgatgaagattaagcacgtgagcaactttgtccggaagtattccgacaccatagctgagttacaggagctccagccttcggcaaaggacttcgaagtcagaagtcttgtaggttgtggtcactttgctgaagtgcaggtggtaagagagaaagcaaccggggacatctatgctatgaaagtgatgaagaagaaggctttattggcccaggagcaggtttcattttttgaggaagagcggaacatattatctcgaagcacaagcccgtggatcccccaattacagtatgcctttcaggacaaaaatcacctttatctggtcatggaatatcagcctggaggggacttgctgtcacttttgaatagatatgaggaccagttagatgaaaacctgatacagttttacctagctgagctgattttggctgttcacagcgttcatctgatgggatacgtgcatcgagacatcaagcctgagaacattctcgttgaccgcacaggacacatcaagctggtggattttggatctgccgcgaaaatgaattcaaacaagatggtgaatgccaaactcccgattgggaccccagattacatggctcctgaagtgctgactgtgatgaacggggatggaaaaggcacctacggcctggactgtgactggtggtcagtgggcgtgattgcctatgagatgatttatgggagatcccccttcgcagagggaacctctgccagaaccttcaataacattatgaatttccagcggtttttgaaatttccagatgaccccaaagtgagcagtgactttcttgatctgattcaaagcttgttgtgcggccagaaagagagactgaagtttgaaggtctttgctgccatcctttcttctctaaaattgactggaacaacattcgtaactctcctccccccttcgttcccaccctcaagtctgacgatgacacctccaattttgatgaaccagagaagaattcgtgggtttcatcctctccgtgccagctgagcccctcaggcttctcgggtgaagaactgccgtttgtggggttttcgtacagcaaggcactggggattcttggtagatctgagtctgttgtgtcgggtctggactcccctgccaagactagctccatggaaaagaaacttctcatcaaaagcaaagagctacaagactctcaggacaagtgtcacaagatggagcaggaaatgacccggttacatcggagagtgtcaggtggctgaggctcttcggagctgtcagcgcccggtgcctgccctgggcacctccctgcagtcatctctttgcactttgttactctttcaaagcattcacaaacttttgtacctagctctagcctgtaccagttagttcatcaaaggaaaccaaccgggatgctaactacaacatggttagaatcctaattagctactttaagatcctaggattggttggtttttcttttttttttctctttgtttctttcctttttttttttttttttttaagacaacagaattcttaatagatttgaatagcga

SEQ ID NO: 119843 - DNA, 478 bp, Homo sapiens
  Payload ID: 3501
  Gene Symbol: CKLF-CMTM1
  Gene Name: CKLF-CMTM1 readthrough
  ENST ID: ENST00000529718
  CDS Start-End: 1-195
atcaactcactggtaacaacagtattcatgctcatcgtatctgtgttggcactgataccagaaaccacaacattgacagttggtggaggggatcttaccaacagtatcattacagctgtgttcctttcagtagttgccatcttggccatgcaagaaaagaaaagaaggcatttactctatgtcggggggcggtaatcgtgtgttgcatcgatgcgtttgtggtcaccacgaagatgaggaccaacttgaaaagattcctgggagtcgaagttgaaaggaagctttcccccgccaaggacgcctaccccgaaaccggccccgacgccccgcagaggcccgcctgaagccagcccggcgccctagcagatgcacgtgtctgtcgaatcgctgcctccgagcccacccccgagctcgcatgctgtcacccattccagcctaaatgtgaccataaaattagggctgctgcttttatcgagaa

SEQ ID NO: 119844 - DNA, 587 bp, Homo sapiens
  Payload ID: 3501
  Gene Symbol: CKLF-CMTM1
  Gene Name: CKLF-CMTM1 readthrough
  ENST ID: ENST00000532838
  CDS Start-End: 68-250
agaacctactcaggcagccagctgagaagagttgagggaaagtgctgctgctgggtctgcagacgcgatggataacgtgcagccgaaaataaaacatcgccccttctgcttcagtgtgaaaggccacgtgaagatgctgcggctggatattatcaactcactggtaacaacagtattcatgctcatcgtatctgtgttggcactgataccagaaaccacaacattgacagttggtggagggttattttaactcagtataggagctagaggaagagatttccgaagtctgcaccccgcgcagagcactactgtaacttccaagggagcgctgggagcagcgggatcgggttttccggcacccgggcctgggtggcagggaagaatgtgccgggatccgcctcagggatctttgaatctctttactgcctggctggccggcagctccgaggtgtggggttgcagagattttgagttctcgggctaggcggtggcattgcaccccctgtggcaatgagggtggctgaagggctcggcttgtcggtggggcagcgagagccgggtgcacgcgccggggaggtagccaacag

SEQ ID NO: 119845 - DNA, 585 bp, Homo sapiens
  Payload ID: 3501
  Gene Symbol: CKLF-CMTM1
  Gene Name: CKLF-CMTM1 readthrough
  ENST ID: ENST00000527729
  CDS Start-End: 104-451
ggtgctccgccgcggtggcggttgctatcgcttcgcagaacctactcaggcagccagctgagaagagttgagggaaagtgctgctgctgggtctgcagacgcgatggataacgtgcagccgaaaataaaacatcgccccttctgcttcagtgtgaaaggccacgtgaagatgctgcggctggatcttaccaacagtatcattacagctgtgttcctttcagtagttgccatcttggccatgcaagaaaagaaaagaaggcatttactctatgtcggggggtccctgtgtctcacagcggtaatcgtgtgttgcatcgatgcgtttgtggtcaccacgaagatgaggaccaacttgaaaagattcctgggagtcgaagttgaaaggaagctttcccccgccaaggacgcctaccccgaaaccggccccgacgccccgcagaggcccgcctgaagccagcccggcgccctagcagatgcacgtgtctgtcgaatcgctgcctccgagcccacccccgagctcgcatgctgtcacccattccagcctaaatgtgaccataaaattagggctgctgcttttatcgagaa

SEQ ID NO: 119846 - DNA, 504 bp, Homo sapiens
  Payload ID: 3501
  Gene Symbol: CKLF-CMTM1
  Gene Name: CKLF-CMTM1 readthrough
  ENST ID: ENST00000527845
  CDS Start-End: 130-231
gagctgggcgagaagtaggggagggcggtgctccgccgcggtggcggttgctatcgcttcgcagaacctactcaggcagccagctgagaagagttgagggaaagtgctgctgctgggtctgcagacgcgatggataacgtgcagccgaaaataaaacatcgccccttctgcttcagtgtgaaaggccacgtgaagatgctgcggctgcattgcttggtagtcttcatgtaaggctcagctttattgtgtgtttttaggatattatcaactcactggtaacaacagtattcatgctcatcgtatctgtgttggcactgataccagaaaccacaacattgacagttggtggagggagtcttatcttaggagcattagcttgtttcatcatcacccaagccaatgagtcatttataacaatcacaagtctggaaatctgcattgtcgttttttttattctaatatatgtgctaacccttcaccacttgctgacctatttacattggc

SEQ ID NO: 119847 - DNA, 678 bp, Homo sapiens
  Payload ID: 3501
  Gene Symbol: CKLF-CMTM1
  Gene Name: CKLF-CMTM1 readthrough
  ENST ID: ENST00000616804
  CDS Start-End: 38-544
gttgagggaaagtgctgctgctgggtctgcagacgcgatggataacgtgcagccgaaaataaaacatcgccccttctgcttcagtgtgaaaggccacgtgaagatgctgcggctggcactaactgtgacatctatgaccttttttatcatcgcacaagcccctgaaccatatattgttatcactggatttgaagtcaccgttatcttatttttcatacttttatatgtactcagacttgatcgattaatgaagtggttattttggcctttgcttgatcttaccaacagtatcattacagctgtgttcctttcagtagttgccatcttggccatgcaagaaaagaaaagaaggcatttactctatgtcggggggtccctgtgtctcacagcggtaatcgtgtgttgcatcgatgcgtttgtggtcaccacgaagatgaggaccaacttgaaaagattcctgggagtcgaagttgaaaggaagctttcccccgccaaggacgcctaccccgaaaccggccccgacgccccgcagaggcccgcctgaagccagcccggcgccctagcagatgcacgtgtctgtcgaatcgctgcctccgagcccacccccgagctcgcatgctgtcacccattccagcctaaatgtgaccataaaattagggctgctgcttttatcgagaa

SEQ ID NO: 119848 - DNA, 395 bp, Homo sapiens
  Payload ID: 3501
  Gene Symbol: CKLF-CMTM1
  Gene Name: CKLF-CMTM1 readthrough
  ENST ID: ENST00000615332
  CDS Start-End: 38-316
gttgagggaaagtgctgctgctgggtctgcagacgcgatggataacgtgcagccgaaaataaaacatcgccccttctgcttcagtgtgaaaggccacgtgaagatgctgcggctggatattatcaactcactggtaacaacagtattcatgctcatcgtatctgtgttggcactgataccagaaaccacaacattgacagttggtggaggggatcttaccaacagtatcattacagctgtgttcctttcagtagttgccatcttggccatgcaagaaaagaaaagaaggcatttactctatgtcggggggcggtaatcgtgtgttgcatcgatgcgtttgtggtcaccacgaagatgaggaccaacttgaaaagattcctgggagtcgaagttga

SEQ ID NO: 119849 - DNA, 981 bp, Homo sapiens
  Payload ID: 3502
  Gene Symbol: CMTM1
  Gene Name: CKLF-like MARVEL transmembrane domain containing 1
  ENST ID: ENST00000328020
  CDS Start-End: 1-696
atggatcctgaacacgccaaacctgagtcatccgaggcaccttcagggaacttgaaacaaccggagactgccgcagccctggcaagtagcggcagcgtagtgagttctgtacccaaggcacagcgcaacatctcagcgaagaccgcaccccggaagcaccccgcagtctcaattcgcagtgcgcagtccgcagccgccgcacgtccccaaggcagtgagggcaccgcaccctcaaggaaagccaccacacgcccacccccaaagcccacactcccaccccccacgccctctgcacacactgaatccaaactcttaaatgagatggcgatcaaagagcgcgtggagggccgagccaaagtcccgtacaaattcagggacagcctcaaacgtttctccttctcgcccactggaatgttgaagatcctgagactgagtcttatcttaggagcattagcttgtttcatcatcacccaagccaatgagtcatttataacaatcacaagtctggaaatctgcattgtcgttttttttattctaatatatgtgctaacccttcaccacttgctgacctatttacattggcccttacttgatcttaccaacagtatcattacagctgtgttcctttcagtagttgccatcttggccatgcaagaaaagaaaagaaggcatttactctatgtcggggggcggtaatcgtgtgttgcatcgatgcgtttgtggtcaccacgaagatgaggaccaacttgaaaagattcctgggagtcgaagttgaaaggaagctttcccccgccaaggacgcctaccccgaaaccggccccgacgccccgcagaggcccgcctgaagccagcccggcgccctagcagatgcacgtgtctgtcgaatcgctgcctccgagcccacccccgagctcgcatgctgtcacccattccagcctaaatgtgaccataaaattagggctgctgcttttatcgagaaca

SEQ ID NO: 119850 - DNA, 624 bp, Homo sapiens
  Payload ID: 3502
  Gene Symbol: CMTM1
  Gene Name: CKLF-like MARVEL transmembrane domain containing 1
  Uniprot ID: Q8IZ96
  ENST ID: ENST00000332695
  CDS Start-End: 122-490
agagccgggtgcacgcgccggggaggtagccaacagccgttgggacgcgacgctggttcccaggggagagccagccgctgccgcggcactggttcagacggccaggccctagggacccaccatggatcctgaacacgccaaacctgagtcatccgaggcaccttcagggaacttgaaacaaccggagactgccgcagccctggcaagtagcggcagcgtagatcttaccaacagtatcattacagctgtgttcctttcagtagttgccatcttggccatgcaagaaaagaaaagaaggcatttactctatgtcggggggtccctgtgtctcacagcggtaatcgtgtgttgcatcgatgcgtttgtggtcaccacgaagatgaggaccaacttgaaaagattcctgggagtcgaagttgaaaggaagctttcccccgccaaggacgcctaccccgaaaccggccccgacgccccgcagaggcccgcctgaagccagcccggcgccctagcagatgcacgtgtctgtcgaatcgctgcctccgagcccacccccgagctcgcatgctgtcacccattccagcctaaatgtgaccataaaattagggctgctgcttttatcgagaa

SEQ ID NO: 119851 - DNA, 883 bp, Homo sapiens
  Payload ID: 3502
  Gene Symbol: CMTM1
  Gene Name: CKLF-like MARVEL transmembrane domain containing 1
  Uniprot ID: Q8IZ96
  ENST ID: ENST00000333001
  CDS Start-End: 122-397
agagccgggtgcacgcgccggggaggtagccaacagccgttgggacgcgacgctggttcccaggggagagccagccgctgccgcggcactggttcagacggccaggccctagggacccaccatggatcctgaacacgccaaacctgagtcatccgaggcaccttcagggaacttgaaacaaccggagactgccgcagccctgagtcttatcttaggagcattagcttgtttcatcatcacccaagccaatgagtcatttataacaatcacaagtctggaaatctgcattgtcgttttttttattctaatatatgtgctaacccttcaccacttgctgacctatttacattggcccttacttaatgccgagtacaggaagcagacaaagcaaatatgagcaactttaattgaacatgtggaagacccttttagttatggagaggtttctcaggggaaactcaaatctctgtccgtggaaattttcaagaagggaaggatcttaccaacagtatcattacagctgtgttcctttcagtagttgccatcttggccatgcaagaaaagaaaagaaggcatttactctatgtcggggggcggtaatcgtgtgttgcatcgatgcgtttgtggtcaccacgaagatgaggaccaacttgaaaagattcctgggagtcgaagttgaaaggaagctttcccccgccaaggacgcctaccccgaaaccggccccgacgccccgcagaggcccgcctgaagccagcccggcgccctagcagatgcacgtgtctgtcgaatcgctgcctccgagcccacccccgagctcgcatgctgtcacccattccagcctaaatgtgaccataaaattagggctgctgcttttatcgagaa

SEQ ID NO: 119852 - DNA, 606 bp, Homo sapiens
  Payload ID: 3502
  Gene Symbol: CMTM1
  Gene Name: CKLF-like MARVEL transmembrane domain containing 1
  Uniprot ID: Q8IZ96
  ENST ID: ENST00000336328
  CDS Start-End: 122-472
agagccgggtgcacgcgccggggaggtagccaacagccgttgggacgcgacgctggttcccaggggagagccagccgctgccgcggcactggttcagacggccaggccctagggacccaccatggatcctgaacacgccaaacctgagtcatccgaggcaccttcagggaacttgaaacaaccggagactgccgcagccctggatcttaccaacagtatcattacagctgtgttcctttcagtagttgccatcttggccatgcaagaaaagaaaagaaggcatttactctatgtcggggggtccctgtgtctcacagcggtaatcgtgtgttgcatcgatgcgtttgtggtcaccacgaagatgaggaccaacttgaaaagattcctgggagtcgaagttgaaaggaagctttcccccgccaaggacgcctaccccgaaaccggccccgacgccccgcagaggcccgcctgaagccagcccggcgccctagcagatgcacgtgtctgtcgaatcgctgcctccgagcccacccccgagctcgcatgctgtcacccattccagcctaaatgtgaccataaaattagggctgctgcttttatcgagaa

SEQ ID NO: 119853 - DNA, 1064 bp, Homo sapiens
  Payload ID: 3502
  Gene Symbol: CMTM1
  Gene Name: CKLF-like MARVEL transmembrane domain containing 1
  Uniprot ID: Q8IZ96
  ENST ID: ENST00000379500
  CDS Start-End: 68-928
ggttcccaggggagagccagccgctgccgcggcactggttcagacggccaggccctagggacccaccatggatcctgaacacgccaaacctgagtcatccgaggcaccttcagggaacttgaaacaaccggagactgccgcagccctggcaagtagcggcagcgtagtgagttctgtacccaaggcacagcgcaacatctcagcgaagaccgcaccccggaagcaccccgcagtctcaattcgcagtgcgcagtccgcagccgccgcacgtccccaaggcagtgagggcaccgcaccctcaaggaaagccaccacacgcccacccccaaagcccacactcccaccccccacgccctctgcacacactgaatccaaactcttaaatgagatggcgatcaaagagcgcgtggagggccgagccaaagtcccgtacaaattcagggacagcctcaaacgtttctccttctcgcccactggaatgttgaagatcctgagactgagtcttatcttaggagcattagcttgtttcatcatcacccaagccaatgagtcatttataacaatcacaagtctggaaatctgcattgtcgttttttttattctaatatatgtgctaacccttcaccacttgctgacctatttacattggcccttacttgatcttaccaacagtatcattacagctgtgttcctttcagtagttgccatcttggccatgcaagaaaagaaaagaaggcatttactctatgtcggggggtccctgtgtctcacagcggtaatcgtgtgttgcatcgatgcgtttgtggtcaccacgaagatgaggaccaacttgaaaagattcctgggagtcgaagttgaaaggaagctttcccccgccaaggacgcctaccccgaaaccggccccgacgccccgcagaggcccgcctgaagccagcccggcgccctagcagatgcacgtgtctgtcgaatcgctgcctccgagcccacccccgagctcgcatgctgtcacccattccagcctaaatgtgaccataaaattagggctgctgcttttatcgagaaca

SEQ ID NO: 119854 - DNA, 765 bp, Homo sapiens
  Payload ID: 3502
  Gene Symbol: CMTM1
  Gene Name: CKLF-like MARVEL transmembrane domain containing 1
  Uniprot ID: Q8IZ96
  ENST ID: ENST00000457188
  CDS Start-End: 122-631
agagccgggtgcacgcgccggggaggtagccaacagccgttgggacgcgacgctggttcccaggggagagccagccgctgccgcggcactggttcagacggccaggccctagggacccaccatggatcctgaacacgccaaacctgagtcatccgaggcaccttcagggaacttgaaacaaccggagactgccgcagccctgagtcttatcttaggagcattagcttgtttcatcatcacccaagccaatgagtcatttataacaatcacaagtctggaaatctgcattgtcgttttttttattctaatatatgtgctaacccttcaccacttgctgacctatttacattggcccttacttgatcttaccaacagtatcattacagctgtgttcctttcagtagttgccatcttggccatgcaagaaaagaaaagaaggcatttactctatgtcggggggtccctgtgtctcacagcggtaatcgtgtgttgcatcgatgcgtttgtggtcaccacgaagatgaggaccaacttgaaaagattcctgggagtcgaagttgaaaggaagctttcccccgccaaggacgcctaccccgaaaccggccccgacgccccgcagaggcccgcctgaagccagcccggcgccctagcagatgcacgtgtctgtcgaatcgctgcctccgagcccacccccgagctcgcatgctgtcacccattccagcctaaatgtgaccataaaattagggctgctgcttttatcgagaa

SEQ ID NO: 119855 - DNA, 797 bp, Homo sapiens
  Payload ID: 3502
  Gene Symbol: CMTM1
  Gene Name: CKLF-like MARVEL transmembrane domain containing 1
  ENST ID: ENST00000465057
  CDS Start-End: 1-394
aaggaaagccaccacacgcccacccccaaagcccacactcccaccccccacgccctctgcacacactgaatccaaactcttaaatgagatggcgatcaaagagcgcgtggagggccgagccaaagtcccgtacaaattcagggacagcctcaaacgtttctccttctcgcccactggaatgttgaagatcctgagactgagtcttatcttaggagcattagcttgtttcatcatcacccaagccaatgagtcatttataacaatcacaagtctggaaatctgcattgtcgttttttttattctaatatatgtgctaacccttcaccacttgctgacctatttacattggcccttacttaatgccgagtacaggaagcagacaaagcaaatatgagcaactttaattgaacatgtggaagacccttttagttatggagaggtttctcaggggaaactcaaatctctgtccgtggaaattttcaagaagggaagtccctgtgtctcacagcggtaatcgtgtgttgcatcgatgcgtttgtggtcaccacgaagatgaggaccaacttgaaaagattcctgggagtcgaagttgaaaggaagctttcccccgccaaggacgcctaccccgaaaccggccccgacgccccgcagaggcccgcctgaagccagcccggcgccctagcagatgcacgtgtctgtcgaatcgctgcctccgagcccacccccgagctcgcatgctgtcacccattccagcctaaatgtgaccataaaattagggctgctgcttttatcgagaa

SEQ ID NO: 119856 - DNA, 924 bp, Homo sapiens
  Payload ID: 3502
  Gene Symbol: CMTM1
  Gene Name: CKLF-like MARVEL transmembrane domain containing 1
  Uniprot ID: Q8IZ96
  ENST ID: ENST00000529386
  CDS Start-End: 122-238
agagccgggtgcacgcgccggggaggtagccaacagccgttgggacgcgacgctggttcccaggggagagccagccgctgccgcggcactggttcagacggccaggccctagggacccaccatggatcctgaacacgccaaacctgagtcatccgaggcaccttcagggaacttgaaacaaccggagactgccgcagccctggaagcagacaaagcaaatatgagcaactttaattgaacatgtggaagacccttttagttatggagaggtttctcaggggaaactcaaatctctgtccgtggaaattttcaagaagggaaggtgtaagcttcctgcaaagctgcaaaccactgtacctgcctcagtcaggcctgcccactatgggcagacctctcgctcagcctgcagaacccagctgggacttacttccaacctccaccagccctgctacatacccctgttccagcattaactaccaggcaccaaaacagtaggcattagtgcctttccaagaggcaagatcttaccaacagtatcattacagctgtgttcctttcagtagttgccatcttggccatgcaagaaaagaaaagaaggcatttactctatgtcggggggtccctgtgtctcacagcggtaatcgtgtgttgcatcgatgcgtttgtggtcaccacgaagatgaggaccaacttgaaaagattcctgggagtcgaagttgaaaggaagctttcccccgccaaggacgcctaccccgaaaccggccccgacgccccgcagaggcccgcctgaagccagcccggcgccctagcagatgcacgtgtctgtcgaatcgctgcctccgagcccacccccgagctcgcatgctgtcacccattccagcctaaatgtgaccataaaattagggctgctgcttttatcgagaa
